United States Patent Application Publication US 2014/0057251 A1 - sequence listing, part 162

SEQ ID NO: 310359 - DNA, 1417 bp, Cannabis indica
tattgcctcgcaaaacattaaaaaatggaaggcatttatctgttgacttcaaaatgaatctgttaagtgctgccattcttcctgtcaaagcctgaacttcgtttggctttgttggcgagggcatctcgattaaggcctttattttttcaaggttgggttcaattcctcttgcattcactatgaagcccagagattttcttgaaaaaaccccaaaagaacttttctttggcttaagcttcatgtcgtacttcttgagtatatcaaagcattctgcgaggtcctttgtgtgatctttactttttatcgactttaccagcatatcgttgacattgacctccatattccgtccaatcttattctcgaacataccattcacaagacgctggtgtgtcgctcaagtattttttaatccaaatggcatgactttatagcaataaagttccatgtttgttacaaagctcgtatgctcttaatcagggacatgcatttttatctagttatatccagagtatgcatccataaaagtcatcaaatcgtgtcctgctattacacccactaactagtcgatcctgggtagtggaaaacaatctttgggacatgccttgttcaaatctgaaaaatctatacaagttctccaagtgtcgtttagttttgggacaagaactgaacttgaaatccacgagggataaaaggcctcaggtataaagtcattagttaacaaattgtcaacttcttctttgagtgcgccttgtctctcaaaatctaatggtcgtcgtttttgtcgctttgctagatagttggggttgatattcaaatgatgacaaattacctttggatttatttctaccatatctgagtggctccaagcgaattgatcctagtttcctttagaaaacaattaattgttagtttagttctttctccaaatttttcttaatgtaaacacatttttttggattatttgaatctaaaataacttcttccaactcttcaatcggtttgaactggttattttcatcttggatccaaatcttttgcttccctctcatttttctcaattaggattaccattaattggtgactggctctcctattcaaaagttctatatgataacattctcgagccaataactggtcgcatctgagtactcccacccctgactatgttggaaatttcaaggataagtgttttattgaacttactgcccccagtacaattagggttggtcaacccattagcacattataaaaagaagggatgttaacaaccaaaaattcatgcatttgtgtcgctgataagggtggttctcccatagtcaatggaagctcgatgatgcccaagctcgcaacgctgtcaccaggaaaaccacataggtgttggaattattttaccaagatcttagatttactaacaagt

SEQ ID NO: 310360 - DNA, 2902 bp, Cannabis indica
ataaaatagattacattgaaatggagttttatttagggcataaaaactaacacagaattctttactcaacatatatagcatggcataatatttaaaactattaatcactagggtagtaaccctaggccaaccgctcacattagggttataaccctaatctcgagtctcatttaaccaccattataattctaaatatgagtgccaccgcgcttaactctacgtgctaactactgtcttatctgatatcctaagtacgtggagattcttaatcccaacctgctccttaacaagtgtcggtagtcctagtcacaattcttgggattcacaaatagggttaatccttaaatccactttcacataatcatataattggcattcaaatacaaataaacatatagagctcggaacgagctttctaacaatatttggaacaccccaaacggagtccagatcgaaaagttatgaacgaaacaaaatttaacattcaaactgcccaaaacccccaaccgggccgcgacactgcccaagcatgccgcggcacttgggttgaaaaatccaagatttcaaggggcgggccccggcgttaaaagagggggctgcgacacctgagtttcaaacctagaaataacacttttcagcaaccaaaactcaagcccaaacataccaaaaactcaacaacatgctcaaactcataatttataatttactaacaacaaccatcaatacagtagattggaaacatcaaaaatcaagctttgatcaagatcactataattaatttatccaacttaacaaacatcaatactagtaccaatcttaaatcaaaatcaacttaaaattaccaagcttgaaaataataacaagcagaaccaaattcagattaaagcacaaattatcatctctaaaatctcctccaagcatacaaagagcaacacacactattctaccaacataatcatgcataaaacacccaattcttcaaattctcacatacatgcaatccaacaagctatgaacattaaatactcatgaagatcaacatcaaagttcagaaacaacactcaaagtaaagaggtagaaaaactacctcaagtttctcacaaatccaagcaccataatcttcaatcaccaacattatcaatttgaagaagattaggaaagtatgaaaatggagaaaaagagtgagagggttcggttatgtgctataaaaccaaaaatatggttttcattttctctagaaatctcttttgttgtaaaaaatcaaatggtcaaatgaccaaaatgcccctagggccaatttaccacatatgcatacaacaagggcaaatttgtcattaaatcacccaccaaacttaaataaatatcataatattcaattatttataaaatgtcaaaataaaatcccgaaaaatgtatttcgggcccagaacctgattcggcccaaaatacctggttgtgactatactgcgtcgacttgtcagaaacacctagagaaagacagaacaaatatactctataataatatagtccaaaagcatgctataacattaaaattacagttttacctttctcgggtcaaaattatgaaaatgcccctggctcaccaatggggtcttaacatgtctattatcagtataattcatatatattaaattatataataatataatttcacattaatacacatttaactagttaaggtttgctaatatatattattccttaatcttagggtattacactcatggttggacgtatgccaaagtacgaccatgcaacctgcaaagtatgaaaatgacggggaggacaagtagtggagatgcatcatctgaatgcactaacacctcaaccaaggatacgttgcagccaccattactgcaccttgggaccacttactcaacagcagtacatggtgcatgaccacctcctacagttagggttgaacatcaggcgggttgaccgggtttcaaatttgcgggttttcggtttgcaggtttcaggctcgcaggttcatagatctacgggttcgggttgaccgggttgatcggatcgttgacccggtcaacttttttttaaaaaaaatcaaatttaatgtgtattttttctatatattaaattaaggataataagttataaacttagaatgtcataatctaatatttgttagattaaaataaaataaaaaatgctattaatttcaaatctaaaataataaaagtcaagttccaaaccatatactaatatattatatattagttatttttaatatgttatctatgtatatgtaattaaaataaaaaaaaatgaaaaaacagtgatcgggttggcgggccagttcaggttcaacccgaaacccggtgaccataaaaaaccaattcgagaacccacctagtggtgtaccgggttggacccgacctgcccgaacataataggttcttaaaaattttcgggttgagcgagtcaggtcttggtcaaatccagtcaaaatgttcattcctacctagcggtgttcattgaatcacatccaatctttttaggtctatccagatccgatccaatcatatattggatgttagattttaccatccgatccgatccaattaattttatcatccaatcgatccaacatccattggatgttggattggaccggttctatccattggatgtatttcatatatatttatttatttaatttgagtttatctaatattttagacctagtattttttggaatggatcggatccatccaatattttagatccagtatgtattggattggactggatccatccaatccaagaaaaaagagtaaaactttaatgttaattttcgtatatacatatagatttgacgtataacaatataaagtctaattactcatccaatctaaatgaaaat

SEQ ID NO: 310361 - DNA, 1525 bp, Cannabis indica
agggtgttacattgctattttgagttaattatttagtatttatatatgttgatgtatacatttatacataattatggttagtattttgtacatatttttaagtagtttgaatatgctttatgatatgtatgaatggttaagaaatatgttagcttctggttttgatacataataacataattgtatattttattaataaatggtattttagtaaaactttacgcaaaaagtatttgtataaaaatattcgtatgagtaaatgggttgaacaagaaaaaaaaaagagatttaaaattattattatttaaatatcgatatttcttttaaaagataaaaagaaataattagtaataataataataataataataataataataataataataataataataaaaatagtaagttaaattgagagcaaatatgagactatctttacttttttaattgtccactctcttattttttctcacccattacgttacatgaagttaataaaaaattaaattaaattaaaaataggctctacaaataggaagagttgaagacaggaaaagaatatcgacaacttaaaaaatttttgagagaaagagagaaaatagaaaagaaaaaaatactccaatatttttattctacaaaggatcaacaagcgtttaagggtaagtctttaatctcattcccatttctttctctgtttattttgatatttactatctctcttattgtctctctattcatttatgggataccgttattccatgaatgaaaatggatgctctcatctaaggaatgtcctcattccactaataaattggatgatgtattacaagaaatgctcttattctaccaaaaaaaggaaaccctcatctaagaaattctaccaattccaaaaaaaaagaatgctattgtctataaattttaggtttgtccataaattttaagtagtttgattgtcaagattgctgaaatcagatcttattatatatgtcagtcaattaataattgaataaataattaatttaataattaataaatccttacaataaaaaataataaataatttaatattaaaaataatttaagtaatttaatatctaattataaacatattaaatttaatgtaattacttttaaaactaattaatttaactaaaaaagagttttatattattttatttataaaaaatggataaataattagatttttaatttaatatttaagaagtacattatttagatttaagtattattcaaacaaataaatatattataagacatcgcagacgataccgacacatacaaccatggcagaagacatcgcagacgatgccgacacaataagggcagcagagatctcaaatgatgctgacaccacatgcgcagtagacatctcaaatgatgacaagtttgcaaatatcgccatactacccacaaatgccaggtgttgctagagatgctagtgatgatgacgatgctactacaaacttctttttagaattttttattttagttttacgaacta

SEQ ID NO: 310362 - DNA, 1864 bp, Cannabis indica
caacaacaacattttgttgaggtctacctacacatgaattgtgatgtgtagtgccttttatgttgtaaaagttagtgagtgtcaattctttggcattgtcacttctaatagctttgatattgcttttttgaatattgacaaaagtaaagaagtttggtatgattgttggggcatcagattttacccttagcaagtaaatccatgtatactgtgaatggtcatcgacaatagttaggaagtacttgtatccttcaattgaagatatgggatatggtccccaaatgtctatgtgaataagatcaaaaacaacattagaaaaagtttaattagatggaaaaggtaattgtttttgctttgccaaatgacagtttggataatgaaatggaagagatgaattagtagagaaatgtagttgtttattgattttatttgtaatgagtacagaggggtaacctaggcgattatgccattaatgtttgtctaagagaacattacatgaaatagaaatatgaagtatttcttgctataagtaatagaggttgccttgtctcttagctatcccaatcttcaaggcccgagaaggtccctagatatagcattcattagaggtaaacaccattgtattagaactgttatgtaataaggcactaacaaatagtaagttaaaattaaaggatggtacatagagaacatttgtaagagtcaaatgagtgttaataatgactgtaccatttctttcaattttaactaaagtgccattaggtgaagtaacagttttatgagatggattgtgtgtgaaagtattgaaacatttcatgttgcagcaaacatagtgagtagcaccactatcaacaatccaataagtaaaagagagaggatctatgttactagaaaaattgttgacacctggtgtatcatgacatgtagaggcatctgtggtgggctgtaactattgtgtcaacattgaaataatctgttggcattgagcttgggtcagctgggatggattggcatcattgttggtggtgaaaattgtagagtttgtggtggattcatggtttgagagtggtctagtttgcgattatttgtgcttgaattagcaggtttgttgttgccataaccaggggaaatccatgtaaaagtaacatttatctttgtaatggccaggtttttggcaatgagaacacatgggacgaggtttcttggatcttgaatttttatttgctgaaggagcagcagaaccagaattcgaagatgttggtgtggaggtattagaagcaacaagagtggaaatggattgatttcctaaagttctttgacgttcttggtgaataatcattgagaaagcttcgttgaggggaggacgggatcaagggagaaggatttgatcacgaatgacatggtaggattcattgagacctttgagaaattggagaagttgatcatggttgagatgatcttaatgttggtttgctgcagcataggtgcaggggatcttgggcctcaactggttgatttcatcccaacttgcagtgagtttggtgaagtaagaactcacagaatcatctccttgatgtaaatatgtgagggtttcattgagctcaaaaattcgagggtcgtttccttgattgaatcgattgcggatcacaatccacatttcagcattagtgttgaggtacattatactgctcttaatctcagaagaaatagagtgtaaaaattcaagacataaccatgtggttacatctagtccaagaactaaagagagaatcattagggggaggttgaggtaaggtaccttcaagaaatggagtcttgttgcgagctccaatggataatttgaaatctcgttgccatggttgaa

SEQ ID NO: 310363 - DNA, 1468 bp, Cannabis indica
ctctctctctctctctattttcaaactcttctccttgtctttctcttcataaatttcgttcctatagtgatagaatacatgcccactcatatcagtcaagttctcaatcatagtgtggtagactgtgaagaatccaacacctaaaggagatctaggctcaaattttgttattactctgtgacagaaacgaacaagagttagagatctgagtggaaggagacatgttatttcattgcaaccaatgtaaagtttcctaaactttatatgtgttaatcaacatacatgttagtaaatctagatcctgataaattaattcccaacaatatggtataatgataattagataatacgaaattcttccattgcgtatttgatttagtaccataaaaccagcatacatagcaccgaggttgacatatgatgtcaacttagacgttgggtaagtgtaaaatgtccaaatgatgtactttaagatgcttaagggatattttgacatcacttagtctgtttatgtgttttggtgaagctggtcaccaactctcagagattttgctattctgcagaaaagagagactcgaaattcttcattttcgagtgagtttcccatgttagaaatgagaaatgcaaagttgtgattttgacttcactaacttcatggatcttagttattgtgaaaaacaagatggacagtcgaaacagaatcagaattagataagtgaaactcagcgcactaggccatttgtcagcttgggcactgggaaccctagtcttgagctcttgggatcttattttggtagttccaaggttcgtgaaattgaagacgaggtttcctaccctatttttgaccatttcgaaatcattggttgaataagatttggcatatgagcaatctaaagcagcgccccaggttgattgtcaacttgggccttaggcctagcaccagggatcaacttaggcactgggtcctatttgaaaagggctcaaatttgtgtttttcaccttgagttttctggaatcttaattatttccgatgacagaaaaaatgcctgaaacactttttggtgaacttgattggaaacagcacaggttgacaatatgttaacttgatttctaggcccaacagcacgtgtcaacctgtgcattgggtctcagttatggcccttcaaaagttccattttatccttgaaaatagttagttaagtctcaatcttttttgaaaacgaagaagatgcttggaagagttctcaaaaaacatcatcaaaatcagccgaggttgacaaaatgtcaacttgggcactagccgagccccaggatgtcaacctgggtgctgggccttgtttctggcacccaggaagtgttatttctgttggaaattattctaagtgggtttgaaaaattcaatgaagaagaagaaaggagagtggcggctaggtttagagtgaaggctcaggtttttctctgaaggaac

SEQ ID NO: 310364 - DNA, 1603 bp, Cannabis indica
aacatcagttggggctgcgaaggtaggtacttttttataatcaatatttacatttggactggcctcaatcgacaccccagattgagctccatacaaataagggtaatcatcataccatgtcctggttaaacctgagtcattggttggagaaatatactgaccaccaacatttaatctatacatagtctgcatatttgtggtcttggcatctaaggtttggtctgaaaatcccataactgaaactgtgtcaaacagttcaggtaccagaattaactcaataccattgacaaaagcaaaaccaagagttggctcaaaggtgagacctagagaattagaggcagaaggagctaaggtgtattctctcatgacataagcttgtgtaagagacttacaagtgagagacgtgctgaaatttttcagtagagttaaatcattggcaatgacattgaaataagattcctcagcattgttgctaccgtaaactgaggggtaaaaatggagtctaagccaataccttttcttgggtttgaccgggaacttgtatgttaccttggaggtgaagattcttgctgtcatgtatggagtttcagatataagagaagggtcttggtattgtgctctaacagaaactgagttttcttcattgatgtatttagtatcaggctcccaattcctcccatctgcatctttggctgtattttcagtaccacatcccaatatcaacgaatccaagtcagagatggagccatggaaggagttgaagagaacaaaaagaaaaacaaggaaaaaagaattgtgggttttgatattcatggctgaatggaatgaaataagacataaacagacgttgaccatgaaaatggcgtacaggaaaacaaaatgtcttataaagaaataaataaaaggtgagatatatctttgagaaagttttcctgtacgcctcaatatcaatttgatgtttggcctttttgtctatatattatgtgatccttattttgggggatggtaactaaattcatttctatagttcgccattgaaagcaactcaagctttcatttacagagccttacctggatcatgagaccaaaccaggctagaaagagaggagaaaaaattgtgatcttttattaatttattgtattttttgtatgaatggttatctttttttgcatgctttgtctttgttttctccatcattggtcctaagattgaaagaagaattggttatcaaaaatcaatgatattgagaaagaattggtggatgttttgtgataggttgtaacatatgtggaaactgactaattttagcgttggttttcaaccgttattaattgcataaaattttgcatcttttaatgacacaatgtcatgcaggagagtttatggaataaaaattggagccaaatcccctgtgaaattattattatatagaaattttaattacaattaatttgttattattgaaaaaatatagagaaaattacccttgaaaatgaaattttgaaaaaaacatcacaattaacactcttatttttaattgtgaaatatacccttagttttataattatttttgaatagatatatacgtagtgcttattactt

SEQ ID NO: 310365 - DNA, 1406 bp, Cannabis indica
aaaaattgatgcaactctctttgaagaacgggcaaatcatagttgaagttttgggggttaacgaagcagttagttggatcaaagcgactcgttggtctaacgttgtcatcgaaccggattgtcttctcgttgttcaagcaattcgaagccaagtgacaatgggctcatatttttgtcaaattgttgctcaatgtcgggatcttttactagaattgggatgtgtttccttagcttttatcaaacgttctgttaatagggtagctcacttcttgctagagcttcttattttcctgctaatgctgaacgtgtttttactgagctttctatttgttagacttcacgaatgttttgctgaatgatattatctaataaaggttctatcttttatccaataaaaaaattatgtgaatgtagttgaattagtagcagttgcaatttattgtttcagttttaattttctaaatagaattagtagcagttataaagttgtctaatttacttttagtttctcttgtgctgtttgttttcctctgatctgatctgacttgtgctgattatttcttttcatatttggagtaagtcatgtgttttatgtttgtattagaggttgtctaaagaatgtcaattgatcaagcctttagtctgatttgtgctgattatttcaaatgcacttagggcccatcttccaactatgttgagagttgtttatgaaacataaattttaatatgcatatgcatgtcttactcttttgttatttatccgttgtttgcaaagcttatgtttatctccatgatgtgcttgtaggttatggcgacaatttgtgagaagctaccttcagatagcgttatgctggtgtacctttcaacctcaggttaggttgcttttattttgctaaaaactaaattgccttgtgtagttatccaagataagtaaccttggagttcacttttgcagggaaggttggtcgtaatgttgctccaacagaatacatgggagggtctaaaaaattatcaagaaataaagtccacgagcttagagtactctgtctcattcttgtgtaattgataagggagagtcttcaagtggatattatgataaatatttatggttcgggcctagaggacatagtgttaggtcccttcaaattatatcatataagcaagaattattcttatatgagcatttttttaatgttcaaataatttatatcctgaagatattattttatttacacacatggactttttttcttgattatcgatagcaacaatagccatgcattcaatgcagtttgtcaaaacttgggcattgctttttcctggctgtgttttctccacagcaaaaagaactttgtaaatcggattttgttcaattttcactatactttttgttggattttatgccc

SEQ ID NO: 310366 - DNA, 695 bp, Cannabis indica
tttattgattctaaaagcttacaaaataaaaagtctacttctagaactcattctatggctacatccacccgacatgccagataagggccatcactgaagagtgatggatacttagctctttctaaattaactgttatgagtgagttgactcaactactattgaagagtagtatacgtacaagttggtcatggatagtagtttctaagatgttctccattcaagtatcttggtaggagaacaaactccatgttctaattgtacttgccaagcttgtatgcaccatttctttttatcctcagaacttagtacaggcaacattgcttcatagccataggataatgcaaatggtgtttgcccagtgcctatcttgtcagtggtcctgtatgactagagtacatttgagagtaattcaagaaaatatcctttcgcctcttctagattctttttcatagtgtccttaagggtcttgtttacagcttccacatgcccattcgtctaaggatgagcaacaatgaagaagcttttaatgatgtcctatctgttgtagaagctagtgaacatgtcactatcaaattatttcccattatctgatataatcttttgtggcagtccaaaccaacatttgattttcttgactagcttcttgttgggttttatgccctaaataaaactctttacaatctgattagttatc

SEQ ID NO: 310367 - DNA, 2077 bp, Cannabis indica
agccagccctgaaacgagcaatactggtccagacagccaagctatccttcctcaactcacttctacacagtatcaacaacttttaaatttgctggctcatcagcaaagcaacatagctactgcagatcctagcacatctacaggtaacacttgtattatgctttccaatgtaaccaagcttcccttcaatgaaacttgaatacttgattcgggagccacaaggcatatatgttctgacatgaaattgttccaatttgtatgtaaaatcgatcccattagactgttgctaccaaataacaactatctgcttgttgataaaggaggttcagtcaaaatctcatctaatctggttttaaataatgtgttgtatgttcatagtttcaaatacaacattatatctgtgaattgcctaactaagaaaattttctttatgtgaaattctatactgatcattttattatacaggacaaaatgcacaagaggatgattggcaaaggtgaatctaggaatggcttatacatactggatcctacacccgatcgattccctgtgttctctataagtgctgatgtttggcattctagactaggacatccctcaaataaacatttgaatattcttagcaataaactaggatgtaatgtttctgttttacacaaagacacaccttgctacatttgtcccttagctaagcaaagaaaacttccctttgctagcaataataaatttgcttctaaaatttttgatcttgtgcattgtgatatttggggaccataccatatacctgctcactctggacaaaaatttttccttactttggttgatgatcactctagatttacatggacttatttgctaaagcataaatctgatgctgttaatgtgattccccaatttattttctatgttaaaaatcaattttcttgttctattaaaaggtttagatctgacaatgcccctgagttggcattcaaagatctatttcagcagcaaggaattctacatgattatacttgtgtagagacccctgagcagaatgcaattgctgagaggaagcaccatcatctgctaaatgtggccagggctatctattttcaagccaatatacctattcgtttttggagtgaatgtgttatgactgctgcatttttgattaatagatttcccactccaaacctgaaaagtaaatctccctatgatctgttatttaaaagacaacctgattatgcttacttgagaacattcggttgtcttgtttttgcttctaccctcactgcacatcgcacaaagtttgatgctagggccaaagcttgtgtttttcttggttatccccaaggtgtaaaaagatataaattgtatgacttgaatacaaagcaaattttcatctcaagaaatgttgttttttatgaaaacatttttccttttcacaaattgaatgacaataacagtggcattgatccttttcttacacctgcactgccttcctccaacattactaacactcctgttggagattatcctactatccatactgacaatgcaggaacaaggcttgaatctcccatcagcaactcagcacctactgctgcatcacctcagcaacccgacaacagcactgctgaatctctacaacctgacaacaatcccactgatgtttctccaacatctcgtgaagccccacctgatgtccccgaagatcttcacgaccaactaaaccaccgagttacctcaaatattttgaatgctactcatacattcaagatcaatcctccacaccccattctttagataaattcatatcttatactcgattagctaactcatacaaggctttcattcttgcagttacttcacaaaaggagacacaaacatacaaacaaacaatacaatacagacaatggctcgatgctatgaacaatgaacttattgctctcagaaacaacaagacatggtctgttgttccccttcctcctggaaaaagagcaattggttgtcgatgggtgtataaaatcaaacttaatagcgatggctctattgaaggacacaaagctcgccttgttgctcagggatatactca

SEQ ID NO: 310368 - DNA, 2524 bp, Cannabis indica
actcacatcgaatctctcagtcactatcccctgtagcactcctccccatctctcgacactactttccacacaacaaaacccgattctgcaacatcctgagcaaccaaactcggacactgaacagccaaccattccacaaaatccaccttccctgcccatttccaatactcaaacagatccattatcaatagagcaacctgacatcatcactgctcctcccatttctaatgtgtcttctacaggtatcaacacacatcctatgaagacaagagcaaaatctggaataagaaaaccaaaagtgctaatggcttcacttcaaccaacaacagtaaagcaagctcttaaagatccaagatggtttcaagcaatggaaacagaaaaacatgcattggtgaagaacaaaacttggaaggtagtcaagttaccacctggcagagttcccattggttgcaaatgggtatatcgtatcaaagaaaatgttgatgggtcacttgatcgatttaaagcatgacttgttgccaaggggtatcatcaacaagctggctttgattacaattaaacatttagtccggttgttaagcatgtgaccataagaattgtgctttcgattgctgtctctcaaagttggtcaatcaaacaattggatatcaataatgcatttctcaatggagatttgcaagaggagatatacatggttcaaccccctggatttgttgatccagaacatccagattatgtgtgcaagcttcaaaaggctctttatggtctcaaacaggtacctcgggcctggtttgacaaattgtcatctgttgtgattgctttggggttcaactatgctaaaacagatcattccctatttgttaaacattgtcctcaacacacactttatgtcttagtgtatgtggatgacattgttattacagggagtgattcttctcaagtgtcagctctagttactgctctaagcaacaaattctctcttaaagatcttggtgatcttcattatttcttgggaattcaggttcttcgaacatcagatgggctgctgctctctcagcaaaaatacttgcaagatctcctctataaaactggatgcagggagtcaaaacccaaaactctcccatgaatgctgggcttcgactctctcaatttggatctgatcctgttgaaaatccatctcattaccggtccattgtaggagctcttcagtatgcaacaatcacaagaccagacattgcttacagtgtcaataaagtatgccaattcatgcataatccgttgcaatctcactggatggcagtcaagagaattcttagatatttggctggcactttagactttggacttcatatttcagcaactcaatcaactcaccttcaagccttttgtgatgctgattgggctgccgatcccgatgatagaagatctaccactggtttctgtgtattccttggtgacaatctcgtaacttggcaatcgaggaaacaaacaacaatctctcgatcctctacagaagcagagtttcgaagtctcgctgttgttgtttctgagctcacttggattaagtctttgctctctgaacttcagtacaagtctattcctactcccaccatctggtgtgacaatgttagttcagtcatgcttgctgccaatcccattctacatgctcgaacgaaacatattgagatagacttgtactttgttcgagacaaagtactgaacaaagaaattgatgtcaaccatgttccaacagctcatcaattagctgacagtctcaaaaccagtctccagcaaccagttcactaatttcaggaccaaactcagagtgttatgctcttccaccctgagtttgaaaggggctgttaaggataagagttagttatggttgttaagtttgttattctctgttatttagttttgctgagctgtaataacaacttcctcttcttgctttgctgttctaactgtgtatataaactcactgttgtactcagttcattctaatggttgaataacagaatttgttccttgagtttctttctctttctctctgttattttaccttgtcagctataactgtcggggtatcaatctaagtctcacattaaaaaaataaacaagagttgcttacaatttaagtgtcctacctacttcattagtatgaggtctttttaaaaaagtgtttaaaaataaaattgtgagctggtggccaacaaagtagaagaatagggccgaacatagcacgagcttggagcccaagtacttttatttgttgctaactgtgatctcttcccttgaataatacaaaatgattcctttttctttcccatactcaaaacttgtagcttgttctttgtaagcatcccattgaggggcttaaacatggttaatgtaataataatgacttgtagactaaaactagttaatgctctaaaaatttaggtgtttaacttcttttaaactttcttaaatacttagagcatgtttagtattgttttttggtttttattttcaaaaaattgtt

SEQ ID NO: 310369 - DNA, 1628 bp, Cannabis indica
aaccatgcaacataaaaatgttatttctgatctttattattaagtaaatctgattatattgaaatgaattttatttagggcacaaaacccaacaacttttactctaaaaactcagcagcaaaaatacaaaggtataagttgaattacccatataaaatatcctaaaatctcatctataacacatcaaaagcatacccaatctctaagccacaaaattaagccaaacacatcaagattaacatgaaatccaaccacatgcacccaagagcatcataaccctttttcatgcttttcaatcatcaaatttcagcaacaactcaagtaaaataaacaacaagaaagctacctcaagttagcaagaatcaaaagttagaaaagagagtttgagagagggggggggggttgggttggagggcaagaacccagaaaataaaactatatttctcttaatattcctttattttgttgtagataaatcaaaggtcaaaatgaccataatgccccatgggccataaagcacacacacatatgcattcaagggcaaaaatgacataaacacatatcacattactccaataaattttagaatattcaaccttaattaaaataccaataattaatcccaaaattgtatttcgaccccgaacccggttcggcccgaaataccccgttgtgactatatcgcgccaacttgtcagaacacacctaaataaggacaacacaagcacactatataataatatagtccataagcacgtaaataaattaaattcacagttttacccttcacgggtcaaaattactaaaatgcccctagctcaccatcggggtcttaacatgtcatatctcatatgaattcacatataataaattatataataatataattccacaataatacttaattaactagttagggttttgctaatccatttccttaatcctaaggtattacatatttattaggatctaaaataatagtttattatggtcatgctatattaaaatatctcttgtcaacaaaaatgctaaatctcgcttaatctgttggatattgtttttataagaattttgattttgagatacgtgataaaaaaggctctgaaaatgttctacctaatcatttgtataaaattattattgaaactaatcatgattccaccaatatcattgaattttttcttgatgaacaactcatgcatgcatcttattttccttggtatgctgatattatcaattatttggtcactggtgaaattcattctcattggtctaaataagataaatttaaattttatgctaaagtgaaaaattttatgtgggatgatccttatttgtttaaatattgccttgatcaaataataagaaggtgcattttaaatggtgatcaatctaaaatcatatcttttttttcatgatcatgcatgtggtggatatttttgttgtaagaaaactcctttgaaagtttaataaagtggattttattgacctactatcttgttgggcattattttacgaggatctagatttactaccatgtatgttgtttaacatcaaaaatatggatttctaaaacaatggaaattaaacacatatatgttgggttttgtgtcctaaataaaacccat

SEQ ID NO: 310370 - DNA, 2015 bp, Cannabis indica
ttttatctattttttttttattattttattattttaatgacacaaaaaataataattttttaatagttaatttctaaataaattttttttaataattaaacagtatcattattaaaaacaattttcgagaccatgacaattagagagtctaattaaaacttcttaattactttcaattatactactacatacggtgtaattatataaatatgataaattatgtaattacttataattattcctaaatccaattacatcataacttttcaaatataggtgtaaacttaaaaatagttcacttgccttgtaattggcggttcaaataaattgacaagtaaaactaacactattttaactttaaagagtataatataaaatacaagaagaacccatgatttcaccaccaaaagtgagaatatatatatgtaggaacaataagttatggcctttaccatttacatggttgaaagttcaaagaagacattatgcatagtactccactgtctacaattaggaaatatatatgtctagaaagtaaatactattggtctaaattaattttaaataaaatatgtcaagtttaatacatttatatgcatactccagtgtctacatttatgaataaaaatccaatgcctccaattttgtctttcctctcattatctcagatattgacacgcctactaatattgtaatttttgtaatttcactgtatggaactatggatcatcatgtaatctcattctaatagtatttttttttttatttatggaagaaaagtaacattggataacatcgatccaaagatattttcatgaggagcccccaattggagaccagcttgaatatatagtaagtcacccacaattcctgagcagccagccattgctgcaatcccatttttcaagaaagcatcaattaagaaaatagttgcctctgtatgcactttccatcgtatccaaagagctgatattatcagtctcaggatttctccatgtcggtcataataatattctctaaattaatttgtaaataccacaaaagtatatttttgtaaaaaaaaataatgagaaatggtaaaagtatgactacataaataaattattttgaaaaataagcttaatgtaactgaatgaaaacatttgtagcgatttgaatagtttagagtaatttttgtaataaaaaataatttatagggcaaaactgtataaaaattatagttgaggacattgacaaaaattcatatttattgtaaaaaagttaatgtaaagaattaattgagttggaatatacatatgagaagaaagacaaatttggaggagacaagagtagtgaataggcagatatattgttcctgtgtactacattattgccatgaacttagcttcattggatactttattcattaacattaattataatattaaatataatgtatgtatgtatgtatgtatatagatccctcatccgaggtacattatgtttctttctattttttaatttttttagaatgtttcatcctcgctcactagtcactctagtttcattttcaattatctgtcataatggaattaaacaaatgatgaacttattatttggataattatatacaattataataatttaagaacaacttcgtgattacaaggattgattctacaatgtacgtaggaagtcatgatgtttggcggattgatagtcactaataaaactactctacattttaggaaaaggtatttacaacttctttaatagagtgctagctataaatataatgtatgtgttagacctttatatgtataaactgaaatatatgaatgtgtatataaaagtgcggaataaacaaatatatacactatataacttaaggatcgaaataactccagccattgattcttgagcttcaaacccacataagctttgatctgcaaaggaaactgattgatgtgggtaatcgggcttcctcgctctctcaactctctttagatagaatttgctgttatgaacagaatgag

SEQ ID NO: 310371 - DNA, 638 bp, Cannabis indica
attactcttaatatgcatggtttgtctattaatattgttcaactatagccattttattaggttattaaattagaatatatattaaattggatatcaataagtgatatcttttattttattttattttattttgactgttgtcaatgaagtgggaaacaacctgagtgaaataagtttgggaattaatatctttgtttccagaattaaatttcattgtcaatgaacagtgggtacaaaatgagctgcatctttatatatattatatatatatatttattttattataagcagttatttctgtgcaaacgtcgctagctagctattatagcctccatatattgttttttcatggagccccatgctctctttattactatttctatacttgcagttatttaattaaactcttaatattaataaaccaaaaaattaataagtcaaaaggctaacattttctccaatgtagtagctataaatatggtggtgtatatatatttgtttatgagaaatgttaaagggcatcagtggggtctagcatcttcttatgtgttaatatcgttattggttcaattaagtattaggttttatatgatttaatataataacttttagaaagtatcgctagtcaatcgcaatgt

SEQ ID NO: 310372 - DNA, 13066 bp, Cannabis indica
tcttagtcgggtcgtcgggttcgtcggtccacgtccagttggcatgggtccgtggtttcgaggtttcaggtcgcaggcctggcgcaagtctaagtcctggtcggtcgtggtcgtaggttcggttctacgtctagatcttggttttggtccaagtccaattcatggtccagggtcttgatttcggttcatgtttcgattttgggtctcgggtacaacgatggagggttttggaccaggtcaggtatacggtcccggtctgacgtcccggtcgtaggttcgggtcccaggtctcagctcctagtctttgtcaaggtctcggtccaggttcttgtctgagtttggtttatggtttgggttcaatctggtctaaggtccaggtcctagtcacaattcttgttctgattatgggtccacgtttggttttgggtccaggtctgggtccagcttgtgggtcggggtctgagtcttatctgtgttcgggtataggttttttggatctcgatctgggtcgaggtccgagtctaggtccaggttgaggtcctaggtctaggtcccatgttcggttcttggtcttcatctaggtccagttgcaggtcccgtgttacgatctcggtctgggtctgggttgatatttgggtctgggtttgggttcgtgtccatgttaaggtctgaggcccagtttaggttaggggcttcgtctgtgtccgagatcgagtctcgagttcgggttcgggttcaggttcgcatctcagtcctagtctgggtccaggacagggtctgagcccgagttccggggctggcttctagtctagttccaggtcctagtccaggtctaggtcctggtcctggtccaaggtcctagtcaagttctagttcaagtttcggttagggtcccaagtttgggtttggatccaagtcctggtccagcttcgggtccttgtttgagtcctagatcaagacatcgaccatgggtcttttctaagccccagctcttagatcccatgataagatttggatcccaataatgggtcccagtcttgattcggttcatgtcctagctctcggtctgagtctaggtctaggttagggaccgggattggagtccagttctgggtctcgaaccaatatctgggtcccgagtcctgttcaatattcaggtctaagtttaggtctgggtttgagtcccgagtcctagttcgattttgcattcaggttttggacccaatcccaaggtgggtctgtgtccgagttcgggtcctggtccggtttcagtttttggtttgagtctaggtcctggtcgtggcttgttcttgggcctcgatccgcttctagtttatgttccagttccaagtcacggtgtacgggttcgggtcgagtttgggtccgagtctaggttcgggtcctcatttaggttcggggcgagatttaggtttgggtttcggtctaggttagggtccgaggctggttccggttcttggtttaggtccgggtctaggtccaagtctcgttccaagatctcagtctggttccagttcaagttttggttttggttcccgagtgtgggtctgggtctttgtatgtgtccaggtcctggttagagttccattttaggtttgggttctggtctaagtcctagatccagataccgactacgggtttggtccaagcatcgagtcctggatcccaaaaacccgaggtgggtcctaggtgcaagtttgggtctagagtcgggtcccggatcccgatccaagttctgtcatagttcgggggccttattcccatgtctgggtccccactatatgttcaggtccaaggtctcgttttgggtccaagttcgtgttctagtacagcttcaagttcggtccgagccctgaatcttgattgggactagaacccggattgggatcgggacatggggctggcacccgagacccgagactcagactttggacctctgagaaccatatcgtgacatagattggggacttgggccaaaaacctgaacctggaccgaggatctggacctagacgggggacttggaccctaaactaggccccagaaccgagaacgagacccaaaactcgaccccatattcgagacacgggacccgaccttggacaagacacaaccccgaacatggacccaaacccaaacttaggactcgacttgggacccaagacccgaactagaacaagactggattcaagaccgagatccaaatctagacatgaggcttcgacctaacccgtagttagttcgagtgaaggtcccactacgtgttcggtactggtccttgtctcggctcttcgcctggtctggctttaggtcacgatttggttctcatgtcccaagattgaatatcgggtcccagtccctgtcctaggtcccggtcctggtccgtgggttttagtcccagtccaagttcaagtctgggtccaagtcctaatctcggtctgggttcgagtcccaagttcgagtctaagttctggtatgagttttggtttgggtccgggtctaggtcttgctctgggtctgggtccggatttcagtttatgtataggtgcaagtcttggtcttggtctgggtctaggttctggtacgggtcttggttctggtccgggtcccgggtcacggatcctgggttctaggttttgggtcgcagttcctagtgtaagtctaggtccaagttctggtctgggcttgggtatcgatcccagtctgggtcgggatctgtgtttggtttcacgtctagatccggtttagggtccaggtccaattcctattctagggtcctaattccgattcttgttccaatttttggtctcgagtccgggtttgggtttcgatcctggtttggaaattgttctaggttcaggtcttggtacgattgcaagatctagacaccgactacggcttgggtccacgcctcgagttgtgggtcaagattcggatcccaatcttgggtcctgctctcatttagattcaaatcatgggtcccggtctgtgtccgtgtttgggctcaggttcaagtccgagactgagatcggggtcaggtcttgggttccagtcccagtcctaggtctcgattctggttctaattttgagtttgggaccccaatctaggtctgggtcctggatcctgggtccgggtctgcgttcaagttcgtgtcttggttcaggttcgtgtccctagtcccgatccgagttttgatttaggtccgcgtcctggtccgggtgtgggtctgggtccttgttagattccagttcctggactcaaacccagacttggactcggacccaggtctggggtttgggtctaggtctgggtcagggtttgggtccgagtccgcgtctgggttggagtctgggtatgggtcctagatccaagcaccgagtacaggtcaggtccaagccccgggtctagatctagatcatagtcttgggtccaagtctagttccacatcagggtcccatgtcccggtccgggtcctaggccagggttgggttctaggtcatgtcctcggtctcggtcccagttctgatgaccatgttccgagtctaggtcccccatccaggtctgcgtcctaggtcccggtctgagtccatgacccaattagggttcaggtcctggtccgagtatacgttcgggttctgatctcggtctgggtcgagatctgggttcgaatctaggtctaggcttgggtccgagtcctaagtttcgatctgggtctgggtttcgaggcccaagtccaagaatcaggactaggtcgtaggtcttggtctgggtccatgttcgggtttgggtcctagtccaagtttcgattttgatttagtttatgggttcgcgttttgctctgggtcaagctcggggtcttagtccttgtccgagtctggtttcgggtctgggtcaaggtctggatcccgttctgggtctttgtttgggtctaggtccgaggtcaggtcctgggtgcgggtccacgtctgggtctcggtcagggtctcggtccagagctaggtcctaagttttgatcccgatcttgtccaagtctgggttcgagtctagcttcgtatatggatccctatctaggttcgagtcttggtttgggatcgggtcctaggtctaggttcaggtccgagttcgggtttggatctcgatccctgtcttggtacacgaccgtgtttgggctctagttccggtcttagttcgggtttggggctaggtctgagttcggttctaggtctgggtctggcacctggtcatagtcctagtgttgttcgagtgtcctggtatggtggttcttgtttaggttccagttttgggtcccacgtctgggtaagggtccgggttgggtcctagtctgagttcgcgtcctggtctgagtcccaaatcttgatccccatcacgtgtcccggtctagttctgctacatatcccgagtccccggttcgagtttgggtctgagtttgtgtccaggtttgggtctcagtctaggtctgcattgggatccgggtccgggtccaggtcacgattcgcgtctaggtctgggttggagtccgggtcctggttcggttatggttcaaggtctaggtccaggtcccataatgattctaggtccaggtccatgtcttggttctggtcccgttcccgggtcccggtctacttctggttttgattctaatttagggtcacagggtatgagttcgggtccaggtttgggtctgggaatgggttcgggtccaggtctgtgttggggtacggggttgggtcctagatccagacactgacagcgggtttggttcaagcactgggtcttgatccgaatcccgatctcaggtcccggtctgattccattttgggtgttgggtcacgagcagggtcctaggttcaagtcctagtcttgggtcttgggtcgtgtcttgggtgtcggtcctagttttgttgcccaagtccctatctcgatcgcgttctaggtcccggttcttgtctaggtttgggtctcggtctagaaatggtgttgggtcctagtcgcggttcgggtttgggtctcggtctgggtttttctttacgtttggcttcgggtctgggtcctagtccttgtccttgtctggttccagttccagttacgattccgagttcgagttttggttcgagtttgggtcggggttcgattctgggtctgagtttggaatcgggttcggatctcgttttaggtccagattgggctccgggtgtgggttagggtcttgagttttggtctaggatcgggtccgagtccaggtttcgatctggatctgagttcgggtttagttttgggtctaactcctgggttctgatcctggtcttgggttaagttcgggtctgggtgcaggtctaggtttgggtctgagtttgggtcccaggattgagtcccattttgggttcggttttggtcctagtatgggttcgtgtataagaacatgtcctagttttggtccaaagccggtttcgggtttgggtctaggtccgaattcagaatccaaggtccaggtcaggtcttggttcaggtttgagtcccaaattaagatttgggtctgggttttggggcctaggtccatggtttagttcccccatccaagtttgattcctaggtcctggtctgggtccaggttttggttcgggtctcgagtcttggttttagtcgaggtctcaaatccaagtcctagttaaggtctccgtccaagttctggtctgattatgggttatggtttgggttcggtttttttcacaattctaggaccaggttaggtctcaggtcccgcgagggtttaggaccaggttaggtccaggtccgagtccgagtcctggtccaggttcgggtcccaggtctcaagtcctagtcctactcatggtctcggtcgaagttcttctctgagtttgggttattgtttgggttcagttcttgtcaccgttctagttctaaatttgggtctgggttttgtttcgcggtctcgggtatgggtctaggttgggatcggggtccgagtcttagtccgagtttgggtacgggttttttggatcccggtctgggtccaggtctgagtccaagtccaagttcgggtcctaggtctgggtcccaagtttgggtcttggtctagttctgggacagcgacctgtacccaggacccgagactctaacctcggacctcagaactgaaccgtgacctagatgggggacctagctcccaaatccgaacttggacccaaacctgaaccaaggatcctgacctagatgggcgactttgacaagacacttggccccaaaactaggaccgagacccaaagctcgacccaaaacttgagacataggacccaacctaagaggcaaaacccacgaactgattaccgggacagaacccctaacctggacccaaagccaaacttaggactcggcccgaaacccacgacccgaactggaacaagaccgtacccagacctagacccgatccgtacccagacccggacttgaactgggatccagacctaacctgaggcttcgacctaacctatagtcagtgtttgaatccaggacctggacctagatccgtacccagacccagacccgaactgggatccagaccgaatcttgaaccaaaaatcggaatcggaccacgatccaaacctaaacccaaactcagacaaaaaacccatacggagacttggacccaattcgggacctatgatttgggacctgaacaaagaccatgacctggacccatatcgagacccggacccaaaccaagagccaaaaactgggaccggacccaggactcaagaactaaactcagacctaggacataaaacccggacccagactaggacttggacctgaactcagacccgtaccaaaatcgggacctattctcggaccgagacccgaacaggaaccggaacacaaacttggacccggattgggacctagaacctgaacatagatggcgaacccagactcgagaattgggcccccaaacagggactaaaacttgggcctcgaaacttggatcgttatccaagacttgaccccaaaccaaaacatggacctaggacccaacttgggacttgggatctgggactcgatgcttggactcaacccgtaccccgtgacttgaaactggaaccaaaacaagaacagatagggacccaggaataggacaacgacctggacccagatccaaaattgttatcagaccaagacttagactcagacacatacccacacttggattctatttctgggttcgggtttggatctaggtcagggtcggggtctgagtccttgtctgagttttggtctgggtttgggttccggattgggtcccggtgtaggtctaggttcgggtcctggtccgagttcgggtctcgggtgtgggtctaggtttgggtctggtttaggatctcggttcggatttatgtcccgaatttcgatcctggtgtgggtctgggtccgagtccaggtttgtatctggatccctatctaggtttgagtttgtgtttgggatcgggtcccagattaaggtctgggtccgaatctcgatcccagtcttggtaaacgaccgtgtccgggccccaagttccggtctcggtttgggtatggggctaagatcgagttcgattctaggtgtgggtccagcacctggtcacattcctagtcttgtttcgatggtcgtggtctggatgttcttgtttaggttccatttttaggtcccgactctgggtcagggtccaggttttggtcctggtccgggtttgcatcctcgtctgagtctaagatctggatccttgtcaagtgtcctggtctggttcttgttcaggtctcgggtccaaggtccgagtttgcgtctaacttcgggcccatgttcatgtctcgagtccaggttggggttgggatccgcgtccgggtcctagttcaggtctaggtcagggttggagtcttggtcttggtccggggatgggtcccaaatcctgacatcaactagaggtgcggtccaagcccctagtctagatccgaatcccgatctctggtcccggtctggtttcatttcaggtgcggggtcacgagttgggtcataggttcaggtccgtgcctggggtcgtgtcttgtgtctcggtcctagtttcgttgcccaagtccctatcccgattctaggtctaggtcgcagttctggtctaggtttgggtcccagtctaggttcgggtttgggtcctagtcacggctcatgtttgggtctcgatctgggtttttatttgggtttgagttcaggtgtgggtcctagtcctagtcctagtcctaatcctaatccagttcctttccagttccagttgcgattccaagttcgggtttgtgttcgagttcgggtctgggttcgagtcctggtccgaggttgggttcgggtctagatctcggtgtgggttagggtctagggtcttggtccacaatcgggtccgagtcacaagtttcgatctcgatctgagtttgggttaagtttcgggtctaagtcctgggttccgatctcggtcttggttcgatttcaggtccaggtgcagctttaggtttgggtttaatttcgggtcccgtgttcgggtccaggtttaggtctggttttacgctgggatttggtcttagtatgggttcgcgtctaggttcctgtcctggttttggtctagagtaagttttgggtccgggtctgggtctgacttcaaattcctaggtctaggtcaggtcttggttcgagttggaatcattgatttggatttgggtcttggttccgaggcctaggtccctggtctagggcccccatccaagtccgattcctcggtcctaatcttgtccagctttgggttcgggttccgtgtcttggttttagtccaggtctcggtcccactcttggtcaaggttgaagtttgggtcctttttagggtctggatcctggtgtgggtcgcgggtcttaggtcccacgagggtttaggaccaggtcaggtccgggtcccggtccaggttccaggtctcaggtcttaggtcccagtcctagtcaaggtctcagtcaaggttttggtctgagtttgggttgcggtttgggttcgattcttatcacaattctagttctggttccgtgtccgggatttgttccgttgggtccaggttgggggtcggggtttgagtcttagttttagtctgggtataggttttttggatcccggtcttggtccaggtctgagttcgagtcgatgtttgggtcttgggtctggatcccaggttcgggtctgggtctgcatctgggtttgggacccaaaacctgacactcagacatgggacctgagaaccgaaccctgacctagatgggggacgtgggccttaaacccaaacctggacccagaccggtacaaaggatctggacctaggtgggggacttggacccgaaacttggccccgaaaccgggttcgagacccaaaactcgaccccagactcaagacacaggacctgaccttagacctgaaacccaagaactgacaattgggacacaacccctaactcggacccaaaccgaaacataggactcagctcgggacctaggaccaaaactggatccaagagcgagatccaaatcaacacctgaggcttcgacctatcctgtagtcagtgtttgaatccaggaccatgacccagatccgtaccaagacctggacccgaactgggatccaaacccgatcccgaacttggaatcagaatcggaccaggactgggacgagaacccagacctgggactgtaacaggacccaaacctaaaccctaacgtagacccaaacccatactaggacttggagccagaccgggacttgtgacttggaatctaaagcaagaccaggacttggacccagaccgggacccagacctagaccacgacccaaaaactggggccggacccagggcctaagaaccaaactcagacttgggacctaaaacgcggacgtaaactgggacagggacccaaagttagacctgaatccaaacggagacctgttctcaaacttggacccgagacccgaaccttaaccaaaacatgaacttggacccagactaggacctaggacccaaacttagatgggggaccaagactcgagaattaggcccctaaacagggacaagaacttgggcctcggaacttagatcgggatctaggactcgaacccagacccaaacctagacctaggacccacatcaggacatgggatctgggactcgatgcttggactcgacctgtaccccgagacttgaaactggaatcgaaactagaagtggatagggagccgagaagaggactaggacctggaccttgacccaaaattgaaaccggaccaagacccgaactcggacatagacccacacttggattctgtgtctaggttcgtgttcgggtctaggtctgggtcaggctctgagtcatggtccgagtctgggtttggatctaggtttggatctcagtctgggtctgggttcgggttcaggtccgagttcagctctaggttttggtcttgttaaggatctcggtccggatttatttcccaggtttcgatcccggtgtgggtctgggtccgagtccaggttcgtatctggatccctatctgggtctgagtttgtgtttgggatcgggtcccagattaaggtccaggtccggatctcaatcccagtcttagtacacgaccgtgtctatgcccgagtttcagtctcagtttgggtaaggggttaagtttgagttcgattctaggtttgggtctggcacctggtcacaatcctagtcttgttcgagggtcgtggtctggtggttcttgtttaggttctagtttcgggtcccaactctgggttagggtctgggtttgggtcttggtccgggtttggatcctcgtctcagtcccagatctggatccctgttaagtgtccttgtcttgttctggttcagcacccgggtcctaggtccaagtttttgtctaagtttgggtccatgttcaggtcccgagtctaggtttgggttgggatccaggtctgggtcccaatttgggaaggttttggttggattttgggtcttcatccggggatgggtcccaaatcctaacatcgactatgggtttagtcgaagccccgggtttagatccgaatcccgatctcgggtgccggtctggttgcattttgagtgccaagtcacgagctaggtcataggttcaagtccgggcatggggtcgtgtcttgtgtcccgatcctagttccgttgcccaggtccctatcttggttctggtctaggtttaggtcccggtctaggttccggttttggtcctagtcacggctcgagtttgggtctcgatataggtttttatttggatttgggttcgggtctaggtcttggtcttgctcctagtcctagtctagttaagttctagttccatttgcgattccgagttcgagtttgggttctgttctagatctcagtgtgggttagggtcctgggtcttggtccaggatcgggtccgagtcataggtttcgatctcaatttgagtttgggttaagtttcgggtttaagtccggtgttccgatcctggtttgggttcgagtttgggtccggctacaggtttaggttcgcttctgatttcttgtcccgagttcgggtgccgggttcgggtccgattttaggctcgagttttgtcctggcatgggttcgtgtccaggttcctgtcctggtttggctccagagaaagtttcgggttcgggtctgggtctgacttcagattcgtgggtccaggtcaggtcttggctcgggttcgagtcattgattttgatttgggtcttggtttcggggcctaggtcactggtctagggcccccatccaagtccggttcctaagtccttgtctgggtccaggttcagcttcgggtttcgtgtcttggttttagtccaggtctcggttcgggttcgggtccatgtctggtcccagtcttggtcaaggttcaggtttgggtccttgttatggtctagatcctggtgtgggtcgcgagtctcaaatcccacgagcgtttaagaacaggtcaggtgcagactcgaatcaaaactcgggacacaaacccgaacccagacacggaccgggattggagactcagacctggacccaggtcccagacctggatttgggacccaagcccaaaattataaccagaatcgggacccaagacccgaccccagtctcggtcccaaacccagaaccggacacggactaggacccaggatccgaatcggaacgagactaggacccaagattgggatccggatcttgaaccatgacctggggctcggaccccacctgtagtcggtgtttggatcttggaatcgtaccaagacccaaacttggaaccatttccaaactaggacccaaacccaaactcggactcgacacccgaaatcagaataagaaccagaaccaggaccttggaacaggaattggacctaaacccataacaggatcttgatgcggaaccgaacacggacccagacctagactaggatcgatacccggacccaaaccgaaacccatacacaaacttgcgccaggatctgtgactcagaacctagaacccagcacccatgacatgggacctggaccagaacccagacccttactagaacccggacccagacccatacccagactaagacctagacccagtctcggactgaaacccagagccagacctagacccagacccaaacctaaagtcggactcatacaagaacaaagactcgaacccgagacttggacttgaacccgggacttagactcggaccgagatcaggactaggacccaaacccaaacttggaccgagccttgatcttgtattgggactagaacccggattgggaccgagaccgggaccagcgaccctagactcggatttggcacctgagaaccgaatcgtgactaagatgggggacttgggcccaaaacccaaacctagacccagacctggaccaaggatccggaccta

SEQ ID NO: 310373 - DNA, 1029 bp, Cannabis indica
gaccgcagtgtaactaattgggcgacatcagtgcccatccagtttttagaagaacccaacattattgtcctagaggaggtcgacatgctagatgacactccaacatggatgacacctatcgcagcttacctccaaacaaagaccttgctagagagcaaggactgggataacgactagaaggtgtccaatcgtgcacaacataacacacagaagtggtacaccaacaccactaaggagcatttccaagaaagaagttgtatagctaatgacaaaagtgcacaaaggctctacgacaattacgctgggggcaaagccaatcgaatgcagataggatccaaccacaacatcaatcaggcctttagaaggttggacgaccatgtcctaaacaagctggcgggccatagaatccacattctagtcggccaccacctccacatgctggctgacaatggccccatctaatcgcccaggcagtgctccctcaatatggctggccacctggtcttgccctgaccagcctgatccactagcagtctgctctcatacttcttgtctacaatgaacaagaggtacacaatatcttgctagcaggattcctagacaaaagggaaagaacaaaagaccaagccaactcaaagcagcatggctgcgcacaaggagttactaggctcgtcaataaacaggtcgaggaaagaaatcctttgctagagaattactccttaaataatattccttgatagcaaatcccctgtagcaagcatgtttggaccaaactgaaaaggtccacaccatgttacaagataacagtaaatgtgtacacaagtctggcgagtacaacgagaacttgaagttagaaattctacccaaacactgaaatagggaacatctcggtaagtactctaattggcgaacttgtcaattaagttcctctaacatttcattgtgcaagatcccataaaaagtgctagtacccacaaccttcttggcgtggtctccaccgttctttaacgatggcctctgcttcgttaa

SEQ ID NO: 310374 - DNA, 916 bp, Cannabis indica
taatattcaagcatatatcaaaacgttcaactcttcaataataatcaaaattatctttataggcttttcagggaatgaacccgaacaaaaattctataaaaatatgaaatttagggttttctatattatagcacttttgaaatataattagatcaatgattatttgtatttcttgagtattttacaaatcctaacacataaagttaatggtattttatatttgacatgtatggagccgttgacagtaatttcatatcaatatggatactctcatccacactcatattcacaaatttatttttccattgcatgtgaatatagtaattaagaaaaacttagatctatgatattttacatcaaaataagaacttggagtctccttccaatcgatgaaatactcaataaatgagagatttttcccctttcttagctaaattttttggtatttcaaggtcttgtattactctttgcttcaatacaaaaccatctaaaattaaaaggaagaggtgtggaatggaatggaagagtttatataaaaaaaaatcttttgtgaaccatttaaattctttagatacaaaaaaatccctacaatatgattaaattaaataagaagtttaaacataaaaaataataaacttaatgtgtaagaaaaatttgaccaattaaaaaatatatctacttaaaacataaatgtcaaaaaataaataaatttaaaaatttaacactatggaagcattagctaaaataaagtacaagagaaaatcaatagccaaaaactccataaaacatacatgaccaattttttcaaattcgcaacccaatgaatataaattccttaacactactacaatgttagcctttagaggctgtttttttcacccctatttataaaaagggaagctaaagggtgtgaaaa

SEQ ID NO: 310375 - DNA, 2116 bp, Cannabis indica
ttttttaatctcaggaacatgtctcacatcctacaattcacagatctaattccaacaattgaacaggctctattgtccccaagtctcacagacccaccatcaattttcctgtactctagaaattgattcctatctggacaaatatgaaaagagcatcctaaatttatgaccgaatcaacacatgagtaagtcttggagacaaccattacatcagcactctcatatccatcaaattcactaccctcagaccatatcagcattatcatgtctcttattaaagtcttatttctttaattcaggacagtcccttttgagatgatttgttttgtgacagatgtagaattttttcttgtatagagaaccggaattaaacttaccccctctcgattgtccatgagagttccctcctgccttgttacctctcctatttgttttgtctcgtaaaatcagcaatccttcaccaggattctattccttcagttttgatttctttttcaatacctttgacatcaaggcactttgaacgtcttctaatgtcaaagattcctttccatgcatcatggtgtccacaaaatgttcataggactccattggaagagaattcaacacagttattgtctgatcttcatcatcgatttttctgtcaatattttcaagatcaagaattatcttattgaaatcgtttaaatgatcttcaacagatttatcaagcagcatcttaaaagcatacagtttctgtttcaaaaataacatgtttgcaagtgatcatgtatagactctccagctttgtccatagcctagcagttgtagattcctttaaaacctccctcaagactttttctctgagactgagaatgatggcactatgtgcttcgttaagaatttttgccttttctttatctattttgtatttgatcttctcagctccaagtaatgcatcttgaataccctgttgtacgagtaaagccctcatcttcaccctccacgaactaaaatcattctttcttgtaaacttttccaaattaaattctgcattacccatgattcccactatacgttcttcacattatttgcaagagctccttcttcatcttcaaagctcaagaacactttcaacagatcaccaagctccaagaacgtcccagctctaataccaaattgttgggaaacaattgattcaaatagagactcacacacaattgtacattgaactgctttcaattcttagagccggatcgagagtgaaatttaagaaagaatgaataatgctctttattagtttaatctgaaatgaatacaagttgtgtctcaatgataagacttgcatttatttatagttgctctaaatggaacaaaccaaattaactaacttcgggtcaaacacaaaagacaatttgacttattaactaacatttttctaactctcctaagtgaataaacagaccacagctaacatttagagagatcatcttaacttatagttttaataaggtaatcgcaaattataattcaagtggacctattttaatgaggttatgacactagaaaagattgtcattccatgcccatttacatatcatagtttgatcttttttccgtagttaataatattcaactacttgacgacctctagccactaatgtacactatcaaattgaataacatacatgcattgaaggtaagagacattaataataacagtcaagtagttgaatttagagctatatatataaatgccacaaaatgtacacatcaaattgaataaatggagatatatacatatatatatatatggctcttatttcatcattagttgtgaagttttcaaaactttttgtactttccttttactctctcatcattatccttttgtgaattctgtgcagccttttagccgtggtaaagagaggaatgctttgatccatttcaaccaaagctttcaaatacattgccagactagacatcaacttggggatctaacggtaccaattgctgctcatatgggatggtgttgacaacgacgatttgactggtcatgtcattggccttaacctagagcgttcttgtctctacggctctatccactccaacaacactctctttcaccttgttcatc

SEQ ID NO: 310376 - DNA, 1381 bp, Cannabis indica
tttattaattagtaaatctggttctattaaaatgtattttattttgggcataaaattccaacaaaattttggtatataataaagaaagtagatttttagtgatgtattttaaaagataaattataaagagaaatgttaaaaggcaccaatggtcccaagcatcctctaacgtgtcgtgtcactattggtacagttaagtatcaggtcttatataatttgatatgataaattttatagaatatcgctaaccaataataagacgtcatttataggttgtgcgaggcaccactaaggtcttatagcaatgctcaaaaatactggaagtgttctaaaagtattttattgttaatgatataatttaatattagatctcgtaagttttaattaaataataaatattgaagactactaatagattgtaaagcattatcttacagtagtattagacacaaaatatacttttttttaagcttcaaccatataaaaatatatctttaaactagtaaatgtagtcgcgctttacgcgattttataataaaataaatataaatttaattatgttttaaaaaaaaagttagtggtcgttctttctatatatttagttatattacaatttaaatattgtattttacaaaataaaatataataatataccgattctaattataatcaaacgtttttactttaattttaaattttttttcctaacctcaataacaattgtgactcgattcctaatctatcttaactgtaattatttttactaatatgctcataatattattacgtttcatgttgcaaaatatagaatcgaaattgtcatttaacagtggttgtaaatattggttagcggtactacacttacattcaaaatgaaaaggtaggtcacaagttcaaatcttctccttatactttttttaaaaaaattattatttaagaaaataaagtatcgaatcaataatttttgtgatacgggttctaaaatgatatttattatttgtaatagtaaaaaaatatatatttatacttgattaattataattttgtaatatagtctcaataatgaatttatacattttgtgattagcacaaatatttgattaatgtataactataattttgtaagtgagaaggtcgaaattttttaggttgtaatatttgttactattatttagaattttgaaaattgacatgatacctattataattacaatatataataaggtattaataattaatttgtggactattaactgtaataaattaaagtaaaataccgaaggaaggatataatttagaccaaatggtttcatgatattgcccccggtactatttctaattaatggtcctaattttttttaaggtaaatagtggcataagt

SEQ ID NO: 310377 - DNA, 1113 bp, Cannabis indica
gattgggttagaaaatatataggataaaccgcccaaaccgaccgatgtacaaccctactcaacactcattaatcactaacccaagccaacataatcatcaatgttgctcaatacaatttctcaatccagctctctcactctcggatatctctcttgctttctcactttaacttctctctctacaatgttgtgtcttttcccctttttctggttgagtcttctttttgttattatgaaatgagattagtagttatctttatataggtctattgacctaatatgattgctttcatattttaattaatgaccaatcaactaattaactaagttttagttgagtttgtaaggaataataccataggattaaatttctctagtattagtagaacttgtaattctgttgcccataatgtgattaagttggcgtttactcacaagaaatttagttttattctgctatcttctattccggacaacttgtattgtaataattatgaggtctaaccttttctatttatataagcacgaattttcataaaatattaaattggatagggggaccggggagtaggagatgctcttacaatgtattcaaaaccaaaccaaacactaaaccaaagatttccaaaatatctattgttttagaaaagatccgtgaatgctaaaaatcttaattcactagacaacaaaatatatgagatgatgggttttggaagatttgttttcacaattttgatcaacctttttaatctcttcgtgcaaaattttagaaaaatggcaaatgttaattttatatgtagctactaatgtgattacggggtttatgttcatacattatgacataacatcccctcaaggatgccttctttcatatactagtttgctttttcttccctatttagaaattaaatctgcatttgtcacaagaaaaaagagaaggaaattaaatctgcaagtttttattagcattaatcagtgtattcaaggctattgatagccgcttccacacccatgttggacaggaaaggagtatataaataatgaccattgctattaggcagtggtgattaacacattctcgacatgtcgcgttgtgattggctaacgatactc

SEQ ID NO: 310378 - DNA, 1849 bp, Cannabis indica
tcccaatgtctaataaaccgtcccacaatactaacatactaagttgtgattttactgagccaaacaccgagttctatgttaccgggcaccggaaatgcaaacttatgaaaatcactaaatgacataaaatgcatttcagaattcaataataactgtataaataattaattaaatatctataaataattttcataattaaacatgatcaactgctaatttctaaattaaactaagcggtctttacaactaatccataagaatataatctattgtttttatcttgaaacaattgtatatatgttgttttcgaggattataatagttgtttgtttacaaatgaacaactattgctgaattaaattttatttacagttgattgtcagaaaacaattattttgatagataaaaatagttcttaagaactatgaatacaatttgaaaaaacatatgaattagtttttttttttaaaaaaaaaaacaaatatagttgaattagatgttatttaatgtttaatgaaaaaaaaacagttgtttataagtttttttattagattaaagtagctatttacaactactgatactgaaaaatcataacaaatagacaaattttaggacatgaaacctctacaaattcggtacagagcaatgaccattgggatgacaacaaacactatattgattatgaatcaagtagagaattactatcaagagattgcacttttgatcaactagtgaaaatagtaatggacgaactacaatgcaaccttgatacaacacaaatacaactaaaataccaactgaaagaaagattccaaccactacaaatcaatgatgaaaaaagtctactattctacataaagctattaagcaaagaaactaatttcatatggtacccattgtgtgtgaacaaaatcaacgacaaaaagagacaaacttttttggcacctaaccaatcaatgatgtgtaataatatgatgatgacatcgtatcacaatcacttagcacaggcatatgtgcaacatccttgtaacaacacaacaacaacaaacaaacaattactatctgcagcaacaattggatcagttcgagatgatgctattttggtcgacagtatgactttagcattagagttaaccatacaacaaccaaaaaacaacaacaaaaaaactcttgcagaagatgaattatttgacttcagagactatgcaaagcttgttgctacaaaaatggtatatcaacttgaaaacaaccaaaaagaagaagaagttgacaacacagaaatgattatcatcactgataaacgacacaaataataaaaaagtgatatatttttaaggacaatgacatattgataagtgccatatgctactttacaatcaagaaaatatttcaatacaaagtagtgaaatcttgctctagagaatacaaaatttttagtttgaactcaaattgcaaatggagtttgaaagcttcaaaaaataaaaacatagaaatattcataataaggagttataaagaagaacacacatgtggagttccaataaaatttggagatcaacgataagcaactgcaaagttgataacagatttcgtaaaaccaaagttcttaaacctaaaataaagtacagtcctagagatatatgttgcgataattttctcacgcaagtgtacgtaccgttcaagtagtagactcaccaggagtgaggtcgatcccacaaggagtgtagttaagtacgttaaaattacacttttacttctatttggttaaataaaaataaagaaagaattaagaataagaaactagtaagaaacaattattcaagaaaattgaaagttaataaaaactagg

SEQ ID NO: 310379 - DNA, 928 bp, Cannabis indica
atccgaaaaggccatggctagaattggaataccgccaattttcatatatctatacaaggaaagtgttaatatttgaacaaagaaccaatattctactaaacttaatatttttaaattttttttgacctataaattttaaatttcattaggcatatgattaatttaattaccattatttagaacaaggataaatatgatagttaatttaattaccattatttatattaatcgttcccttgaatttcaaatcattaaaaaattaacaatatttggaaaattaccaaaaccaaaatttaggtagaaagtaaattttttgataagaaacatagctttttattactttattattaatatcaaccacatttatcaatgaaatagactaatataaatttttcaagccacaaaccacaaatcacaactcaaaaagatatggcaaactattgttgtagtattttcacacaaatatatgtatcgttaataagtaataggtttacaaaatgtgtggtcgatcccacaagaattgtagttaaatactttaaaattaaacttttgcttttatttagttatttaaatttaagaaaaagttagaactagaatttaaaacaataaaaacaaacaagtaaattgatatgtaaattaacgatgattgaaaattagggttattgatttaaattgtatccatttattatggtttagcatgattcaattcttattatcaatttctatgtaatagcaagtttactcaaggaatttatagtcttctcggatatataaatctcaatgacatgcaaattttctactctcgtgataaattaaacctgtaaaagtcattaaacgcagaaagcatacaagctatccaaactatatataggtactctcgtctaatattgaaatttgttcctatttcactatagcataattgacactc

SEQ ID NO: 310380 - DNA, 1478 bp, Cannabis indica
aaaaaaaaaaaaaaaataccacaagctccaccttctccaacaatttatctacaagttgctttgcttactctcaccaatataaaaactcagtttatgattgagacaacaacatccattagaaatcttgagatacaagttgggcaattggctaatatgcttcatacagacctcaaggaaattttctaagaaatacaaaggtaaatcctaaagaaaactatagtgaaaacactctaattaaggagtggtaaaaaattagaagagtcaatcaaaagtctattcatgcaccaaagattgaggttgagaatgatggtttagtggaagacaagaaccttgagaaaaagcagccaccaattaattatgaccaccacatcaagattctatatcgtcggcgacttcaaaagaagacacttgacaagcagttttcaaagtttcttgatatcttcctgaagtttcacatttacataccttttgcaaagccacttgaacaaatgctaagttatgtgaagtttatgaaaaaaaaatttattaaagaaaaggagactgtagcctttattgaggaatgtagtgctatcttgcaaaagaaactacctccaaagcttaaagattcgggtagttttaatattctatgctctacaggaggctcagttgaaacaaaagctttatatgatttgggggctattgtgaatttaatgcctttatcagtctttcgaaagctgaaattaggagatgctcatcctactacggtctcgttacaaatggcggatcgctttgttacgcatcctagggaattgattgaggatgtcctggtaaaggttggtaaaattttcttttctaatgattttattattcttggtaagggtgttcatcaaaccgtttttacactgcacaaatcgctcgcaccataccacactgcataaaaaaaatatggtttgaaattagcagtgcgattgtagtttgtatttttgccaaatcgtgcggtgcgatgcagtttgcggttttaaatacaataattactattcaaatcgcattgatatattataaagctactactttttataatatgatttttattttatttttatataaggataaatgtatgtaatatatctgtatattatattatttttttgaaggcaattcaaataatgacttgataattagtgtatatgttatgatgttaaaattttaataagattttttattttgtattgttaaaattttattagattaattttaaatttttattataattaatgataatagtgtaaactgttcaaatcaccgcattacaccattttgttagctaaagagaaccatgattgatgtacaaaatggttgaaatttggaaacataccaatgcatttacgcagggccggcgctgggcataggcgggctaggcctgtgcctagggcccacctagtccaggggcccaaaaaaaaaattttgccattttaaaattacacaatttttttgctgat

SEQ ID NO: 310381 - DNA, 713 bp, Cannabis indica
atgattatcatcccgggatgataaattttgtctgaaactcggttaaatagcagtggtatggagttagttcgggtgaaattgggttttgctggctgttttatggtggatgctagaggtaaaagcgggggtttggcgcttatgtggtctaatgattttatggttcaaatcaaatcctttatggtctctcacattgacgctttggttgagaacaatatgggatttgtttggcgttttactggcttctatggaagcccggatccaggtgggagattggagagttggaagttattatataggctaaagacaatgttcaacaattcttggttttgtggaggcgatttcaatgaaatattaagtacaaaggaaaagaacggaggaggttcgaaacccgaatatcttatgaaaatttttagacaagccattttagattgtcatttacgggaaattgcctcaaatgggaatgcattcacttggtgcaatgggagaacatctaatttgatttatgagaagcttgaccatgtgttatgtaactcggtttggctggaaaaatttaaatcaaacaagatcactctcctcaaatggtggaattcggatcataggccgattttattggaagctcaacaaggtgttaaagggagtccgtttaatagaaaatggggatctcaattccactatgagcatgcttgggccgataatgaagattgcctcaaaat

SEQ ID NO: 310382 - DNA, 1248 bp, Cannabis indica
ataatattttaagatgatgtatgcattatttttaacaactataaatgttttctattaaaaatattcttaaatatgagtcttataaaataatttttaaataatattactaataaatattatctataaatgataatgagcatactgtttctaataacaatattcttaattattattatatatatatttttgtaattttgtcatctacatgaaatttacaacaaataataggacaacaatttaggttgatggtttgctattattggaagaaaaaaaaaatggtagtactcaagaagaggaggactattagtacacttttttttatgtattttttttggtgtaatagtagagattgtagattaaagttgagattttataagtttttctaaaattttaaataaattatagtgttgaaaaacaagatacaaacagtttggtaaaaatatgtttgttttattttgttggtgcgtgaaactcataccatacaaagtagttacatatctagacaaaaccttaaaagtgtttaattttggttttttattagatgaaaatataatatatttttttatttttataaaatttttaaatttaaatttaattaggtcatgcagtgttgctcgagtcacgtcatttttctcttccagtatacaaattaatattgtgttcaacattatttaacatcaactaaattgaaaaattagagtttctcgtttctaaatttatagctatatgaaattatcttttttctccggccagacccgtcagcctttccgggcatatgtgcaacatggtcggtattgtgctttgctattgcgattcgatttttgctattgtgattagtattgtctatgtgatataattttgagtgattatgacatgattttgagtgttttaatcttgtttgtgtgacatgattttattttattttgtttttggttcttatttgttcttcgatgactcattgagtgattgagaataacaagttctttgcaactgaaagggttgttagtagtgcagttacgtaccatacacaatagttgagtgctcaacctacgaggttgaatgaacccgttgtaacagtttctactgttgggtcttttgagcggtagattaaactgaatataggtgttcttaaagttaactgtgatgctgcaattttttcatctgattttattttattatttttttaaacaatgtaggaatcagacggatgattatttgactcgtttttctaattctaatcctgatcgt

SEQ ID NO: 310383 - DNA, 1064 bp, Cannabis indica
tatacagtaaaaataaaaaaaaaaattaccgcctagcagtattaatgtaataaaataagaaaattcagtatatcatgtaaatttctcttaataaatacaacatacccatctcaaaatagtgaaaaaatggcgttagtagaaaaataacataaaatctttaccactagataaggtattttgaaagacttcgataaatgtagatttttttttctttttcaatgccatcttttacttacaggataatatcataaatacataaaaacaaaatatatatatgtaaaaatatgattgtatggaattttaaataattttatggtttttaagattttatttacagaaaatatagtcttttgatgtatttttatattatacttttcttattttattgctaattttttattagttgtatattatttttttaagttattttgatgttgctttcatgtgattttcttgtgttttatagaataccataaaataaaaataaaaaataaataaacgtgaaagtgtaaaaaaaattttcatcaaaaatagcggtttatttaattttccctttactttatatttgtatgggttaagatgaaaattttcataatagagcaaaaaattttaaaaatataatacaaaaatacggttgttgcctagaatttctacataaaatatgtggcaattcaggagcaagtcagatggtaatgagacccacactacaggacgtgccatattaaactgcttccaaattctgttaatttgcgagagttacgaaggattggtcagagagggtccacctagatggtagatggaattgtctatttctctctgcgagtggactcgaccctgggaagagatgaagggacaggcgaagcatggcgcattactcgaggttaagtcattgtatacacatttaatgcggcatgggaaagaacatcctacacattactttgaaaaaaacgtgttcaagggtttaaacctataattccatgatttcacgatacatcatttgatggctacattatgagctatcaaatcataagcaaaagcaaagtctagtctcaccaaacgcctat

SEQ ID NO: 310384 - DNA, 1146 bp, Cannabis indica
ttttttagttgttccacggttgttttaattgttctattttgttgttttacggttgttttataaagatagtatttttgtaaaaaaataccgcgtgacagtaaaattataaacttttatccaaaattcaatatttttgtaaaaaccctatttttgtgccccctataatatacgactccttagcaatactctcgaaatataacttttacagtaatatacttcttctatcatattatcatttaattttaccgtgaaacaagtaacacaatagataataattaatgaatggatgtaaagtaaatatttattattatcttttttattttttttcctttttaaaaaaaaatatatttttcacaatgtttactttaaataaagattaaacaactacacaatataaatataaattattataaataatgaaaatcttttattttattatttattaacgtaaaaaaggtaacaaaaaattaatttgtattcatatatttgctgccatctaccaccacatcactaatataatataaggactattgattgtactgtagaagttatatatcgagtgatattattaacaacttaataatgtaaaaagtgaagaggcaaaaatactaactagtctaataactatagatattagtatgtcaccctttcttttacttgcattgtttgtttattattattattattattattatttttttaaatggtacttgatttgtttattacttaaactccataattttgctctagtcttttttattgagttaaggtaatcttgcatcaacaataagtaacatttttaataaaataatatattaaaatatgccttaattaaattaaataagtaatcaaatgtgatgttttctattttaaacttataatttaatgtgggtttaaaaaaatttattatttaatgttaggtaatttagtttcagtttatataagtaagagtaaatagcagtacaatctctaatagttatactcagttattgggtttaaaaaaaattattatttaatctgggttcaaaaaaacttattatttaatgtaatgtaatttagtttcgatttttatttagtttatataagagtaaattgcaacaaaattctcaatagttttattgtgctagcaattaaccttaaaattta

SEQ ID NO: 310385 - DNA, 805 bp, Cannabis indica
tttttttttttttgaagaaaaagcgtttattgattaaaataagagttagacctcatggtcattacaaaagataatatctggaatagtagacacatcgaccataccagttacatagtagacacatccaccttaagatgtgtctaacatcttaagttatactaaaattacctattttatttgtaccttagatgaaataaattttaattatccatactcattgtgctatcgttatcttgcgctgcaattccttgcttagatgaccctaatcttgatctcttctactcacttctatatttgtgaggttatgtgcccgttgaaggtggtaatatcgagtttgacctgtgtgagaggagggaaaatgaggtcgaagggagtgtaggaggtcgagcgcgcaggtgcgggcgggcacgcgggcgcgggcgggtgcgtggagctccccttgtcgaactttcgagcataacactaatgacttcgaatattacacttagtaatttttgggggtcaacacttgccccctaatctagaagaattctttccagtgttcttgtagactaagtttggtgagcttcatctctacgacttaatttttcttctctactcctttttgttacccttcgcgaggcgcataggttttatgatttatctctgccccttttgagatttgtgttcaccacaatgagggagtgttagcttattgagcatcctcaacctcttatgggttactcgctcggtataagggagctcatggctccttaggccgcgcttgacctttttataaatttaagaccatattaggggaacttat

SEQ ID NO: 310386 - DNA, 3747 bp, Cannabis indica
gagagagagagaacagctaagaagcagctatatgatgtgtagagttataggtatgtaggaatagctggataaataaggggtattagggatcacaggtggagagagtatagggtgccctggcagtgtggacagatcataactaataggagaccatgtatacatgtatgtatatgtatatatatatatagagagagagagagagagcatgcttatatgcttattagctatagactgtggactagaagagagggaacaggggatcgtattcaatatatatatatatatgtatacaaatatgagtactgtttcttctctatcatatcatcaccagctgatgcacaccactggggctgcaattattagcttgacaaagaaaattcaatattatttcgagtttcaatgtgctggttttttggattctttcggctctcaaaaataaaattgtatttctttaatttgttttcttttgtttgtttttgtgttattaatttactgttgttactatactatatagttaattctctctctttctttctctttcaactatgcatttatcaagtgtgtggtgctttgatcaaatattgcagttgtcaattcatgttgggggtttgattttaatgctttctctctcgttcatcgaggaggagagaaaaaaaaaaattaaaaaaaaaaaaaagagtaaatgagctaaatgcaaggcatatgggaaatgggataatttcctcttctcttgttgtaggccaaattggttgatattgtagcagtaatagtaatagtggtgactactgtcactgccaaaagtgttaattaattacagctgtgaactttaattacaaagaaaatatatatttatataatttgtgaataagtgaaatgggatttaatggtctgattttgtttgatatgttgtccatgtgaaattaaagaaagaggagtagagtagttgttatccatgccatgaaagacaaagacaaattctagataggtaaatagataggggatataaatgagactctttggtgatgagtgaagaggttggttggttggttggttggtacatgagcctgcctgagcccaaagccagccaagctttctgccatgtaatctgtatgactcgtttcaagaaaccctacaatatatatatatatataaaaatatatgtatatatttatttatataatacaagatgactagctagctttttctttagagacgacccttttgaacgaacatgcacaatccaaatattgttagggaatcttgacttgacccccaacccaacaaaaataaaattaaagagttgttgttgttgttgttgtttaatttgaagatgcatgatgaagaagttgttaggtttggtttggcttggtactttggttattattattattattattattatgttgccaaaataagacaagaaaagagttgcatatttcatgttgactagctggaaaaaggaaagaaatgtgttagttgttaaagagaacctcctccttctatacaagtctcttcagaaaaaaacaaaggaaaaggaaaagggttggtctctttctctcttgcattgcatgcctgaataatattgaactgtcttcgaaaaatgtgaacatgaaggcttgtgcttctcgaggtatatgttaaaatgaagaatatttatattgctatacaaactattttatgatggagcattgtaggcagtattaacatattttcacatattttcatgtggtattattagtcatattacacaagtatccttcactaattatctttatgctatctaactctacatttttttcttttttggaaactaactctccttatatttattattataattagtgcagtttctctagcctctttgggtgataataacatttatgttttgaaaaaattattgaatagactatttattttataaaatgataaattatattttatattttttaaaatggctcaaaatattactttgagttcaattttcaataagtttcttttaatataacaaacttgaaacaatttctagtacgaacatttctagtacgtattcaattttgtcataatgattctagatcgaattattattaatttttattttgacaaaaaaattaatttatggtactactttctaccatttaaaaatgagcattgttattgggcaccagtggtgcctagcaccttctaaatagtgtcgacttgctaattggctagcacgaaaacccaaaaaaaataataatattaaactatatgggacccgatacttaattgctaccaatagcgatattgacacgtagaagggtgctaggcaccagtggtgccctttagcatttctctttaaaaatatagcttctaattttttatttaataatacaaaaggtcaaattggtaattttagcaaaatacatagtccaaagtagtatttactctattattttaagagtattgctataacccactcgtggtgtcttgcatctagatgtgacatcttccaattgattagtaatatttcatacatagttgatacttaattgtatcaataataatataacatgttagagggtgttagacaccactggtgccttttagcgtttctatttttagagttatcatagccatgggtggaagctagatggagcactcacatcaattattctctactctatcctttaaaatacctcttcaaaactcgactttctttatttaacatcacacatttacactatattatacattagcttctctatattttttttctatatcatttaaataatatatttataaataaaatatgatatatattatattatacataaatatattacataaaacttattcaatgcataagtaaactttattgctaattatcatgtcagtgtaaattcagtgtactgacaaatcatgggatataaactttgaaacatataatcattattatattctactgtattgacaatactataatcatgaataactatatgttctagatttaatagaatttatacactaaacatataatcatgaaagcaatcatgtgaaccatgcgacataaaataatttttgatcttttattaattaataaatatgattatattgaaataggttttatttaaggcataaaatcccaacggttgtaactatggaacaatgctttatattctaagagctgatgaaccaattgtgtttaataacgaatttatcctacccaagctgttttttttccggggaggaattttcaggataacaatgtgtttattcaagaaatatcattcactccttcaacaagaagaaaggaaaagagggttgttttgccattaaaattgaccttatgaaagcttatgacaaattgagttggaaatttattgaccatgtgcttgatggttttggggtgccgcaaaagtttagagggtggatatctcagtgtatcactactacttccctcaatatttgcctaaatagaggtcaatttggtaagattacgccctcgtgtggccttcgtcaaggcggccccttatctccttacttatttatctgggctacggaaattttgtcaagacttttggtagacgcccaatgtaaggaaaatatcaagggtatcaaactcagtaggggaggccccataatttctcacattttctttgcggatgatttacttttggttggaaaagcgaacttggaagaagttaaaggctattggcagtgcattgagaagttttgcgattggtcgggccaacaagtcaacaaactcaa

SEQ ID NO: 310387 - DNA, 1379 bp, Cannabis indica
tcgagattgatccgtactcatagagttttgattaaacttttgatcggattatagctagacatcgtgaccccagagtcaaagaagatacatagtaagatattgtggatgtcttgcttaatatcatggtgctggtgagatgcctctcactatggataatgtcaaagcttctaattttggtacgttaaagtttgtttttttttttttcattcataatatctattttatttcaggtcttattgctttgatgtacccaagcgaaatgatgaaaagtaaattttataatagtaactactggaatattgtgagaaattatttattattatctcgtattctttgtaaaataatttgggttcttctctagatccaataatcattaaattaattatatagaaacttaatttttctcataaaaatatgacacttcaagtagtacgtactaagcaccaatgccttttaagatttgtcttgttatttatactcatgacttgttatcctttatttatatataatattaaaaatatattttacatttttgtttggtgtaagaagatctttatgtatattttttttttaattaagcatgattgcatatgtcttaagaagatattataccaagtaatgcatgtaattattattatggatgcatatgcaggacatgtttgccgcaggaactgatacaaccttcatagtccttgactgggcaatgacagagttgatcactaaccccaaagctttagaagaagcacaagctgaacttcaaaatgttttgggagaaagaaacgtggttttagagagtgatttgcctcaattgaactatatgagagcagtcatcaaagagacttttagactacaccctcctgcaccagtgttagtccctagagaatctctagagcatgtcaccatagagggatatgatattccagccaagacaaggatcattgtcaatgcttgggcaattggaagagacctagaaacttgggaagatccaaaaatatttaaaccagaaagatttttgaatagcagcattgatttcagaggccaagattatgagctcataccttttggagctgggagaagagtatgccctgctataacatttgggattgcttctattgagattgctcttgctcagcttctccatagttttcattgggaacttcctcctggtgttactcctaaagatttagatatgactgaagtttttggtatcacaatgcataggaaagttggattggaagtccttgccaagcctcgtttttcttgaaaattgcttatggtaacataaaggattttctatatggttgggtgatgtaacgccccgatattttgccttattttacaaaaatctattttcatgcataatttgaaaagataaaaaa

SEQ ID NO: 310388 - DNA, 1079 bp, Cannabis indica
agaacagtcacttacaatgatgttgagatagtgattgagagtgggtacgtgtcgataagacacatccttcatatgacgctcacggaccctgcttgttttcgaaagccatagttaaaaagatagcagaacaaattaaaataacaacatccttgtattagaaagtattttgtatatttttatacatttagaaacaattagtgtaatttttccttgttatcaaagttaaatttaaaaaattgtaataacaacatctagaacctccatgtgaaatattatcgaaaaactattgagaaatcatcatagaacacatttactaaattttgtaaaggactgcacaaaccatcgaaaaaaacatcgagaacatatcgatgtaccataatcgttaaattttaaaaattgcaatggcatcatttggagccttcacatgaaatattatatcaaaaaatcatcgagaatttcacaatagcaatttaattagcatttaatataatagaatcagttttagggaccccaagtaacattgaactatgcctcaaatacgggctttggatgtagctctgtggtggtccgggccgccatagctaccacaatttcaaaattgttttactactttatcaccaatttcaaatcatactttaatgaatcaacctccaactcttcatataaaatgttgtatattttcggtaaggttgtgtgagtttcaaccattaattattttacttaaaaaaaaatatatgcaaaaaaatctcacaaaatgtaaaataaaattaaaaatacacaaaattaaaaatctcaatgtattaaactataaataaaaacgcatatcatataattttaagattgaatattaatataaaaagggaatatgaaaatacaaaaaaaaaaaaaaacaaataatattacacacatagaatgaaagtagattatatatgatcaagacgatgatgatgagagagatctgcatagccaatccctcctacgggtggtgggaaaaataagtgaacaagaagcttgccaaagcccaagctccaatcggcaaattcattattaaaaaattccaatcactcccacgcttcacg

SEQ ID NO: 310389 - DNA, 727 bp, Cannabis indica
taagatgcattattccgtgagtgtatgggcccaataaaagcttgaagcggagacgttacaatgatacaaatattactatgggaatataggtgtagatttttattttgggtttatattaatgttttacttgttttattaaagggaaatttatacaaaatattatttttagtaaaaatttaacatctatactgtgatagttaaaaaagtttcgttatccgtaaggagaaagctggggtaagatatgcaatcccttatcacgtaagaaaggtcaagtgtgatatgattttaagactgtgtaggtattagactatacaattgaagcgagtttaaatagattgatgggtattcatctatatcaacaagatgcattttatttttagcccatcacttgacttgaagcaatcttaagatgattgacctccagagtagtttccagggctagtcgtcattccaggaagcagtcaaaagtaacgtacaggtgtattgtaggtatgagacttcaaaggtgaaacggacgcgttgcatatactttcaaatgtttttctttatatttttacaaaatctttattttttttaattttaaaatcttttaatttttttaattacagttttgcagtgttataaaaacaacataaaaataacatacaaataacaacgtaaaaataacagataaataacaagaaaacatcaatagtctgtaattttgtaaaaaaaacaaaaaaaaaaa

SEQ ID NO: 310390 - DNA, 1137 bp, Cannabis indica
cacatctccaatagtctgcttgttaaacttcttaagttggcattttagcctcaagcatttaaaatgaagggtcttgagacatgtccccttaactggtttataacaattctccaataatatatttttaaaatctttgtgatcagtccagaaattgaagaatctgaacagtttgacgccaatatcctgaataaagaatagaccacacaagagcaatggtcagacacagtttcccaagtcatgatagcagaagattttaaacgagcatgatcaacaacatattttggcagttccattgagtctaaatgtagttggggatcgtttttcaggtctaagaagcatcatggtttctacttggtgcgtagtgcatacaagttaatacaagctcaaaaaagaaattggattgcagctgattcttttgggttttggcgcaagctctggaatttaaaggtaccaccaaaagctctcaattcggtacagcagactgcttcaaattatttgcccaccttgactcaattaagtggtaagagggtcctagttcaaatcatgtgtctggtttatcaaagaagtgaggaaactatttttcatgcacttatttcctgttcattcgctactcaatgctggcagaggcttttggctggggtttaggccgattagttctactgacttttgcagctagtttgatcaaattttgcaaaagtacagtaagtacaagtatggggaggcagttatgttgtgctagatgctcgaaatgatttggtttggaaccaaaaatatgttgcggtggattgggttcttatctcatctatgaattgtcttgtgcaatggaagtcggcccaaaatagaggttcacaggcttctttttcaatttttaaagttggtgatggagctggattttgggttaagtcgcaggagaatacaatcagggtaactgttgatgttgccattatttgtgattgatgtgcgtttagttatagcatagtcgctcgagattctcaagggaaattagtgatggctaagtcaggtagtttttgttggtataagtgcttcagatttggctgaagcgattggtataaagaaaacgctaagctggattaaaactcaactatagtagaaagtggagctggagtcagattgctt

SEQ ID NO: 310391 - DNA, 733 bp, Cannabis indica
gccagtgaaaacggacttgtaatggtgttttgtaaagtttaatttccgtgctaaatttattagcaatcccatttaggggattagggtttcttaagtatctttggttgcgtgcctaatagttagggcgttacagtcagccttggtaatacccatctccatagattgaggccagcctttgtaggtggaggccaaccattgtaggtagaggtcagcctttgtaggtggaggctagcctttgtaggtggagccagcctttgtataccttttccttgtacaggtcagggttccctggtgaacgaaccctcccttggtttgaaagtcacctttaagccagccagctcaaaccctggacagccatacaagcttatcttagctgacttatagactacccttaatcagccatacatggtagtacagctccttgatgggtcacttaactccttttgcttgctgcttgattgttttcccataccttataaggagattttgtcttgctattggcaaggcttcattccacatgcactctatcttagcttacgtggacatgccactttaggtggacaaaatttgggataacatttgtccctcaagtcaccgttcgaacatctaattagatagggacttcctcattattgtcttccttgtagtagcttctatcgagcagcgttgtctagccaagtgggtgttgggttttatgccctaaataaaactctttacaatctaattaattatc

SEQ ID NO: 310392 - DNA, 2103 bp, Cannabis indica
gtttcccttttgcttacaatgtataaactaggaaggaatattaattacataattaaaatacacaaaataggaaatttgaacaggttgccttattcctctgaatcaatcccatgattgcagggattgtcttagtgcttggacatcacgacatcattctgaagtagctaagtcctgataagtagtctggaaagtcaaacttgctcttgcttggataatctaccttccaccctgctcaagtaacaagtagatatataatatgaagtctgttcgggacatccatttccatccagatgcaaagaatgcaggacacgtgtcacttgtgtattctgccacgtcatagtgtaaaaaatgagatacattttccccctaactctccacgagacttatgtggtcgcacatggacttaactcggtctagatccttatctgaatgggaagcacgtgttcgaagtgtcgattgattatctgatatgactttaactaaggtctcttcagttttcgactcattaatgctggttgacatgtacattgaaccacacctaaaaattagcacatttcgattgttatccttcaggtaattgagtgcacaacgtcaacttttgggggaaattcgaggtatttaaattttgaaatgattactttgccccactaatttggttataaatacggttgaaacgttaatcaacaacttttttccattttcattttttgaggaatcagagcaagaaactttttctttaaaatcctttgaagaaacctcatgaaacgtcgagcgacgtcatctgagaaaatctaaagcttcgaacagtgagtaagttcttcatttctttcctcttatatgtttgaatattttattttctggatttttgctgcaaaactttatagtacttgaattgctccaggaaaaccatagaaatttaggtctaggaatttgaaatctttatatgcttaatcatgttgctggatcataactacgttttgatttcgactccatgatattgactttcacttacccatttggggcttagtgaaaataaactttgaatttgaaattttgaaattctatattacaaacctcaatatcatgcaaaatttctattttttaatcctttcatcgagcctagttggtataaccaacctgtttccgttctttatcccaaccagatgctcatcttgtgtcctacctttttgtagataacactggtgagttttggggaagtaaacatcatatcgaccaggatctgcttcaacttctgtatgaggatcattctcgtctctgtgcttgtccgtcttcttctagtgacggtctctccaattcaagattcgaagattgggagataagtagcaaatacacaccttctcaagaacctgaagtgcaacaccattattaccgcaaccatatcgaaggccaaggctaaagatgtttcatctgggaacttaggaaggggtggaggcgatatctaccgtccaatttgatgtatattgtctgacaagattcagttgatactttgcccatgggccatccaaatcatgctgttgcaggtacacccattgctacttttgtcgtaaccattgcaagaaatacaaaccagagtccatcctagaataggatgatagcatgaaccaaacaaactatgtggaagtcttctttctaacccacatctagctcgactcgctacaatgctgagtgcggaacaagcctgacctactatgaaagaagaagacgttgagggggatggtgaagtccatgagatggaggatcagggcgaggtccgtcctgatactacttctgaagctaaggaggaaggtgtagctcggaggatgcgccttggtggctttaacgaagacgacaaacctgtgtctaaggctggtgaaatcctggaggccggtgaagattacgtcaacgaggaatacactaacgctattccccaaagaagacaacgcgttctaggatatcggtaagtttctcctccatccgtggtaaccagggaaaaaagaagaatttgtagaagcacagttacttaggggatgtcgattgcttccttccctctcaaaactagctgattgttgggttttgtgccctaaaaaaacccatttcaatata

SEQ ID NO: 310393 - DNA, 3947 bp, Cannabis indica
cttttctttatttagaaaattaacttttaacttaaaaaaatttctactaaaaagtgatgcagataattttttttaatcttttcacttctaatatttaaattatacattagttaaaaaaaaatactaaaatgataaattgttaaaagaaaatattaaaattacactatgtttatttatttatttatttgtttttatgattttcaatgttatcttgacaatttgaaactacaatattcagtaattaataagtttattaactatgacattgttgattggtggtttgtttctaatttttcaatggtcttaattttcctacaaagtttaacaactggatcttggtttgcttgaaaggtacgtcctatattttaatgctaaatggtaagcttcatggcttgtttaaagggaaaaaaaagccttcgccaagtggactccatgtctcatttcctgtttgttttgattatgaagtactttactaggttgttgcattaaacttctaatactaaggggtttggttttcatcctttgtgtaagtcgctgaaacttgttaacccgtgttttacgaatgatttagtcatattttgcaaagggaattagaactctctaaaaattatacaagctactattgatcgattttgtgtcacctcgaggctttctataaacatacatgttcctttgatcttcgagaaaaagataaccaccaagcatcacctttgatagttgcccacctaattaaggataaattcgcaaatgacggcttggataatttagcctctgatataaggagagatatgtacaagaattttgggatccaaatgagttatgaaaaggcttggaggtgtagagagaaggcactacacctagttcggggtacacctgaagattcatactcaaaattacatgattacttgcacatgctaaagttgaaaaatctaggtaccatcacaaattttgtggtagaggatggttgctttaagtatggtttctctctctgggtccttgtaggtgtgggtttaggttttgccgacctgttgtatgcattgatgggtctttcttgaagacaagatatggtgggaaaatattgtgtgcagtggcactagatgtagggaaccatatttttctgatagctttcgttgtagttgacagtgaaaactacaactcttggacctatttcattagaaaattgaaagaagggattggtgatgttgagaagttagcctttgtgttggataggcatcaaaacattattcatggtttggagatcttgttccctgatgcacaccacggtggatgctaccaccacatttctatgaatgtcaaccacaagttcaagactgacgtcttcacaaatcatatttacacatgtgcctacacgtattcaaaaataatgtttcacagagaatttaaaaagatttaggcaatgaatgttgcggttgcacaacatcttgaagaaattagatttgagaaattggttcggtcgaactttccaggggtacgttacaatgtaatgatgaataactggactgagagctttaaccacacaactacggacacaagagactttctgatcactgcttctgtagcattcctgaggtcaaaaatccaatagtggtttgctatactgaaagagaaagctgacaagtggatgaagaccctagcaccagaaatagaggaggacttgtaattgcagtttgagaaatctcagtatttgaacgttgacacatgtggaccttacacgttgaacgtgtccaccctagaagatcagttgagactggtgtcgtagtggacttgcaggaatagacttgcacttgcagcttgttccaaatcatgaagtttctttgtcctcatgtatgtgatgcagctcagcaacagagtattagcatgtacgcactatgctcgccatattacacaatagaatattagaggaacacatatgaaggcacaattatgacagtttgtgacgaggatgattgggaattgtctgatgacataaagaacatgacagttggagtgcatgttgagaagtcaccagtagggcgtccgaaaaagtaaaaggttagaagaattaagtcaaacagaattgcttgtaatggtgaaagggttgtggcaaaacgaacttgtagcaagtttggtggcaaggggcacaatagaaaatcttgcgcctaccgagattaaaaataaatgttaaatttaatattattatgtgctgtactattatgtattcttgttgaattattgttggactttattaaacatttgtggcataaacaggttttcatatagttcttacaaatttttatatgtaaaatatttaaagaaaatcgggcctatatcggatctatcgggttatacagtttttttttattaaaaataaagtaattttagtaatttggtaccctatgttttatttaaatacaagttaggtaccctatgttttcaataatatttatttgacactgtattttaaaatcatacataccctaaattcaaattattttgataaaattttatcaatacaatcaaagtatcttaaattttataaattttgaattcaaatttaattatttgattacatgcaacttagatctgtttggttaaattaataatattttattaattaaatttattttaaagtatcaaatatgtataatttaaaaatataaaataacaattaaatattattaaaagcacaacataccaaatatatttttgactaattaagatttttgccccctgaactttgatatgtaccaaatcatgccctctgaacttttaagttcgttaaaaatgcccattgaactattgagattgttggatttaaggatttttgtctaatttcattcaatttcactattttaatgattgtttatgtactaaatcatgctctccaaactttgaaatataccaaataatatcactcgaactttgacatatactaaattataccacataaattttcatccatgttagacttttttactaaaattagaaaaaaaaatccttaaatttaacaagctcaatagttcaggggtatttttaacgaccttacaaatttaaaagacataatttggtacatataaaaatttagggagcaaaaagggaaatttgaaaaactatgcataaaataccctaatattttatgcctaaactaatacatttcaaaattgaaaacatatgaccattttttaaaaaacccaacaatacccctctcataacaataccccaactctttctcttcctctatctctctcggttctctctcaaccaaacccctcaccaaatcaaaaaacccctcaccgtctaccacctacaacgccggccctctcccaaatcaaatcgaccacttctaaccgcctaccgcctaccgatgagaatgtcaaaggtgaaggtgagttttttttttttcaattttttcataaagtttttggttttaaattgatggatttatggtagaaatcgattgttttgttgcaatgtggtgtgaaatctgttagttagggttagatttagggtgggatcggtcaaatatgtattttgggaaaatttaggttttttaacgtgtctgatggcccgtccgatgcactctgatggttcaatgaagtttttggctggaggttgaagatatcggaccccaatgtgggtccgatgcagcccgatggtcggtctgatgcagtccgatggtccctatgtattttttggctgaaggttgaagacatcggacccaatgtgggccgatgtagcccgatactgtccaatggtccaatgtattttttgttgtggtggtggagtagatcgggtgggaagaagaagggaagagagagggagttgatgtaaatggggagggtattttgggaataatactaaagttgacatatgttcaaaatattggtaagtataagtttatgagaatttttttaaagaaatgtaagcataggtgtcgtttggtaaca

SEQ ID NO: 310394 - DNA, 1718 bp, Cannabis indica
attgacatcaacatttttcatatgtcaacctgggtgctggatgtcaacccgggtgttgggagcagaacaaccttcaataaagcaaccataactcactcaatattgattcgattaacgtgatttaacttgcgttttgaagatatttcaatgatcaatcaattcatgtatcacactccaatttcatttctaagttatcaagtccaaaatttgtcctcaagagagttatgaattttaactacacattacctgaagtgggttctgtggacgcgactcaagctctggaaatcgacgatcgacctctggagttaattttaccattagatcatcatcaatggtaaaaaaatagcctaaatatatatatattttttttcattattttattattattttaataggacttctcttcctataaaaggagagctcatccagctcatttttcacatttagaaaagtatccataaggttcgagcatctctctctagtttttctcttagctatttttcttgcaatcattctcatgagaataaaaacttaaagtagacgtagctccattactttcgcaacacatggagtgaactactatacattcttatgttttctctttattttacttagttacttctaacttacaaatctcgtctatacaaatgagcgggttggacatttttctgcgttaatattttggtgctttcagtgagagccacaactcaagatgtcacttacaaagtggttgcaacacgatccacaagtgtggaaagaagcacaactactggccaacagactaagggcatgccagtcattggaactggtgatgggactacacctacatctcagatgccaggtggaggcctcagaacgagctctacagctcgcccccaaggccaccaacatccattggtactaagactagtgaacaattacacctggcgaaccacgtgtggaactagaagaccccgaggaggtcgatccacgaattgaactgcttagccaaatagtggttgacatgcaacaacagctgggacatgctcttcgtaagcaacatgaacaattataaaactggttcatggagaattggaggaacattgagaatcaacgtgctgagcagaaaaaacaaagggctaacatgtctcaacggatcagggaggcctattgctccgctcacagaatgactcccttaaggagaggttttgagctagctgaagagataccctatcaaccaactggccacatgggaacaagtactaaaggggaaacccttaatgcacaaaactcttccaccatacccggtggtcgtgctaacacttatcgttcaacgggtgttgagtctcctcagagggaagaaaactttgagcaagattctgaaaggactcaagctcaagcatgcctcctccacctgattttgagctaccatgtactactaagagaaccaactgaactcctatacaaggttctcttcatcgatcgaatgacactaggcctcatgatcctgcaaagggaaacggacctactacaagcatcgaaaggggaagacgaagactatactttgaaatcaaaggttatgaaattataagggtaaggactaacaagctgattcacactcaaaattatttttgagatgagagaggtgagttattgttgggttttgtgccctaaataaaatccatttcaatataatcagatttattagttaataaagatcagaaataacattttatgtt

SEQ ID NO: 310395 - DNA, 754 bp, Cannabis indica
tattttttaatttaaaaaataacccctaaacaaagttagtaagaacacaaattcaagaagagaactcctcctaagaagcacatcaaaaacataacaaaacattgctaacttttaattaaataataacaacacaaaacaaattcaactccctaaaaaaaaagagcctagagttgaacacacataccaaaaattaaaactttatactctccctttttatttatctcaagggctaaataactcaaagatgaaagaaaataagacatgtttgaccaacctctgtgatcgacctaagctctttgtcttagccacggtgatttaaaaacgcaaagaacacagcacaagtagaagagtagagagaaagacatctcgagaagaagagaattagtcttagaaagaaagaaacaactaaacaatggaaagactatcggtaaaagaaaaggaaataaaataaataactaaattaaaatgaaaagttagcattgtagaccaaataaccacccaatatcataacacaaaaaaccacttcccccttttgaaattcaaaattgaacataagaaaacaaagagaaggaaagcaaaaattgcagtcaacactccaacaaatcataattaatatggaataatttttataagaaaatttaccacaattatttcaagatttgcaataattaacacttaccaaacaaaaagacatttattatccaagccaccgatttttttttatacatgtatatatatactaggtaagagttac

SEQ ID NO: 310396 - DNA, 1233 bp, Cannabis indica
agtacaaaagttatttttggagtgtaacagtataaaagaaagaaaatgggaaaacacagtaaactgtgtaaatttccctaatttttttttagctaacatatttcaaaattgacacaaatcatgcatttgatagtaaattacaaaaatcgtgtggcattttatttgtgttctttcttagttggttttcgatttagttaaagatctaactaaatcgctttgcattttattaatgttgtttcacagctagtttcaaagggatctcttaagaagcgcattagttttttggatgtggtatgatttacattatatatatatttttaaattataatcaatttttaagttattgtgtgttatttatttgtacttattttgttgtggaactatttctgttttaatttatgtatcagtattttcataattgattctttttttttttttaattataactatttatgagttattgagtgttatttattttttagtcatattgttgtggaactagttctatttaatttatgtttcagttggttttttatttagtcatttcagaaaatagttcttgaaatatttattttagaaatcggatgttaaatgtaatttattcaagcaaacaatttttaatttagttatttcgtgaacagagttttgatttctttaattcaaggaatcaatttttatttatttcttttatttagatgatttttgtgcgtaaagttttattttggctactttacgtaaccaaattttttgtctcaggtttttaacttgttgataaatataaccagttttttatcttatattttgagttagtgtgtattatttgcttttacttattttgttatagaagcgaatctatttatatttataccttagtaattttggaactgattccctcttattatagctattttttgagctattgtgtgttatttatttttagtcattttgttgtggaaccgattctattttaatttatgtctcatctaatttgttatttagttatttcaaaaaaacagctcttgaattatttatttttaaaaccagatttgatttaattaattcaaggaactaattttgattcatttagttaatttaactgctttttgtgtgtaagtttttattttcgctgttttacggaattagtttctttgtctcaaatttttaaatagttgataaatataactagttttttttatcttatatttgagttattgtatattatttatttttatt

SEQ ID NO: 310397 - DNA, 1786 bp, Cannabis indica
catcttaaaaaatcatgaaatttaacagggaggaagtcaagattattgaatgtcaattttctattggacacgtggagaagcaacgtacttttcaagcactaataattatttttatcgaaatagtaaaaatctcacttttctgatagtggtactcctttataaaatatggtgtggactaatcttggaatatatttccccgctagacgcaatgaatgcgtactactaagacatgaagatgtggatacgttttatgttaaatttggttaaaatggccccctgattcaaaaattgaaaatattcttcttttcaatgtaaattttgacaagttttttctttaatcttacactcgttagtatccttttaaaatctcaccctacacatattgaaaaatcgtaaaatttaacaggaaggaagtcaagactgttgtatatcaattttccattagacacatggggatgaaacatacttttcaagcacttatattcatttttatcgaaataacaaaaatctcacttttctgatagtggtatcccattatgaaatatggtgtggacccatctcggaatatttttccccgctaggtgcaataaattcatattactaagacatgaagatgtatataggtttcgggctaaatttggttaaaatggccccctaattcaaaaattgaaaatgttcttccgtttagggtaaattttgacaagttttttccttactatttcactcactgattttctcttaaaatctcactctacacatcttgaaaaatcataaaatttcacatggtggaatccaagaccgtcatctatcacgtggagaggaaacgtacttttcaagcactaataaccatttttatcgaaatagttaaatctcacttttctgatcatggaacccttttgtgatatatgatctggaccaatctaggaatatttttagccacaaggaacaatgaattcatactactaagatatggatatgtagataggtttagcattaaatttgtctaaaatggcaaattgaaaaatattcttctttttagtgtaaatttttaacaagtttttttttactcttacactcgttagttttctcttaaaatctcaccctacacatctcgaattaatgtgaaatttcactgggaggaagccaagaccattgtcaatcacttttttataggaaatgtttagagaaaacgtagttttcaagcactgataatcatttctatcgaaatagtaaaaatctcacttttttgatagtggtacccctttgtgaaatatggtccgaaccaatctagaaatatttttatccacaaggcaaaatgaattcatacaactaagacgtgcatatgtagatacgttttgcattaaatttgtctaaaatggctccctaattgaaaaattgaaaatgttcttcctttcagtgtaaattttaacaagtttttttcttactcttacactcgttagtattatcttaaaatctcaccctacacatctcgaaaaatctcaaaattttacacggagaaagccaagaccgttgtccatcattttctattggacacgtggtgagaaaaagtagttttgaagcactaataatcatttttatcaaaaaagtaaaaagctcacttttctgatagtggtacccctttgtgaaatgtggcccagagccatcttgaaatatttttccctgctaggtgaaatgaattcgtactactaagacgtgaagatgtagataaattttgcattaaatttggttaaaatggccccgtaattcaaaaattaaaaatgttctt

SEQ ID NO: 310398 - DNA, 628 bp, Cannabis indica
aaaaaagttaaaaaatagtatacaggataattccttttaaataaatcatatgcactcaattattgaaagaaaattataattctagaaggatacataagtgtggctcgaattcaagcacatatggtaattcggtgggatttcatctcaaaattaatcgacaatgacaggagtagctcatacattttatatattgtattatctttccatatattagcaatatgagactctttctaatactccattttcacatttggatttgggaagtgtggatataatatgcaacttttgagaaatttgtacatttttttaaaacaggttaaagaaccaaacactaaaaatttacacacattggtcgaaaggttccaaatagaacggaaattttttaattgttatgatatcatgttagaatttaagataaggtatataagattccatatcaaaaccaattggtaataaaatgtgttcacgctaaaaagtggccaatattggctcgctagattgggaagatgaataatgagtttaagtgattaatttagagcgacacaaaatttatagtaattcactcttcacgtcgtaatagtaatgaagttacatctacttcgagtttttatttctcacgagaattata

SEQ ID NO: 310399 - DNA, 1614 bp, Cannabis indica
tttgtggtttttttttttttttgtatttccattgatcattacaagtttatacataattataaccacaccctaataatattaattgtgtgcatttggttatgaacaaaaacagctaaaaaacaaattaaggaaaatgccgtattatacatatatacatatatatggataattaattattaaggtctcgtgagtgtttttctttctctccctgatttgtggtgggtgttaataccaatgcttcatcatcagatgtaaatagtactactgtgttctccctctctctcgttttcattaattttgagtttttgattttttttttcttggcatgatcagatcagtactgacacatgatatatattatttatatatcttcatgtagctatagccattattatttatatatatacgatatatattcgacaatagtagtcacgtatatatacattcacattatcatgattcagattgatttatcattatcgaataataccaaaaatttcagcatatatatatatatcagtcacattcacattttatacaaatatatttgtggtctcacattatatgtttaatcatcatatatatatatataagtatacagagagtagtactgtatcagtataataatgtgaatgactgaatcatatataatctaatttaagagaccttttatatataatattgaaatgtttgtagatcattttttttttatatataaattaataaataataataagtgcattgtttgattatttattaacaattgaaacccgcatgcactatagttggctgagtgacttctcaatttgccaaagcatatctatagttaattagttatatatatatatattagcatattatatatttgtatatatataacatattcattttatcaaagagatccatatggaaatgggatccaattatatagcatgctcttgatcgatctgtcatggggtactgttcattgcatgcatgtttctctatcctccattaacccattctcatttatttccgtgtgttgcatacaagtttggccttatctatctttatgtcttttctacaattaataattaatatcatgatgaaaaaggaaagtgacatctttaataattagtttttagaagtttcactttgttgatatatacatgtttggaaatgttatatatgtccaagtccaatagtgtcattttatgtttgatttaagagatttaggttgtgttcaaaattattattaaattataataaaaaagaataataatattatgttagaaaatttaaactactcaagatgaaacaaaacaattcatcaatagataaaataaattaagaaaccaaaaactaaaatataacttacgaaagatcaaacaactaaaatataacttacgaaagatcaaacaatgatagaaaaccaaactcaactaatagaaacacaattgagaatgatttaatcaacattacaatggtggattctctctcgatcactcaatccccaagcatacacaaatgggctcctttgttacgtatattgtattagtattatttaatataatagtatgttgtgtattgactagagatgaaaatttatactgcggggatgggtaaccgcgggga

SEQ ID NO: 310400 - DNA, 1213 bp, Cannabis indica
aggaagatgggaaactttcaattttccttttccccaatatgtgctttacttttttgaaagaaaaaaaaaaaaaaagtaaaaagacacatattggggaaaagggaaaattagaaagcacatatgtgctttactttaatctttagaaaagaaaagagaattattattatgcaaatcttggacattgttttacttttcataggcacttttgagtttttgagataaaatgctaaagtacctaataacttcaacacaaacaaattactaagaaaaagaaaaaagaaaacaaaatgagtaaatttgttgttaaaaaagagaaaaatctatgagctaaaaaatttagaaagaaaattaaagaagacaaacatttgaaataagagaaaaggacactagctatagatatagggaagaaagaaagtaattttatccaaaatggtccctcttctatagtctaatatgatcactagtccctaccatatttttatttatttatttaatttcaataattatcaaacaaatttggtgaaagaaaggcaatagtcacatgaaaagaaaaagaaaaatatatgatttttgcacacgaatgggatgatgtcataattttcaccatgtagtaataggtagttaaagtgtcacataagaaggaagaaaaaattagattaatttctacatttataaaaaatatatatataaaaataattatatactataatttgatttttttttaataaaaaattcatagattaagacaccaaattgatcactaacatctaatctattatgataggctcctatgaaaaacattggaatgtgattttacatatcttatcatttagatatacaattttataatcaagatgaaaatgattaataatctctttcattgattttttttgcttgtttgtaattggtaaaaagaaaaaaaaaatgtttacaatccattgatgtgatcaaatatggatcccatgttccattttatttgatctctcttctattggtacatactaactcattctcataatatattaaccaaatgtaattttattactatattttcactagaaactaatacaaatgcaatgtatgaaatcatccaattgggattaaattggatccaaatcaattgagtggaatttagatccaatcaatcacatgtggaaggaaatagataagaagtacaagtacattccatgaagaaaaatattattattattat

SEQ ID NO: 310401 - DNA, 1181 bp, Cannabis indica
ggatgagatagagtgatgacaacgggtgaggtacggtgataaaaataagtgagatacaatgaaacaacaagtaatatacaataataacaatagttttgaattatcgagatatgaaaatgatgcattatggggaacaccgtaatttttttttagaccatcctatttatttatttttataaaaataatttcttaacaaaaaaatttaaatagtacatataataaattttaaacttcttaataaataaaattattaataataatatgaaataagataatttatttataattttattatatattaaaattatatttttaagtaattatttattataatactacaaattattaaattagtcgcgcgaagagtggctatattagcctaataataataataataataataataataataataataataataataggatgaggtaaaggataaaagaccttaccgtgcaagtatgtaagaatttgcgatttgggaattgtgcatctgagctccattccatctcataatttccttctgattttgtttttgtaaggcgtttgtgttgattctgaaatggcgggtggagggattgcatcgggatccacagtattcaccaagtttctccggcctcagtccacacaatttcagtcagccgccatgtggggtgttgccgccaccaccggcgcactttggctcgtccaggtttcccactctctctctctgttttcccacttcatgtcaaacctaaattttaattttcttgaccaccaaacacaaaactacgcgttaccaaaattgtgcaatttaattcttggttttcccttcacaaacccaataaaccggattttgatttgtttcctagcaaaaacatggtgaaagaaaagaatggttttttaaaaatttatattagtggaattcttaatttgttttgtaaccgtaaatggattattgagacctcaaatttagaaacgttaagctttcaatcttaggtacgtggcttgataattaattttgttatcatggattttagattttaatgaatttcaccactaaaattgtgtatataagcaaattagatttaatatagaacttgtgcttcaaactaattactagattctttttatcatctgggttctaaacttaccaattgttataattgtttggtttccatacattgccaggatagaca

SEQ ID NO: 310402 - DNA, 1874 bp, Cannabis indica
aatacatatatagtttcctccaccgctcaaaaaatacaaaagtaaaagttgatacaacaggttcgttcaaccccttgagcactcaactattgtgcaaggtacgtaaatggaccattaataactccttcagccacagagaacagttcgaaaagtccattggaaaaattggagaatggtgtgtcaatcaaaatttgttggtggtcttggtttcaaatccttagcccattttaaccaagctatgttggctaagcaagcttggagaatacttaaatatcctaatcctcttcttagctcaatcctcaaagctcgttacttctctcatacttctatcctcgatgttggccctggtcatagcccttcatactcttggcgcagtattctttggggaagagacttgatgaagcaaggtcttatttggaaggtgggtaatggtaatactgttcgcaccattgaagatcattggcttcctgattttagaattaagtcatattcctctcctcctccatctgagtctactcattctttatttatttccccatctagggcataagattcccttaagcttcaccagttttttgatgatcaacttgttgatagcattcttaatgtcccaatctctggtaataactgtcaagatgatcttttttggagcagaaataattctggtcttttcagtgtcaaaactgcctatcgcctaactcttacttctagggatattccttcttcatcatcttttcgccaaagcaaacatttttggtctaggatctggtcttcctctgctcccccgaaagttagacatctggtgtggcgtgtgctgtctagttctatccctgtagcctcttctctatttcatagacgcatcataccttcccccatttgtcctatctgtcatatgaagtgggaaactgtggaacatactatacttgaatgctcaggtgctaaaaaagcttggaaacattctcaattttttgacttttatgttcgtaataaaagattaaatatttatgattttattgttcaagctattgatctctatgacaaatataatgtagctgtttattctgcctagttttgttgatatggaatcagaggaataatctccttcataataaaaaaatcattgccttcttggcaactttttgatcaagcctctaattatttatgggaatatgaacatgcttctcactctagttttaagacagatatttgtgcttgaagatgtgatgaacaggtttattctcccccgactggatgctggaaaatcaacaccgatgctggtattagaaacactgcaaaaaaacatagtctgggaatagtggtcagggatgactgtgacaatataaaggctggtttgattgttcccattgtgggtttagttccccctgaagttgctgaagctaaagccattttgactgctctttcctggttgcaggccaccaagcttcctgtcacagttctttaatcggattgtaagagtgttgttgataaaatttatgtaactaattgttataattctgttcttagtgacattattaattgtattaaggatttattgttgttcagtcttaatttgctcattgttcatgtacctcgtgagttaaataaaattgatcatgcttgtgctaaggcaagtcttggattagatagtgaatatatttaaaatgagtctttaccttccttcttcataacctgaaaactttatatttctttttcttttcaataaagttttaggttttgtcaaaaaaaaaaaaaatgtcaaaatagagactattataaattagttaagagggtaaaagttgataataagtatatttctaagtacttatacaaaaatatatatatatatatatatttctaagtatataataaatctt

SEQ ID NO: 310403 - DNA, 1441 bp, Cannabis indica
aaaatagctaaaaatagtgtatgtattatatatttgtatgtacatataataggtgaccccatcaccgcttaaaattttgtactttagttgtatgtgtgattctgttctctgacattatgtatgatgatgagatgtggccatccaactcatcattcattacatgccacgcatccattattctctgtaactgttaactaaaacccatcccctccatcatcatcaccatcgccacctggtacaccatacacctttcctttttatttttctctaactattccataaatttaatactataaaaagacaaatgctaaaatactacccaccactccttaagttgcttctacataatttacattttattgtaataatttttataaaattgatatatatttttaatggtattttttttattttttaactaaaataaagagttacttttattgttgttgcttttattattttttttttattataattagtatttaattatttgaatgatattttataatttacattgattaaatataaatttttataaaataataaaaaagtaatagtgttcttaatttaaatactattaaaaaatttatcaaaaaattatgaagcttcctttagagaatatagttggagatgccctaagtaagattaagcaccagcaatactcagaagatacaatattatttagtactcacttaagatattatattactattaattaaacattaagttttatataatataattctttacttacttgtataatttaatttaattatttataaatattacttatttatttataaggagttgtcttaaaataatgctaagcatcactaagattatctcgataaatagtataaattttatgttaaatatagcttaaaaataaattaatattatatttattaatttataattgtgctatggtacactagtagtaaaataattttctttttttaataaatacgtgtaaaagatttaacaaaaatattaaaattttattcaaactatataaaaaccatattaaatatataaataaaaatataataaactattgggtgattctacaatgcaccctcttaaaatggatgtactgattacccttaacttgtttcagcatctagaagaattttttaaatcttaattttttttctatattcatgtacgttatagctatttaagatatcctacaaaattttgaaaaattcgaaataatttacaatatagaaagcaatgttcaaacagtctattttacacgcgtataaaataaaaaaagtcacgcgtgtaacacactgtttgaacataattttcggcgtgttaaacttttccaaaatttttaaaattttgtcaggatgtcttaaataactataacgtacatgaccataagaaaaatttgaactaaaatatttcggatgctaaaacagataggggtgcatcaata

SEQ ID NO: 310404 - DNA, 918 bp, Cannabis indica
tcgaacccaggacctctaacactcacacacccacctatggccacttgagctaaccccaagtggttaaataaataattctatttagtttattattttttttcctattagatatttagttttgttttctttgtagttatgcttttaccttgtttttttttttcaaaaaaacaaagaaacaaaaagtgaatgaatattcatatggccgaataactatgtttggtgggtggtaaatagaatgaaataactattattttcagtttttgaaaataagaaaggagtaacaattattcatattacattttatttttatttgtattctagaaagggaaaaaatgggaatagataagggaaagaagtgagaagaggagaggtgatgggttaggtggagtgggcttttcaaagggtccattgcggtcggggctagaaaaggaggtgggggcctttgataggctggccattattgaggggaaggagaccccattggcgccagaaggtaaagctaagccaacctcaaaaaagtgtggtgtctcataaaatcaacaaaatatgtggacccttcatgtctctggctgtggtcctttcctttctacattttttttttcctttgattgagaatattgaagagaaacaatagttacttactttagttttgcacacgagtcgacagtcacttcttatgtataaaatatatatcggattttttccctccgaactttgatatgtactaaattatgccttcttaaatttttttggcggttaaaaatttcccctaaactattgagattgttagatttaaggacttttgtctaatttcattcaattttaatgtttattgtttatgtactacaccatactccaagactttgaaatctataaaatctcaaattttgatatgtactaaatgatgctccttgaact

SEQ ID NO: 310405 - DNA, 1809 bp, Cannabis indica
atttcccaacggttcctaaaaccgtttgttatgtgggtgtcataaaaatacggaactttaaaagacagtttacaactgtttgaaaaagtcaatttaaataacagtctacaagtgttgggaaaaatcacattaaattactatttataactgttgggaaaagtattatctaaattaaatttaattacttattaatatatattttgtaaatattaaatatatataatagtactaattttcacaaaaaaataataattaattaaaatatataaaattaatatatttttaaatttaaatatcacaatttattcattcaaaaaaaatatcataattcattaaaactgtaaaaaaatcaaaagattattacacaaaattaatatgatacaattctggaaaaaaataaaggaagaaaaatgagagggggactagatcaggactatggttatgaatccaacgctgatgttgttcttttggccgccattgctggctctgctgagcatcacagtcaaatgatgagggtgagtggtgctgctagtcgtgacgagaatgattatgagaatgatcaagatgaagacgatgatgaagattggactgataacttctacaatgttgatcttgataatatggaggagaatgctataaacaacaagaatctttactcttagacttacggttttaagtctttgcttgaggaaatgtcatatgggtctgctgtggctaacgagattaataataataatggtagtggtagtgtgcatttacgggtgaggaatgagatcaagagcattatgccatggacctggtgaggctgtgaagaaggagatggatctgatggagatgatctaccagtacaacaacaaattcggccactgccaccgcgcaagagaaaaaggagagagagagaagaaaagcaagagagagacaaggaagagggagaggggtggggtttttggggtaggggaaacttgttttctggttcgtttgaactactagcactggcagtggcaggatttgttgttgtaccgtagtgacgcacaaagagaagataaagagagggtaatcaggagagaatgaaagaaaaaaggatattgaccttctgcttcaacgagtcctttggtgatatagtagactggattttggatgttattttcttctcttatcatcacaacacttacagcgtattcggtgatagcaaatatattcccagttcttctctatgtaggggttttgagagtacgggaggctttgcgagttgcctttttaattcttggtaagcattatcgcattcctccatccattcgaactttttattacctcagaggatgttgaagaaaggaacacacttgcccgtggattttgaaacgaacccgttgagtgcgactatcgaagaagttaagctctggacctcctttttgttggcaatttcatatccaggagagcttgtatttcctttgtattagcttctattccctaagcattgacaataaacccaagaaacatactcgagctgaccctgaacgaacactttaagtgattgagtttcatgttgtattttctaaggattttgaagcattcatccagatcctctctatgccccccagccttctcggattatgtgcaagtcatccacatatacttccatattctgtccgatctgttttgataagtcggtattttttcttataatatagataattatgtattaatattcttaaaactgtattcttcaacttattgatttagtgtgattttaattattttaaagatattttaaaagacttaaaatctatgcattttagagttcatttctaa

SEQ ID NO: 310406 - DNA, 707 bp, Cannabis indica
gacactactaatatcttttaagggtagaattgattaaaatataatttaatgctcctcaatgttgtttcaaaatatgtaatatgtatttcaaaattgtatatttttggacatagtgattcaaatcactcataaatttataatgcaaaaatttgcataaagcacaggattcttctcgaaccatgatagctcatcgtctaaataaagaggatgttttgccaaactatggctattgaaatcttattgctaaccacatgggacaaaagtgctcccaaaaatttaaaaataaatttttttaacattttcaaacagtttacacaactcattgactaccacttgaaacatcacaacacaaaactgagtattaaaattgtattaggacatatttggtacttcatattttaaattcttacatatccagtagtttgtattataaaaaggacatttttttattatgagtttagaaaataaaaattaattcaaagtatttaaaataatgagagtatttttttaggaaaataatgataatatttcgttttgtattaaaacatagatatctcttagattttaatatatttttaaatttaaataaataaaaaagttaaaataggactatttttattaataaatggtttattatctgatatttttacaaaatacaccgaaaatttgaatttttttttttacaaaatatattaacacgaataatt

SEQ ID NO: 310407 - DNA, 1091 bp, Cannabis indica
gtaaaataatttccaacacccgattggctcccctcgtgtgcccatgatgatccaggtccgctaaatacgaaaggcacatgctcttaaaatattccgaaaatatagtcaaaaataataagtaaagagatatttattctttgaatgattattttattattattgtgtattttaaacctaacccgactatagttacgggaaggtgcacctatggttaagggatattaaatatcctagaaaaaaatctatataacgggagtgaaataatcacttgtaaatggaccctgaacttgatacactactacaatataagactttaaaagctgttttttcatcacttttcatgaaaatggaagctaaagggtgtaaaaatacccgtctagtttaaaattgatatttaattagaggtaatttttaataaaaactataggtatataatttatgtggtacatttagaggcagttttagtatcaggagtgtgaagagtgagaaattccctcaatggcgtcggttatttgaaattaatcgacgtcatatatatacctgacacttgtaattttttacactatggcgtcagctaatttcaaataaccaacaccatagaggtatatgtctaaccctttcaacatgcaatctcacttcgtcttcttcttcaccacgatacacacagcagccacaccagcccagaaattacctaaaccctcgtaaccaccactgtaaaccctcctatctccaccatttttacactattcactacaacaattatggtcattagaggtggaccactccgctagtaataatatctaattttgtcgctaaaaagtaataccggcagggtccgccggtaataatccgctagtaatacttggtcgccaataactattattagtggcagactgacacagtcgccgctaataatttaaactcgcactattattagcagcgaattaatctgtcggtaatacttgtaaatataaatttataatttttaacttttgaataataaatatagaattaacattaaatatatttaactttttaaccattttacttatcaagaatactcaagagctaatattatataaaatatttat

SEQ ID NO: 310408 - DNA, 973 bp, Cannabis indica
ctgtttttcttttctcttcttcttcttccgcactaatatggtatcagagccttgattgtgtcttcaatggcacggggtcagggtgctcagtccagaagcacttctgaaaaactccaatcgattctttgttcttcaaactaatcctcaatcctactctgatgatgctcgtaatctgtttttcttgtctaacagtgatcatcctggtgttagcttggttccaaagatcttggaaggttgcgagaactttagctcatggagacgagctatgaaagtagccttaatcgccagaaacaagcttaaattcatcataggaaagttatctgctcctaatgaggatgacaaagattttgatctttggaatcgatgcaacagtacggtcatttcgtggatccttcatgctgtctctaatgacattggtgaaagcattatgtacattgataatgctgctactatgtgatcacatatcgaagaacgattaatcaatcaaaagaatgctcctagagtttttgaagcgattcgtaccaaacagggacttgttcaaggatcgaacaatgttactgcttattttactcgactcaaatctctgtgggatttgatccaagagtatcggcctcaaccaatttgtagctgtggtgctatgaaaatcatccaggattatcaagaagaagattgagttctggaatttctcattggcttaaatgagtctttcagcagtgctcaatctcagatcttgatgcaagatcctcttcctagcatcaacaaagtctattccagtgtgatttaggaagagagacaaagaggcttgtctataacacactctgaatgtgagaaaccaggatccaatgaacgaggatttgctcgtaatgttcaacctcacaaacctaaaaatgtgttaagtgctcattgtggcattttaggtcatacgatggataagtgctacagattgaatgggtatctgttgggttttgtgccc

SEQ ID NO: 310409 - DNA, 907 bp, Cannabis indica
gattgtttttgatttgtaataatttttataggtagtttagaatgtgtaatattaagactagagctctgatcatgcatggatgctgcttttgagtttcatttattttgttggaattgtaaaaatctgttcttggatctgacatccaatgggtcagattctagcattactcctctgaatttgtaaactatttatatggttataaattactcgaagagtacatgagattcagctttggaatcactccaacagcttctttaaatctcaagttatgggtgttggaagtttgcgtaaaaatttaggaaagttttgggcagattaactacccacattgtaaaaatgatttggatatgtttaatgggctaaaactcatcaaaatttaagggatgatagttataatatgtataaagttttctattaatttttaggttaaaattcattgttgaatttgagtgaagatttttgtaacctaaccttagaaatctggaattttttttgggtaaattagggtatctgtatattgagcactttttaagcattttgtgctaagccaaaaattacgatttttttttacatgttttcaacatgtataagaatcattgtaatttttcaaatttacactccaagtaggattggagttatactttttgtaagaaaaccctaaaaactggatatttaccttactggctgttttaaacttgtaacttgtgaaacttataactcaagaataaaaatttattttcacatgaggtttattggatggataattttctagttttacttcctattagttttagccaaaatgattcgtaattaaagtttttgcaaggggtcaaagttggaccgaaaatcagttttatgtaacttttaaattttgattttctcgaaaaataacggagaaataatattg

SEQ ID NO: 310410 - DNA, 3001 bp, Cannabis indica
tcgaagccatttgcgaaaccctagttcccaaattccaaaatcaccgtcatagcagatcaaaagtgaaaaccaaaaccatagatagatgaacaaaaccatagaggaactgatcgaataaaagaccgaacgtacctgagagaaagagcaagtagcaaaggttgcgagagatcctcctttcaagcttatttggtgtcctgaagccgaagaagagaaagagaacgagagagaaagaagatgatgatgactggaagacgaaatagaggagtttaagattcggtgtgggcgagactacctgcgctcgcatcctttaatggggatctcgccttctcattggcctggccccaaaaggctcgtttggtacgtcgtattattagtattattaatacaatactatgtttgatattgacttgtattaaaaaaatatgtaaagttataatttttaataaactcgaccccaacaccgacttcaggtcgagtttatgtttaggtctgggtctagggtttggggttaggaatccggtccgtgctcctgtctcggtccgactccgagttcaagtctaggtccgggtcctgagtctgagtttaagttcgggtccccagtcccaagttccgtcggagattggaattgaccacgatcatttgtaaatattttaatacaagtaaatatagactatttattatgtattaaataatataacttacattgtattaagtttttttttatcgtaataattaatacaacacatttctttatccaaacatagtgttatttattatttaatacaatacgactcttataaggcctactaaacgaacacttaaatctttatattaactcatacatatacataataatattctttataatttttatctatatcatttaaataatatatttattattaagatatttgtggcctaacctcattaaatctttattagtattggtttagtgtgattttcaaaaactgaactaataatagatttgctaagaaaaaaaaaacattttagaaataaaaaacataatgatttttatgtggttcgggtgttaaagagtctcagtccacgagttagtactttgtatatgaaataaactcattgatgagtaatacattataatattgactttgagtcgggtaggtgtaccacatagtaccgtctgatcttgacaggtggctatgcaccgtcgatcatgtacaataaatatcatggacattggacaaaagatatattgctttatgtgttgtgtgcctttcttaggtctaacacatgggacaaacccttgattctttaggatttggtgtcagatgaatgcaacgtaggactacacccgaacctctttgactactccttcgggactacccctgagggtatccgattgtgtttctttaagtctctagttctttggacgagagtcgtccttcccaggccaaagaggtctagctttattgagatatggttatagctgaactcggagccgtagtctgacccattactttgtttgttttgcttaatgtaattatagaaagtatatagtttccttatttacttcttactagttttgagaaaccaattgttgtaattaatctctataaataatggaactatctcactattcaggaacataaaattcattcaaagaaaatacgtgagaaaaatctagatttcactactacaaatttgccatttagtgacaccctttagtgacacgcacatttgtgcgggtcactaaaagtttaaaaataatttttagtgacatgcacaattagtctctaaaatttaatgttagtgtcctataatttgagtcactaaaaatgtgaagtgtcactaaagataattttatgattttttttaattaaaaatattcacctatggagtcactctaggagagactgaaaaaatatataccaacgcgcattgcgcgtcactaaaagcactttacagttttttttttaaataataattattttattaatttgtattaatgtatggcaaaaaaaataataaaaaaagttgtagggccagctgtaattttttttttttttgtaaaaggagggcggctgtaatttgagaatgcattttgttattatataaataatataataaaaaaacataaaataataaataaataaataagttgataagaaaccctaaactatctcattctctctcaccctcacttaccgcctcttttttttttttttttttttgagataacgcctccttctctctctttctcaagatctctcaagctctcaaggtgaaatggaagatggtctgaattagtgggttcgataaccatttttcaatgccggtgagtcatacagaggccacgaacgacctctcggttcgcttcccccctctttgacttctttgagatcgttgatctcctcttctattcttgttttttttttttctattttataaaggtctgtctttcaggttgccggcgattgggggcttgctttgcacctagctgtgcttgcgtcgtcgaggttcggagtttgcaagtagctgttgttggaaatattgtgaatattttaacaaaatatataagtgtcttagtgtgtgtgagttggaaagagtcccacatgggatatgaaccctcattgacaagggtataaagagtgcaactttggcatttgggtttgggccccaaggggtacccagttttgtgcgaatgggtgaggacacacacgcgcgcgcgcgccgtccgtccgatccgagccgggccgggccgggccgggttgggttggttggtgtggtgtggtgtgacacaatattattttttacagaaaaattatttaataaaataattattttttatttattaatttaattaagaaacgtgtttaattaaactgattacttagtcgtatcagttaacgggacacgttcaaaagaccactcaccccacttcagaaaacgttattcttcccgttatgtttattcaatccattcgcctatataatgcgattgaactgatgggaagaaaacatct

SEQ ID NO: 310411 - DNA, 2237 bp, Cannabis indica
taccccttccaatctgatccaagagctgaagaataagcaaaagaatccttggtttgcagctccttagggtttcagataagaagaaaaagagaggtgaaggttatgtgacttctctatttttgttttacacctaatagtctaataaataaaaaaatattatcataaatccattttagcctgattaacactaaagacaaaacttttataacccactcaaatgaccataatacccctcccaatacctttaacttaaaataaaagcctaggggcattttagtaattctagctaatccgccaaactgacaacccaaaactctaaactagtccgatatacttccaaaataatccatcctttgatgtcatgatatttctgactactccgtccagtttccacggtcgtcgggcccgaaaatattttattccataaatggtatccacgatacccacatattccaatataatctccgtaattaataaattatgctttatttaataatttaataaattcacactaattaatctaagtaagatcataatcttacttcattaccaaaataattacatatttaataaaatatgtccaattaagtaccattttattttctgagatattacagtgcctgcctaagaaattaggaggaattggcttctaagagggtagaaaatggacatagcattgatggccaagtacatttggaccataacaagcaaacaagacaacttatgggttaaatggatcaatgccatctacctaaaagagaagaatttctagactgtgccattcaagaatgatgatagctggtaatttaagaaactcttgaagctgatagataccattaatgagagagccttgatgaatgcaggaaggattgggaaatttaaagtcatatccttctatcttaacttgataactgctgataatgcttattatgagtccaatgtttggcataagctgaatatttccaaacatagattcatatattggcaagctgtcagtaaccaactaatcaccagagatcatatgagcaaaataatgatcatacctaaggctatttaccctgtttgtgaaactgaaaaatgagactcttatccacttgttactagagtgtcctcttgctaaaagtgtggctgttgaaatatgcaaatggataggggacagcagttggcttacaaatcacaaggaatggtagcaatggtacactagacctctagttgacctccaagactgtgttcttaatacaactatggcagctgctctttactttatttggctgaacaggaatagatgcattcttgatcttacttgcttctcagctagacatattagcaaggagatgaaaaagactgtcaaagcaagggtcttgggattgaattgtaatagattaaggaggggagaacaatagattatcaatgtaattgaacaatggtactttttcttcttttgagctattggcagtaagctttagcttgtattttgtgtgttgtttttttgaataaaattccttgttaagtttaaaaaaaaactttttttaattgtgtcaaaattaaattttagatgatttgaataattaatattgtgaaaaataaacaacactgttagtcttaccaaaaaaaataattaccaaaaacatgtccaggagactattgtttatcatttaaattattaaggtatctttttataatttttaaaataaaggatttaaaatgaaattaaacaataacaaaaggtacttttttttttttttgtattatcccttttattttttatttttgttggacataatttatttatttattttaattaagttgaattaaacatttatactttaaatttttaataaaatgataaattaacaaattattcttagctaaaatattacatgctttcaactatatataaattgtaagttaatattatgtctaatacaattgtgtttagttatattcttagttaaaattttggttatgtatattattagtttataattaatatttttttattttatttaataagtaattttatttattttatttaataagtaattttattttttattaaaaaaatatttaatttaagtgatatttatatatgttttaattttttttattaattataattttaacttacctgtaatacttataatttaatgatacttttcattttctaaaaatatcatatattttttttattttttatttttaaacaataatagaaaaatatttttttttagtaaaaa

SEQ ID NO: 310412 - DNA, 986 bp, Cannabis indica
taaggagtattttagtagattttgtatttgtttcggcatacaaaagaggttttaagtctaattttttttatgatcatgtacgttatagttatttagaatcacttataaattttcaaaaaattctgagtagcttacaatgcctataataaaatttacatgtattattattttttcttatatgggtagtaagtaactatttaaatcttattttcgacataataaactatttaaaatattctaaaaatttacaagtggtccaatatagctacaacgtatacgattatgaaaaaaaataaactaaaattattttggttgtcgaaacagataaaaaatctacgaaaataatgcgtagggtctcctacaaaagttcaaataatattattatttactataaaaattgaacattaacattaactcacattttattaagaaaaaaaaaatatttttagtatttattttaaaatactatatatttcacataagatgcatttcattaattatacacttatttacttaattacatataaatttcagagatgagttttcaactcactttctctctattatatacatataatatatttgttttaatacacacacaaaaaaaaaaaacaagagcttttatttatatatatatgctaattataatagtgtatgtaggattttactactttaaccctacaccaacaaaagattaaatatcagtatcaaggtcagaaatgacctttcctggcctaaataaaccttagactaatacggaaccgttttatccccacgacaccaaacttgatgtcgtattgaacctttggttcaaagactcagtagaagagtctagaatcctaaacactcagacacaactcacacacagcctcacaaactcgaaaccctagcagagcaagttctctttgagaacttgctcgattctagccctgaaacccagatccacacccacacacaaacacagattagattagatgagtgaaaaa

SEQ ID NO: 310413 - DNA, 4234 bp, Cannabis indica
cgttcttcatattacctgagtaatgcaaaccaccctgaattggtctgttactccgatctcaccgatcgcaactttcaaccatgaaaaaagagattttcaagatttctataggcgcatgaaacaaaactccattcttggaaggtagattacctcaaccccctatttatgactctctttacagctcttggataagatgtaaccaattagtcatgacttggatcctttattctgtttcacctgagattaagagcagtattatgtatctcgacactactgtcgagatgtggactgttcttaactacagattcaatcaaggcaatggcctaagaatctttgagctaaatgaaaccttaacttatctacatcaaggtgatgatacaatgagtgcttagttcataaagttgacagccatgtgggatgaaataaatcaacttcgttcaagaattaactgtacttgtgtaggtgcagctcaaacacaagatcacatcaaccatgatcaggttttacaattcctcaaaggatttaatgagacctatcatgctactcgtgatcagatattgttaatcgacccttgtccacctctcaacaaagtcttttccacggtcatccaccaagaaagacaaagaacacttggaaacagattaacccttcccattattactacaacaaacactaatcctccccctgcactagatcccaaccctgctgtcaaccaaaattccaaaaataaaagatcaagaccccactgcactccctaccaaaaacctggccattacaaagacaagtgctattttttacatggctttccacctagctatggaaaaccaagatcaaatgacacttccaacagcagcaagaaaccaaaaactggttccaccaagaactacacctcggactcacaacccttccaccaggagaatcatccacttcccaattccctacaactcaatgtcaacaactgatttctatgttgactcaacagctacaaccaaaaactgatgcttcaacaacagaaggccctaccatcaacaacttcactggtaacaacaattctcaacctccaatttcttaggttatagataatggtgctactcattatatttgttgcaatattaaatgtttttctcacatcaccaaatcaaccaaacataaggttgtcacacttcctaatggtaacactgtacatatcaaacttattggtactgtcattataaattctgcaattacactgtacagatcaagcttattacaatccactatcaagcctacatagtagactcttgtaatgtacaaaacaaaaactaatggcacacacactttgaccacccttctgtattaattacaaataaactgaataaaagactgcaattttcttttgatgcatctaatgtacataactgtcccacttgccatttctcaaaataaaagaaattaccttttgtgtccaacaacaatttttcaccagcaatatttgatcttatacatctagatatctaagagctataccctattccttctacagaaagatacaaatattttctcaccattgtggatgaccattgaatgtacacatggatatacctacttcgggttaaattagatgccccaacaataatttaaatatttttcacttttgtcaatgtccactacaaaaaaaatatcaaatctgtcaggatagataatgcaaaagaacaaaatctcaaagcttttaagcaaaacatggaaccactcatcaaaactcttgtgtggcaagaccacaacaaaatgttgttgttgaaagaaaataccagcatatactcaatgtagcaagtgcacttacctttcaatccaacttatcttttaccatattagaattacatggtcaaaactgttgtctaccttatcaatagaacaccatctattctactaaaagataaaactccttatgaactgctccagaaaaaaaccaccaaattacaaccatctccgaaactttggatgcttggactatgcttcctctattcatactaaccataaattcctcctcgagcaaaatatgtgttttcataggctaccctgagcatatgaaagcctatacacttattgacatacaaacaaacaacatatttcagtcaagagatgttctattttatgaggagatctatcctttccaaagcaacactccaaatgcttccatagatcagtttttccttactgatcatctcaatacactagcaaccaacaccgcttgaacaaacaaaaccagtagccccaaagttgtccataaaatcaggtagaataatctccacacctgcccatctcaaggatttcagctgcaatagcaccaatcacacaagcaattctctctatcccatgacaaattacatttcatatcataaactatctcatgctttcagggtagcagtcctagccacatatcacctacttgagccaacttcttatgcccaagcatgcaaagaaaaggtatggaaccaagccatggacacagaaattgatgcactagaatccataatacttggatagttgtcccattacctcctagacaacacataacaagcaataaatgggtatatagaatcaaatataacctagatggctctgttgaaagatgcaaagctcgtttagtagccaaaggctacacacagcaacaaggcgttggttactttgaaacctatgctaccgtggaaaaatttaacacactaaaactcctctttgccttagctgcgataaaacagtggcatcttcaccatataaacatcagcaatacatttttgcatatggtcatctccatgaggacatatacttgaaattacctcaaggatacaaaccaaaaggccccatccccagcaatgcagtatgcaaattaaagaagagtctatatggactaaaacaatcttcacgacagtggtatgccaaactcaggacaattcttctccaacaaaatttcattcaatccaaaaatgaccattcactcttcattaaacactccaacaatgtatttttagcaatcttaatatacgttgatgacattattgtcgccacaaataacatctatgctctaaatcaatttgtcaataatcttgattcacatttcaaacttaatgatcttggcccacttcattttttttaggccttgaaatagctcaaaacaacaatagcatctctgtcacacaacgaccttttactctttaattgctacaagaaatagggaactcaggagccaaaccagtcacaacacctatggagcctaacataaaactaaacaatgaaacatgacccttgctcggcaatcctactaaatatcgaagccttattgggaagctactctacctcaccatcactcggcctgatatgtcctttgctgtcaacaaattaagtcaatacctccaaacaacttttgcttcacatctcacaactgcctaccgtgtccttcaatacctcaaaggcatccctggacaatgcctgttcttctatgcaaaagctcctacatcactccattttcaagcctttacagacgcgaattggggatcatgcttggacacacgaggattaattttaggctactgcattttccttggaaaatctctcatttcctagaaatcgaaatagcaaactgtatctcgctcttctgccgaaacagcgtatcgagctatggccaatgtctcctgtgaactacttggctccactcaatcatctcataattcaacatcaatatgcgactgccatctaccctattttgtgacaacaatgctgctcttcacattgtaaagaatccaatctatcacaagcgtaccaaacatgttgaaatagattgccatctcataagggagaagatcaataatggcaccatcaagactaaccatgtcccatctaagtcaaacttagtcgacatcttaatttactaaacctttattccctaatcaatttcactatattgtatccaagatgagtgtcaaaactttatacactaaatcttgaaggaggctaaactgtgttagttaagtcagttaggttagttaaattagtttagttagttagttattttctccatgcctatatatacatctattcctctcctctcttcaatgtaataaacacttgatattcatttttcttttcaataaaaattactctatttcttggtcactaatagaggttgagacttaaaaattctctaatgacgaaaccaaagaacaatgcaaagatttttttgtacatatctctcatctcaaat

SEQ ID NO: 310414 - DNA, 996 bp, Cannabis indica
tttaatgctactatctatacaatccatttatacactttttttatttacacacaaagttctgtttagtcaaatgccattaattgaacatgctaacatattttgatgaacacaatatattttttatgacacattttaatatatatatatttttttcatctttaaattaaattatatatgtgtttcttaaacatattttttttcaataactaaaaacaaattaaaattaacttaaagctaaaaaaaataagttatacatacacacgcaacctctttcttgcattttttgatttcgcatgtaaaaaaaaaatactgtaatttttatttgaatttaattttcttttaaagatgtttgactttaatcttattctaaaaaaaaaaaacccatgtcatgaggtacaaaaaaattaccctatataaatacatattattaattatatatatgtacggtgcaaactttacatatgcacacatatatgtcatatatgtagagagatagtatcaaaatatttcaatgctttacacgcaacgcgattgaaagacaaacttatatattgataaataattgtctatggatttagatttttcttgttaaatttaataatctaccagtgggatgggtattatctttcatatagcagaattgggttgacacttctcgctctaatggggctccatttaatttttttattttttattttgtgatagtatttttaattattatacatatttcattacaaattttacttttattattttaatttggacaatctttgtactttaaattattaatattgtatattgtatattattttttttttatatttttataatttatcatctttgtttttttagatgaattttagtaaaaattaaaaggctgtttggtttcataattttaaacgattttctgttttttaaaattgaaaacaatttttaaaaactagtaggggtagtttgaattttttttttttataaaaacagttttttaaaattgag

SEQ ID NO: 310415 - DNA, 993 bp, Cannabis indica
tgtttttaatttttattttttggggaagcaaagtagaatgaaaaatgatcttaaagactcattgttctgaaacacccaagaagataaatgatataaatttcagtcttgatcaagctttgtaaaattatcgatggatttgtgtttatatatatttatgatgtgcacttgttttattcctcttaaacaaccataaaatttcttactctatacgaatatgccatttatttgctgatgttatgaatatatgttccataacttactatagaaatctgaggtaggaacacatgaggttgtattggtcattattgaatacaattcttcacaagcatttatatgaaatgcttacaatattcattgttttggatgtgaaatccatgaaggattcagatgttgagtttgtgtattttctacatgcttacagaaaaatggctggatgtctattccccaatttggagggtgggagcagaagggaggaactgactattccatggtgttttctcgagctcgagcaaaccggaagcagcaaaagatggatttcagcgaattcaagcgatctagcctcggaaacgaaagagaattcattaatcctgctaatcaccaggatgattctgtcatggtatatttgcgtagaaaatatttttagataaaaaattgttcaattaatctttctaatttgcttcatttttatttgcatgcagaggaaaaagaagattctgacctacattaactgctgtataagaccttgattgcctaagcaccaaagctatcagtaaaactttcagtcatttatcctctattaatggcctgtaaatttctagatgagatttgttcatcatcagaatactaatcaaaagtttctgtaattctcttttgtgtgcaatataactatatacatattaaatataatgtaactttgaaattcgtttgatacatctttagattaaaaaaagaaaaaaaaaactatacacagacaaatatgtattgtttaatcac

SEQ ID NO: 310416 - DNA, 852 bp, Cannabis indica
atacatggtagtaaatctagatggtagtaaaacatattccaacagtttttgactgagctacaagattgacttctggtttagctatgtcgagtttagaatctgccatttaatttcatacttcttgtcccattagcaaggattcaactttagcaactaagtaggcatcttttctagttgataaggaattaataaatacagagtattcttgaggcaatccattgaatattgctttgatgtgatcttgagtagaaagaacatgtccgatcgaagcaagagagtcaacaagatgtttaatcttgagaagataatcatttaatgagatggtgagcttagttttgcaaagttgagtacgaaattgactgatcttggctcaagtttgagtagagtaatatttttcaagattagacctgataacagcagtagtgttgcaccctaccattcgagtgagtatctttttagacatatatgataggagcctggaaaccagaagattgtcttggatgtcatactcaatgaattcattagagatgtgattatcgagttcatcttcaactatgatgaatttaggtggaacaaactttagatcgaggaatttgagaagacgatgccctttaatggcggcttagacttgatgacgccattgaagaaaatttttcatcgagtttgacaaataatgagtgattgaaggtgatactgtttgttcttagcaacgaactggaggattgacctcgaaggtttgagttggaatcggtcatggtggaacgaaaggaccgtgttaggcatttgataccatgttgaacgagagagagagagagagagagagagagagagagagagagagagagagagagt

SEQ ID NO: 310417 - DNA, 2816 bp, Cannabis indica
aaaagtagtagatggatgttatcaccttcaggttgtataaggctagtaagcccatcatggcattcgaagctgagggaacgtcgattataaaggaactactccatcagaatttttagtggttggattttctccaatagtgaggggtaatttgatatactcgatcggtgtaatgccttggccaaaaagaccatacatcacttgactgtagtgtgccatgtcagcgacttaaagcctcatcttttcatatgttaatttaaatggaatgttgaaggaggctccattgtccaccatgtatcttgctacagtcatattcttgatttgtacggtaacaactaaggagtcgttgtatgggaaactgacttgggcagaatctcctttaaagaaagagatcatgggctctcaaagcttgggaagtttagagtctcgttctttgcctactgggatctcacttttgggctcgtgctggagtgttcgagcatagtgctccctagctttgctggccttgactgcaatatggggtccaccaatgaagacccctaattgtcgtaccaccagaggtttgggcagagtttctggaacctacttgtgcgcctggaaggagatggaggtcagcctttacagatggagactaaccttcagagatggaagtcaaccatcagacatggaggctagccttcagaaattgaggacaacctttggagattgaggtcagccttcagagatggaggcaagcctttagacatggaggccaacccttagagatggaggccagcctttgtactgcctgttattgattttccctattgggatgtctggccatgctttgctttgagagttttgttaggagagtgaatcatgcacacttctcctccttttcccttgagcttcatggcataagggaattgttgaattttcctttttttttccattatatcggttagagtaatcattgttgcattttcttccaccattctcattgttatagaatcaacaaagaccgtcagcgttgctcgagatgtcagatagtgcttggggtgctatgaggccctgtggtcgtatattggccttcttctgtcaagcctttgatcttggtggcctcagccatgaaccgttgaatgtattccttcaatagttcatcttgtttctgctttgttttgacaagatcctccaatcgaataggtatttgtcttgaaaaagagagctaaatgtagaattctcgtaagaattattcccaagaggttaagtctctccttgggggtagctttaaaataccattgttgtgctaattcatctagagctgccgaaaagattcaacatcgcacatctctagatacctgttggagatttgtttggatctcaaagtatattaggtgtactaggggatcatcttccctcgtgtacatcttccaagctagaatcttggaatttatatatgcccagaatggtgatcccattggcatgtctagcttaagctctgaaggatttggaccagctaggcctttcaacatgtctcatatttaatctaactatgcttgcacagaagaatttgttgctgcagaggcatggttgattggccttttttaattgaactacaaccttagattggccagagctttgctggccataccttaggagagggtatactcaaggccggccagctctgagtctggtacttgtacttggctagccagccctaagctaggtaggccctagccgtccacacttttctacctggtggtggattttgtgcgttgacatggagtagatctaggaatggaaatttgggccatttttgcgggccgagtcgcgctcccagcccgacgggccaactttggcccaaattattcgggttttaaagaaacaaagatagcaatcacaggcttagaaaaagattaaaaccttcatatggtgttcgatcgtaaataggaacatgaaaacatgaacttcaaaaaacctacaatttaatataggaatatcagaatcctttcatagtttcatataacgatcaagggattttcagaaagaagaacccataagcgaccaagggattgtgtaaaaaacatacccagaatcagagaaggccaatcgagaaagtaagagggctgggcagcctaggctccatcgtaactgaagagagaggaaatgagagagaactgagaactgagaagaaatttcgaactgaagaaatgggaatagggattggaatggtttttttagggatttagaatttttttttaatatttgaaatcgggtcagatcaggcctgcccccaataatatctattgggccaggccgggacagaagccttggcttgaattcctatactgaagaggccttccatcgtgaaagctgggagaccactactaaattcaacctacccttcataaacttttggaaagattcctttccaagtgaccatagaaggaaagggcatggtctggatgttagcataagttacgcctcccggaaaggagcttgcctaaaattttaacacacacctaaatcccctctcttggaccaccagcttgtattacagtggtaggtaacccaggattcattctaccatatcgagattctgtgttcgaacattttgtgaagttgcaacctctaacgtttttgggagatactgatattatcaacattgaatagtggatgactactattaccagcatcctaaataacatgggggtgatagggatagaacgagttaattgtcctgcattcatgttacaagattatgctcgtgtttgtgggatactgtgggtcagacccaagacattagcaccatgtctgaggaagagtttaagagcatgttt

SEQ ID NO: 310418 - DNA, 819 bp, Cannabis indica
tccaatgaacacccctacttattctgtggaagtccaagtcttctttaactttttgtgaaagtgaataatcttgaatcgatttttcaaattctttaattaaattgacttgcaacaaaatttaacgaaatactacaaataaaacctgttatagtgcgaattttttgcttcgaaactcgagaccaggctcccataagagtgacacatgggctcacatcccttgaggattgctaagctgtcaagaagggactcctcgagaataaacctcacttgaactaaactcgtgagatgatgtgaccatgacagagtctagtcacattattacgcttcgcgtattatgaaataagtaggaccaagaagagtttatacaggcagcgcatatccttagatatgtgcaaccattaagtagccttcacctgggacctagtgaagatcacttctttacataatgaattggtccaaatgacccagtgtactcgatgactcgataaggacttgcatgtcctatgttatcaatgcatataaggtctccatacatgcatcttgaccagaatgtagataccttaatacaaggcctattagccctctttagaatgataaaacacacctcaagcatgcgagcttgtgcgagaatatgaacatacaacttgcaccatagaagtcatatacgttgctgtattttgtgaaataactttaaactattcttcatttattattttacattttattataaattaatgttaatatttaatgtaaaatggttctataaccgattgagttctgtgtaactaaaatgacatttgctttgtatataaaggagtg

SEQ ID NO: 310419 - DNA, 894 bp, Cannabis indica
gccagttcttaatgaaatatcctttttcaaaaaaaaaaaatcagtaggccatgtgatcaaagacatcaaataattgatgtgtggttagttaggatcaaatcaaactaatatctctaaattaatacgtataaatatagttcaatttattctcttcattcaggtaataggctgctacagtgaaaaaatttctcttatattaaaagtcaccgtacaaagaataaattttgtttattttcaatatcgtaattcaaattttaatctaataaatctgtaaaaatatcttttggtatattattggtattttttaaaaaaagaaaaataaataaatctctgcaattcaaatttaaattaattacagtgaaaaaaaaaatatatctttttattattattttttgacgcgtattattttattttttaattaaactatcattctatattatttttctttaaaaaaaacaataaatttattgttgtatatattctgcacataaaacagtacatagcattaagaaaaatgagatttggaaaatataaatttagctcagattgttgcaatttatatacaatttatatatacaatataaaaagataactttttagtcacgacataaattttttgtgactaaatttaacttttaatcacaaaaaatgtgttgtgactaaaatatagtatttagatacaagttgtcattaatttaattactgtgactaaaaacacatttagtcataatacaaattgtattttttgtaactaatacattttgtcacagatcttttaatcacaacataaaaataataatttataattagtcacaactttttcatttgggaaatttgaattttcatgcttaataaactctaaattggttttttaaactaataatatgtataatt

SEQ ID NO: 310420 - DNA, 535 bp, Cannabis indica
atgatcttgaggaaaggctcaacttcttgagtggctttgttgctgcttttagatatcaaatgcaccctgacattcttctcaagcccagcaatgatgggcctccaataccagctcacaaagccctattggtacaccacaatacaaacacttactactttgtattttctcattattattattatattttgcagaaaaaacacatactacttttactcgcaaactttcttattttttcgataagctcatcatttcttatttcagtacttgaataattatagtaagccttttgctaatttttgagaaatttgaaataatttgcactaaaattaaatattttttaacagtattttcaatactaaagtattgagaatttgttaaaaacttgttatgaatataattcagaaaattttgtttgttgtacttaaaatcagacttttttttttctatatcattttatgaattccgtttatttaacgtttttttctacttgttttttgggtaaaaaaaaatgggaaattatagtaaatgacccaaa

SEQ ID NO: 310421 - DNA, 2314 bp, Cannabis indica
tccccttactgacaataccaccctcactagggttcgatgccgtgacagtatccttagtagcttgctctttaatcacatgttgttctgcctcttcaatatcaatgtttgtcagcttgtctacctgcgcttttactacttctgacctcactggatctagaggtctttacttctgtcacactggttctacattgggatctatgtttagtgcatggcaaataacatggggactcatgtcgatcatgtcagaatgactccagtctaacatgtcactgtttgccttgaccgtggaaacaatcttttccttcaccgttggaggcatgttcttccctacttggataaccttcgtgggatgtccatcatatatgcatacttcttccacttcctccattggttctatgacacgttccatgaaaactcgtggatcaagttcatctttctagatcgcccccagtgctggctgggaagatgttccagcttcagagttatttccttcttagaccatgagtacaattttagttgaaacactatagcaacttcctgaacttctttgatctcctctgattgtccctatgcttcttgtactgctttggaacgttaagcaaaaatgttttatggatgttactactccaaaatacattaaaaatggtcttcccaagatggcattgtaagtagtagggcaatcgactaaaatgatgatactgcgttacttccaggaacttccccatttactatcatcaaaagttttatttggggattagcatgtctccattaaaaccttgcagttgaattagacatggtagcagattggcttctacaagaccaatggcttggaaggctcctttaaaaacgatgttcatagagcttccattatctacgaggattctggaaactcttttatttgctatttgagcatctattaccaaagggtcattatgagggaaatgtacatgcttggaattgtcttctatgaaaatcattggaaaattcatcattcctggatgttgggcaggtgattgtaccaagtggcaagctatacttttgttcaactcattcaggttcgcttctgtgcatttttagtgcttttggaaatatggggtctactagaaatagttgctacatgaccatctaagactgaaaataaagctcctagagggtacgaatttctaagaccgggggctacaactacttctactgctgaagcattctgtgccccctaaagggcttgtgcattttgtgcttatatgcctagaacttgtggatgacctactccctgaggaggatttatggctccatgctgtcctagaatgaaagttgtgtatgtgcaactgcttgtcttggatatataactaggatccttacccaattggttaaatgtccgttctgtactagtccctcaatttcatcttttaaatcatgacattcatttatggtgtgatcgatatcaccatgatattcacacttcttgctcagatctcttctttgttttctgcctttatacatgggcggagacttcctgtaatgcaccatgttacatgttaccttgtatatattttgtcgagtgtctatgagactcgtatactcaatgtatcttaattcttaggtctttcccttcttcgcagactcactttgatttggacccttcaaactccttttactccgtgagtgggttatgttggactctagaactttcgatcttgggtttgtttatctgggagcgacactgtatttggtttttgtagctccgaacccaaaaaaactagcttgtgtagttggttgcacagaagtacttggtctatatactctaggagtagtaaaagcagttgacggaggataaatggatggagttgtcatctgtgaaggttgggcatttgttacatcagtggaaggttctgggagtattccatatgcctgaccgtaagtatcttctaggtttataaatccttaagctcttgtcatgaactcacttaccgtgtctgctcttttgcattgaagatatccccacagcaaagattctgctataaattttgatgttagaaccaccattttcatgtcatcagtgactttggttttagtagctacatcgatcatgcattggatgaacttcttcaagctttctccttactattgcttggcgctagtcaaggaattgacttccaagtcaaactccattctgaataggggtggcaaaacaagtttcaacatagcacacgaacacgacatgaattttacgggttagtgtcgagaaaattagacgcaggtcgacacgacttgacacgaaataaaaacgagtgaaacacgacacgacccgcttaac

SEQ ID NO: 310422 - DNA, 882 bp, Cannabis indica
cccattaagaaatcatccatataatattatatataacatggggataaaatataattatatatgatggttatatttttttttattaacttgctataaatatataagaggttgacaataggttattctttaaaaaaaattatttttaaaattgaatttattataattaattatgtatttaaaataaattaattttttaatcaaaatattaaataagatcatattagcaattaataataaatttataaatatttctattttttttatattctaagtctctactattatatttttagcactcaaactatttaaccataatataattaactatcttttctcttttataattgctaaaaactaagtgtgtattttattattattattattattattattattattattattattattattatttggctgaattgtgagttgttgataagagggctacattactgatcccttactttcatatattctttttttttcgttttagttttatatttttttttttataaatgaggaaattcattgcaattaaaaaatattacaaccaaaataaatcaaaaaaataaagaaagtcccatgttcgaatccttcttccccctatctaaaaaaaacaaatcaattagaatttacatcaaaacttactaaactattaatcatgtaacaaaacttttaaactaattgtattttgtactaataacatctcccaataaccagtatttacagttttagaacaaacttcaaacttaaattatttaataatatagggaataataattaatccaaacaacctaatcctaataattcttgttcttcacttaccaaataaataaattgtaagccaaaatgtcttaaaaagtgtgtgattatttagtt

SEQ ID NO: 310423 - DNA, 1184 bp, Cannabis indica
ctacaaaagaaactatgagagctttatctgtattttcttaatcaccttggttgcctaatcttgattttctatttcggggtaataggttcgcggtcatggttcctgatgcaaggcttgatagctcactctatggacctgcagatcaaattctaaactcattgctggatttcaatccaagtgagtggggtttaccaccatttgaagatgaggcaagctgaactttttttcatatccatttgaattaaaataataatgaagctgtcttggcttgaaagaaactggtttcaaaccagacagatactcttaattcttatattaattaaccatttaaacaatagtggtatttgattaaggtttccaccatttgtgttgtgaatcatgatctgaatagtgtaagttttcattagagacaattgattatgggatcagaaacatgagagttagagaccctttttagctcttgatttattgcacatgaataattaatcttatttagataattttggccacagatttgtggtaaattgctttacatgataattataatccagactattaatcaatcgatttaattcaatttaattagaaaaaataatatatttgattgaattggagtcaagaatcttattagagcatatctaattcaatttatagagtatgtaatttaataaaaatatacaaaaatttaaagaaaatataatttttgtttgttgaagttcaatttcacaatagtaatctctggcaatgcacttctttgctaactccgtctgcgtgttaatcgccttgaacacttaaaagaatcattttcaaaataaattatgatctatgtagtacagtagtattgtgctttttgaatttgtcacatatggcaaacagaataatgacatggttgcttagtcagttgtcatgttagtgtcggggttggggttcggtctggacttcaggactggttcgaggttcgggtgttgttcggggtgtaggtctgatgccaggtctgggtaggagtcagggttcaggtttgggaattgggtctgggtttggttctaggttcgagttagggtttggggttcgtgtccaagtttgggtctaggtcggggtcagggtctgggtttcaatgttggggtcgaagtccaaaatatggagtaagaaaaaaaaattgtgaaaaaaattttgaaagtgatttt

SEQ ID NO: 310424 - DNA, 773 bp, Cannabis indica
taggatgttaatcaaacatacttggtagtaaatatagatcctggtaaaataatttctaacattgacctcgtcaagacttgctaagaataatatttatttgcttactcgatccgatggctcgactgtcactgataaataattctaaccatcatcaaacaatgcttcacgtaactcttcactagttagaatccaagctgtgagcatatggataacattctgtctgggatctctaaaaaagattactgctgcgcaatctctgttttaggaagcttcattcaaatatgaggaggttcgaaaagtggcattccaattggctagccataaggccccagaacagatggcttcaatgacaccttttttttagaaaaattagactctaataaggattaatgccatccaagccgctcttagtttcttgaacaaaaaagcggatattacacctattaaaaatccaatcattgctcttatccctaaaatgaataacctttaatttttcatagactattgccttattagtctctattctacattttattaaatcatctcgtgtaccttggttaactgccttaagtcgattctctgttgtctttattctccatcccaaaattctttcttacctaaccgcttaatttcttacaacatcatcattgggctagaagtcacacactccttaactcatcgtaggcactgtaaagtgggtttgatggatcttaaacttgatacgactaaggcctttgatcgagtggagtggggtttgttggaaatattttacc

SEQ ID NO: 310425 - DNA, 2116 bp, Cannabis indica
tttacgatatagaaaacaatgtttatacattttatttcgcacgcgttgatcctcaaaaatcgccaagtgtaatttttagagtcattcgtgttatacccaaaatttcactaagtataaattccaaaatacgcttaaaaaaacatattaacaaagaaacgaaagtcgacccacttaaaggacaagccgacacgaggaggagtcaaggcctaggttgagctcctcacgcgaggagctccctgttgcctcagctgctgctccaccatctgcgtgcgtccaagggagctggaccttcccactcccgtcattccccacacgcaccaaaggagctccccgctcccatcactccttgcacacaccaaagggatccccccactccactcactccccacgcgccaaaggagctccctactccacttacctctccctcctctctttttctctctatctctcctcacgctcttttgctcccttcgtaacgtcttaacctctaaggacgccacatgtgtgcttttataaattagtttataataataaactaacgatttaattaaaatttgtgatttaaataaactttactaagataaattttaaaatatacaaggttatcacatgttacaaaagtgttacaaaagttttacaaaaagtttagtataaggtttatattcaaaatactatacagccaaaatatcccctaacaactcgactctgcaggtcggatagatcgatatgtacattatcgaaaaacactgctgactcatggttgccctaatttacctttgtccttacctgcaccacaaaacacccatgagtcacaaagacttaacaagaaaagtaaaagcaataaacacatgccaacatataaataataattccagtcaatcacgtacaagcagtacaaataatcacatatgtataacaattcaaaactacacaattatctatctaataagacaagctaaaatagttacttcataaagtaaccctatccattgttgtctaatgaaacaaccttaataagcctaaccaaacatccaatataactacgttacctaatgaggtaaccgataagtaagaaacctaacaacggtttcaatttagagtaatgaatccttcttacaaaacagtaattaccgtatcttataaattataatcgataataatcaaatcataaacgataataaccgtaacttatcttgacatgctaagtggtacaaatatactttttttggcctcaaatccttattcaggtcatgtgccgagcatcaaccattcaaaggtaatcaagaaaacaagtcggcaagagtacgtgatccccaaaaagggccaagccttttataagtaattgggccatggcaagagacccaaagagttgggaaagccaaatggactttgagaaccaaagatgggccagcaccagataaatgtgatttaaaatgatcacttaattctacttttgccatagagtgaactttgatgttgcctactttactactataggcactaatcgacttcaattatgttaccaattcttacttttttacaatcttcttcatagctaaaattattgtttattggtctttgtaaatcatataatttcttgttgtttttatatattttttttttactttttgtctgaaaaaagtatatttttataattttaaaaagttgtaaaattgtaaataaaatataaaaaataatctttataaaattctccatttctaaaggtagaatttacactcaatatattatttcaaaacattatttgaaaaaggaaaattatagtaaatggccacaaatcataggactatgttagtttatatcctcatttcaaaaaaatatagcaaatgaccctaaatcataagactatgttagtaaatgtgctcatttcaaatcatttaagttttttttttttttttaataattagaagcaaattatttaaacattatggtatatctatattagttttgttaaaatcttttttattttaaagttatgtcaatttttttttttcaattttttatgagttattttgagttgttggtataaagattttattgtacggtatatttctattttgttgtatggtatattattattcttagatgatatttattt

SEQ ID NO: 310426 - DNA, 2057 bp, Cannabis indica
aatcacgtaatacgcctatgttagttagggtgttacatatcacaactattaggaaactgataaataacatactagaaaaatgtaactgacatcgttaagaaaaaaaattaataaagctttgatgcattgatgaacaatggcttgtatgttaggaattttttgtgaagaaacaacagtaagaatattataaaccagcgtgaactcaactaatgttaaaatataataatactgaccacattagaaatattttgtatgtgagccttgtgtaggattgttatgtaaaataattgcaaataagataaaccattgtaaagttatcagcttgtaattattgtctcgtcaattattggagtgttgataaaacgaacgagcaacaataatacaactacatagaattacaaaaataaaaaaataatgctgccaaatttgtggtgcaagatgaatatgaatgtactctattactggcgattgaaattgaataaatacatgattgaaattctttaaaacaacgctaatgcaacatatataatattaacttctgtagtgataattgtttttgaattatatgtgatttggattgatagggagctcataatctattttttttatcttcattttattatgaatctactaattgaatttatgagaattagttttatggaattcaaattataatttagggttgaatttaagttttaagccagtttttcagcaaatttttgcatcagtcgataatttttgttgttcgggttgattttgttcttcttcttaggtgacgtcaccaaaattagtgatgtttcttggcctgcctaagttgattcatcgttactggctagtttcaattgcatgaagattttgtttctatgaagcatggatcgtgtgggttgaaggtgtatgtaagatgtatttttataattttttttattaggttgtataaatatttatttgaatagctcatagtatttatgtaatattattttattttttagttataactaaaaaaaacccttatttataagagaaaagcgttatgaaatttttataactctcaaatgaacaattgatttatcaaataattttatataaatattttaaagtaataattaatggggagttcttaaaaaaaaattaatctctattaaagtataattagtttgaacataaacatatatttttatataaaagtttatcaaattgtgtctctaccatttgatatgcatgaattggattggattagattatatgtatttggtgcaacacataactagataaactatttttataaaataattttttattaaaagtaataaaataaagactaataaggattcttgacttctgaattttgacatataccaaatcatgttctctgaacttttttggctgttaaaaatttctcttgaactattgagattgttgaatttaaagaattttgtctaatttttttcaattttactaattcagtgattattgatgtacaaaatcatgttcctctgacattgatattaccaaatcatgtccctcaaaactttgacatgtaccaaattataccctttaaactttcatccatgttagattttccttattaaaattggaaaaaaaatccttacatccaacaatctcaatagtctagggaaatttttagcgaccttaaaagctcagaggatataatttagtacatgtcaaagttgagggacaaaaatcataattaacctaaaataaataatccaccttttccgagagagaaaaataatccaccttttcttttatttagagaaaataatccaccctttaggtggcttaatatattcccaaactcttaccataatttagaaagattacataaactatccattcctactcaaatttaaaatggtgcaacataaaatgagccaaatatgagatgtgataatttagttttatttcaagtatagttgtaaatatgtgtactgggccgacctgatccatattttaaaaagtttgcaataatatgagtcgtgtcatgtcaaactataaaaaaatatgagtcatgtcgtgtcatgtcagcctataaaaaa

SEQ ID NO: 310427 - DNA, 1811 bp, Cannabis indica
taaaaatatgtatattttaaagaaaaaatatttttttggatccttaaattgggtggactctaaacgcggatctaattcgccttaacccagatccgatctggactaaaatgaaatatccttttataattaaaggctaattgaataaggcaagaaagaaagctattgaaatgactaataaatttaactctaattataatcttatgaatcattgactcatatatttatgattttaaatctcaatttactcaaaaattatgtgaataaactggaatttttattaggagtaccacattggtaacatttaattaaacaagagttaataactattatataaaatgccatcttctatcttctgattctttgtgttaatgaaattattgtgatttgaaactagaatataatttctacacaaacaatatatgaaagaaacttatgattataaaatatcttaaattacattggctcttattgtaggagcaacaaatttaagagaatgtgcatatgcatccaaataatttagggttttagaggcagatttctagggtttataatatcgattttagtaaaatttactaccgaaattgttccaagcgatatcgtagagggggaaaaatattatttgaaataaccgatgccataagggtttcctataaaaaaatttcagtttaaaaattttgtttaataacataagttcttttaatttttatttaaaatctatttttttcatatatattattttattattaatatatttaaattaagtataaattatatataataagcataaataaaaattaaattaaaaagttaaataaatacatatttacattactctaagtgtttgtatattaactatctttctattaatatttatattttataatatatgtttgtattttctagtatattagtatcagttttatatttgtttaagttatgttttgtataataattagtatattgaataataaataatgtgtaatattttaatttttatgtaatttaatatttttaaaacaaatgttatttttacattaggagattctccgccctgtccatgatgggaaataagcgaggatgaggatgaggaaagcactccccaccaattcctcatctcgtgtgcatccctatgtattacattaatattattctaaaattactctaattattaagaattatctaaatatatatataaaaaaaaagttattataaaagtaggttaaagaaaacttacattatactaaaaatcatatccttgatttctgataatgtcacataacgccacatattatacacctttcccagttattatgatgtgtgtacgagacgtcataaaagaacattttactggaaacaaaaagtaatatagaacgaaatgatgagaaaaagttaagcttttagtaaaaaaaaaaatagaaactcaatataacaaaagttgaatattgtcctttgtgataagctccatgagaaagtgaacaatctttggtgtaaaactcagttgataaacttgtaataacatgatggagatcttgagttaaggggtttgactctttttcaccaatggaaaacttttgagacctaatctcttctatatgatgcttagatatttttgtattaatccagtgattagtggacatgatcatgatttcttcttcttgcttgatatctctcaaaacctatattttccttttggtgtaataacttttgcatcatagcaagaaattactaaattactaattttatcgaaatttagacaacataacggctacaattgaatttttccaaaaaatttaaagctattaataacaaca

SEQ ID NO: 310428 - DNA, 644 bp, Cannabis indica
gagacataagtacagttgttgctctaattttgaacaagaaacgttgattgaaatataagagtccttacaaataggaacaaaaaacaaaagatgcgaaatcagttgtagtagagctcgaggcccatgccgtcatggacctcgtagtccttgagagtgatatggtctttgtagatgttgtaccacttctgaattcgaatcttatcagctctggttccggtctgagccgccaccagcttctttaggtcaccgattgtgtcatcctcgttacacttgaccttcaccttctttcctaaacgatcattaagaaccacctcaatcatcttccttctcttttcgaaaccctaaattcccaaagttttgagagagaatattatgaatggagaagcaggaaggagagtatggagaaacgcgtacacaaaagagcaaggaatgaaattctgttaattcgagagagaccacagcaaaatttaatatagaataatgataaagagatgatttggttggatagtatttaaaggctccactcacccaccgccttatttaaaatacttctatatatccctagtcgaataggaataggaattactcatttactcaaattattaatatcttttaataaattaattgaatccttaattttatat

SEQ ID NO: 310429 - DNA, 1617 bp, Cannabis indica
ttcagaaagcacatttcagagaaaaagcaccttatttttgatgattctgtgcctggcacaccacgttttcaggttcggcaactcaccaaggtacagtgaggcagggggatcactacttcgacaatttctcgagatttgattccttcagcacgcacgatgccagattttcttctcagcctgagaggctcacacgatttgactccataaatagttcgaaagattttggccaaaattccttcttgagattttccaccatgggaagctccagagattttggtcagaatcatgagaggttgacaaggctcgactccataaacagcacaaaagactttggggccaacggtggtggtgccttctcattcgacgacactgatccattcggctcctccggtccatttaaggtctcatctcctaagaaaagttctgatagatgatcttattttattgcattttctcgattttactgtggtagtattaggggattgttgaatcacgtagctattagtattattatgatttttgtgcattgttgtatagcatctccaatttagtgccaaataaaaaatctttgttatatcttgatttttttgtaaaaaatctttctccactttaaaatttgtgctaaatttagcacaaaatataacacaactaatgcacttgtttgttttatttttatatatattattcttattttgcaatgagttaattttaataacatttttattatgtcattattttttaaaatatatatatgtaagttattgattattattattaatgacaatcattttttatattaattcgcatcttaatttgttattatgtattggagcataattgcaaatagtgataaaatataatattcagagggttcgtttgataaactatatataaaggtcgtattgtattaaataacatgtaacactatacttggataaaactttgtattgtattaattattacgaccataaattttaatacaatgtgaatcgtattatttaatacataacaaatgattcgtattaacttgtattataatatttagaaagggtctagggttggggacccgacactagacccgaacttcggacccagcactagaccccagatacaacctatggacccagatccaaacctaggatcttgacccgtatcccagaccttagaccctagacctgaactaggatctgaaccaagacccaaacctgaacccaggaaaattttcaaaaataatctttttatattttatttacaattttacggcttaaagtttttatttataaaaatacaattgtaaagttttaaaattacaaaaatacactttactcagcaaaaattaagaaaacaactaaaaaaaaaatgagaaatcaacctcacgacaactatgagtcataaataaactataaaacaacaaaatataatcttgtgacaactataatacaattataaataaactaaaaaaaaaaaaaaaaaaaaacggtttattatttttactgaagagatatttttgtaaatgaaaaggttcaaagcataaaaattaaaaaaaataaaaatcgtgttgtaattttttttttcaaaattttagtctattatgtaaaaaaaattaatcaatatata

SEQ ID NO: 310430 - DNA, 1055 bp, Cannabis indica
aaaaaagtaaaatttattgttagtcaaatttgacactatagtatatcttgagctaaatttggcacaatttgtagcatgtaccaaatttaacacactttttagaataccattggaataatatttttttaaaatgtgctaaaatataacaatacaccactttttaaaacactccattagctctaaggtatctaatggtatctcatataattcattatatgaggcatttttatcaaatttacttgttattctcatgtaacttttgacataaaattttagatgtctgtttgatctggtattatacctgaccatgaagaacgaaaggaagaagacaaagaagaagaaagagagaaaatacagagctgaaagaatagcttcttgatcttatgaattgttacaaagggatatatatacagctgtgatgaaacagaaaacagttgcaataaaccaactaattaactaacagctgtaattaatcaagaaacagaaaataacaaccataactaactaatctccttcacactccaaacttggaattgttgcatacaacaagaccaagtttgttacaaaatacagcaaatcgagagctagaaatagctttagtaaacacatcagcaatctgatctaaagctggaacatggttgacacgaacaagttgctgagagatcttttcacgaacaaagtacaaatctagctcgatatgttttgttctagcatgaaggacaggatttgctttcaatagaaccgtgctgagattatcacaccaaagtactggtgtgcgatacagcttaatgcaaagttcagtgaacagagaatgcaaccatgtaagctcagagatagcttgagcaacacttcgatattctgcttctgtgctagaccgagagactgtctgctgtttcttgcattgccacacaatgagatttggtccaaagaagatggaaaacccagaggtggaacgacgatcatgttgggttttatgccctaaataaaactcatttcaatataatcaaatttacttattaatatagatcagaaataacatttaatgttgcatggtt

SEQ ID NO: 310431 - DNA, 1264 bp, Cannabis indica
gttgttgttggttgtagtctgtctttatattttttttttggataaaatataaacttgtatgactcaaagtgtgtggttgcattggtttgtttattaaagaataatacaaagtaaatttataacatgtaaatgtaatatatggtcaataattaatcatatatatatatatcatcttgtctaaaacaaatatacaaactaattaatacacatacatataaacttcatcatgcatgcataatatttatatacatatatattgactttcatcgttctcacaattaatataagtcattctttacatatcacacaatacattaaaacatatgcatagagtactatagtgaccatgatcatatatatacatacagattatataatatatatatatatataattagtagttgttagtactcccaatcatcactcttccaatatttgttccacaagattgtaatccattagagccatctctaggaggacaaaaacttataggtaaatattcttcaaattcacagcaaaactctgatttcctaaatcttctctccaatgcctcccttccctatatatacaattcaaatatttgttactttaataattaataaataaataaacaaaaaatttagaaaaacacccactaatatattaattgcacatttggcttaaaaataaaataatatgtttaatcatatatatataatgtagttacttgaatggttgcatggacaatttgtcgaattttaggagatctaaaatagtcccattttttgtgatccatagcttcccaaaatttcaatgctgctcttgcatctgtgaaattaacaaaggcataacctttgttcaactttctcctacaaaattaattaataatgatatatattattattacaataatattcataatatatatatatatatatatatataatgcttacctgaaatccattggaagatagagaaaatcataggctgagtatatatgatgatgatgatcatcattttccaacttacagaagttatccacaaactctataagcatttcacgcctatcatttcaagcaacattgccatatatataaattatatcaattatatatatgatcaaataaataaataaaactaaggaaaattaattgatatattatatttgtaactatttttttaaaatttacagtatatatgatcaaataaataaataaaatataaacaaaccaatttttctagaattttcaattgcgtgggtactgattttgctgcccttttatat

SEQ ID NO: 310432 - DNA, 3993 bp, Cannabis indica
attaatcacgatttccataaacctcgttgattagcaacgagctggacagtacgtttaaaaatcacttaacacacctatgctagttagggtgttacacaatgtatctaccctttgcgtttaatatctacccaaaacaaagttctagttgtaagtcctgatgttaggaccaccatttttatgtcatcagtgaccttggttttagcagccacatccatcatccttttgataaacttctttaaggtttctcgttattattgattaacgctagtcaaggagctggcttccaaataatagtccttggctactataaactactttctgaacattacttataggtctctctaattgtggatcgatcccagagacaacctcttaaaccagtcctccacgaacttgcttagcgttaatgaaaaacataaaaaacttgcataatcactagctttggcgacttgcatgatgtgattgtatttggaccaatggtccctggggtctgtgcatccttcatctagctccatctgtggcgttctaaaacgctccgccagtggggcatcaatgattctcttcacataagggtctatatcttcttcctcaaaattagatacgacaccactttgttttctagaaattttttcctttattttcatcaactcattaaccttacattccaagtgttgagtcttatcacttgaagattctcttctgcgaacacaatcattgatgtggtttcttaaattgttactgcagggtcttgcttttttctgctttagctctttctttcttagcatttagtcgtatttggagatcattcgttgaaaggcttctgccattgtcgtctgacaccaaatgtacttcatcaacatcctcattgtggttactagagtcactaggaagaggcttttccctttgagactctagctctcaggctctagcattagtcttattcttctgtctgactctgcctctaaaattggtcttgccattgtgccttgagttgtggtttcctttcctcttttgttaaggttggtcagcagctttagactttttatgcttcttggtggaaggagtcttctttggttcttcaacaacgattcatttgcctttgtctttgcaaatgcctgaagttccatgatcatttggatctactttgtcagaggcattagctgctggaagaggttgtacgtcaggagctatcttagtcagggcagtcattacagctgccattttagtcatcttgccgagtaataaattgttgaattgatcttgccaagttaacctacttttggctagttgaagttgtcttgccatgatgaccacgagatctgtctcatcaggttggctcttctatccaatgttatcattagcagccttgtcctaaaggtcatcttcctgcatatcctctggtatgtcctcagcgttaacttcagcatcttaagagctactttttctagattttgcatcttcaatgataggatcatcttgattccaatcttcgtcccaacatcctttctcacgactagtcacctcttgggggtcattagagtctccaactttagcaccaagattagtgaaaattaagaccagactttgtttgtgtgagggacatgattacttgggcgtaatctgcaagtggtctcactacttccatcaactatcaatgaaagcaccaaaatgtttaccaagaattttagaaaaggagtataaacgataaaaactgaagaaacaaataatcaaaagataaagagtaagaaagacaaatagttttttacgtggttgtggcgttaattagtcttagtccacaacttagtattatttagtaactctttatcttgtaaaagcctttgagaataccaagaatatatgttctcaagtttgcctaagtaaaatttgcaagagagttcaacccttaatccataggattcgatgggtatatataatagtgggagaattgcatttagtttctgttttccctatattggggagttcatagtaaattatacatttcggctatctcatgaagtccagcccatgaagaagacgatctgttgactaggcaaattagatttagcatgatttggtcaataccgtatgctttgattatgggcaattaatctatgaattaattgcttaatattcaatgtaggaagttttcccatttatccttatatatactctattgtgatctggcagttggagtttccttatttatgcataggaataaaaagggaaactagaagggtctttcaggaacacaccgtcttatccctttggtctcatgatactgtacatgcttccaggtacgacttcccaaaagtaaaaacttttatgattacagagctaagatacgttcctggaaggacttatccaaatgggcttgtccacttgatcttatttgagggtcccactaatgggccttggatgctaaccttgattctacatgttcagtgctagaaacgcggataacaaaacctaaggcagtcagtaattgtgagcaaatcttatctacagaaaagatgaattcacatttagaaacttcaagaataatcaatataatagagctttgttttacaattattaaagacctaatgctccaagtttctttagaagcttgagttagccacatgtctaaaattcttttacaatattaattataaaatgatgtcattcataaggatctgcatattcaatctggcaacaaaaaatgtgttattaataagaattcctctatattatgtcatcaaagattatggaatatatctccaaaatagaataagtattagtaaatagtagggatactcatttcactttattttactaactttatttagagcatgtgtggagtacattaaggaaaagtataccaacaagctaaaatggtgcacattaaaattctgtcgtattagaaatcatacaagtcaactaatacttgtagatatggactcgtatttcacaaattttttcatctaatttattaatgattactcgcataaatattatcgctacaaaattaaagatttatatgcttcaaagatatttaaatcttacgtagagaaataatgcattttgcatattaagatagtgagatcaaatatagatggttaatactacattaaaatttgtaaggatagataaactcccaccacagttgctaagtttctttaaaagcatgggttcattttccaatacatatacctagtacacccaaataatagtgtgtgacaggtttaagaaactaagcattgtcgcacatggggtggagcctgcatagcataaattaagaacatattaatatcattatcatttattactcatttcaatatattcatcaattacgaatcagtgaactagaggagaaggtatacaaacaaccctaaagattttctctgacggtggtgaatatatgcaagctttaaaagcctcatatagattaaaacaaatttctcataatttgtattttattatgtcatcttttatttaggtttgaaaagattattatagaattaattatataccagaagatcgttgggagtaatatttattttatatatagacaatatgttacttgaaaatgatgataaaaactttatatataaggtgaaataactcataataataatatatattaattttaattaatttgatagtagccacgggaactatccgcagtttcaatgagtaattactcataatggtaatgaccgtatcttttactggatcataattgagtcacaatgataataatcgttccatatcattaccacgatcataatcgagtcacaaatgataataatcgttctatatcattacctcaatcagaatcgagtaacaacaaacacatatcgggatctcgatcataatcgagactatcacaattatagtcgttaaccataaacagtgcataatacttttcttacctcaatctagagattaagcatgcatgtcggcctaagtggaaaacaaagcttgacgatctcaggtcctatgtcacgacaacaa

SEQ ID NO: 310433 - DNA, 840 bp, Cannabis indica
ttttatttaattaatcacattttataattttataagagaatctcaattaattttttttagaactttactaaaataaaattctttcacttacataagaaaagttttctcacatttcttttaacactctttttctctcttgctaaaaaaattaggagcacttcttttatatatttctttattttacatgattaataaaagtagtattttttttatacatattttgtagtttattcgaagttaatttatgaatgatttgcatattacaacgatgtcaatgtcttgttattttctattgtattgtagttgtctttttattgttttataactatttttatgtgttttttgggtgcagttttttttagatgttttttagtttatgtatatttgttatggtgttttagtttattccagattcaataattttttttttgttgtatatatgtgtatttattttgttatttttatgttgtgttttagttatttttaagtgattttcataatatttttttgttgcacaatttcttttattcgtgtgtattttttatggtgtgtatttttagtttattcctgttatttattttttttttttgcggtgcagtgtggtgcgagcagtttgatgaacacgctaacaaaaattacaaggctgatgaagaaagcgagatcatcgtcttgttaagatcacttccaatcacatatcaagaagttaaggcagccatcaagtatggtaggaatgttattgcattggaagatgtttttactgcacttaaattaaaggattttgaattacagttggaaaaaaatttaaagaaaagaagtgtacttggcaagaggaagatcacc

SEQ ID NO: 310434 - DNA, 1399 bp, Cannabis indica
ttttcttttatgtttatttttccttttttgtagtatcaaacttaaaattagttagctagtataattattattatttcgaaatgacacaatatagtccaaaaatggactcgattgttataacactaaaattttgtttgtattactcttttactcttattcaatgaataaaaaatatttaagcacgaaattcatattagttcatatgttgtttgctgaaaattttagcaataatgataatataataatataaggtgttttaaaataataaagagctagccaaaaaaaaagctataaaaaaatctatagtgacttaagtagctttagagtatctgccatggtcaaaaatcaaaatataaaatattacacttttaattttgccttttcattgccactatcaccttagttgcaaataaaataacattaaaagttttaataataataataataataataataataataataataaagaaggaaatttctatggtagatctcttaaaagtgtgttttggaagactttttatctgtttcgacatttaaaaaatacttttagtttattttttttttcattatcgcacacattatggttatttaagactatttgtacaaatatttagaaaattttgaatagttaataatgccaaaaataaagtttaaacaattacttactatataagaaaaaaacaatcaatacgacaaaatatgtaaattttgtttttgacactataaattacttaaaagaaataacaggtcatcttaactaattatactacatacgattatgaaaaacaaattaaattaaaatattttactaaataccgaaacaaataaaaattctaccaaaatacttcattaaaagtttcctaaaagtaattctaacttccaaatataatttttaattattacacaaatgaagtgggaaacttttactgcatatacatagggggtttattctatgaagaatatacgtaattataaatttgtatatataaaaaatgaataataataataatgatgagaaagatatggctaaggaggtctactttaaacaatgacccttaagaatggttcttttataattaagtgtctaattaatgggttcattagcacatggcatggtgaacctatgtccatcaccataatttaggattttttaattagcccacttcaatatatttccactaaaacaaaagtgtttgacacttgatattccatatgtcattgattgcatttaaaaatttatgaaaaaaattagaaattacctttgaagaagatattatcagtgttcggtggtcgcggtggaccgtgggtcgtgaggtcatggccgaccattaacctgtgcaaacagtgctaatgcacagggcctaaaatttaaaaaggcccaatataatttttcaga

SEQ ID NO: 310435 - DNA, 2584 bp, Cannabis indica
cacacatacatcgcaggctttgtagtcatcttttaaaacttttataatattattctaccctaatcgttttttatcttttaaagtattaaattagagtaaaatttcgtaaaaaatactactataatatgggaattcctgtttataaaattcttttaacaacacgttacaaaaccgctattataaccacgtcaaaaaaaaaaaaaaaaaaaccgactattataaaagtaagattacattttcggacaaaagaaaagggttgattttgcttcccggagccaagacaccacaatgtacattgctgggagacctctaactcatggtcgaacacaaattctaaactctttacctgcaccacgaagcacccgtaagtcacaaggactcaacaagaaaagctactaaatcaaaagtgatataaaacacaagtagtcacaatgcgacataataatcgtactcataattcattacatgttcaacatgaatacaaaatttaacatctatacaaacacattatgagaaaatgataacaacccttactcaccaactttattatcataattaacagatattcactcattaggtgatcacacaactaactaattgccttataaaacaatcctattctaatgcttcataaagcatccttaccactcgttatccacgagctacttatgttactatcattgcccgataaagcaaccgatagtaagaaacctattcgcggttttaaaggagtaattactcatttcattaacagtaatgatcgtatctttattcactcattaactgtaatgactgtatcttttcctcaatcataatcgactcacaaacaataataatcgttccgcatcattacctcgatcataatctagtcacaaatgataataatcgttcctcattattacctcgatcataatcgagtcacaaacgataataatcctcctcaatattacctcgatcataatcgagtcacagacaataataatcgtttcttaccaacacatttagtagtgcataaagcttttcttacctcaaaccaatatctggtgtgcgggctgatctgggtggaaccatgctcgacaatcccaagtcctatgtcacgataatgaaactcgattaacaacttatccaattcccgaaacaaaccctaattcataaccggactaattctaactctccactgattcaaaataggctaaacaattcccaaatacccaaaaccaggtcctgaaaaataccccaagccaaaaatcaggttcgagaaaaaactagaatttccccctgctggccaaccgattaaccggttcaccagcaccctgaaaaaaactgattaatcggtttctggcaggcatggaaaatgctggtttttcaccccgaaaccaaactcgagctacaccaaacctgctcaaaccttccagaacagattaataatataaagtcaatatactcaaacacccaaaactcagaaatacctcaaattaaacaaaacaacatgcttgaatcaaaactaggttcaaaaatcaattttttctcaatacatgtttaaacagccaaagtaattatcaattcacaacaaactaaccttaaattaggtccaaagataggttttaagctccaatttatcccacaacctcgaaacctaaagaaaccctaacaacacctaacttaaaaccttaaaaactgaaagaaaatggattggaaaattacctcaaagcttaaggaatccttaaactaagttaaattctgctaaaacttgaagaattggtgaagaattttcccccttgcagctgctggccctaggtttcgaagagaagaaaaaggagaagagagtttaacctatttgatttgctattttcttccttaatgattttcaaacttaatttgtttaactaataggtatatacatcaaatataattcctaactcagcccactactacaatataaatcaaataaaacaaactagggtaagttgactaattcacccttaattaaatgcttaggttaaaattagtcctaggggtattttagtcattttctaactttctgatttaacctacatctcaacttttaaacttagtctggtataattccaataaatcgcaacttttatcatcatgacatttctaaccactccgccgagtttttacggccgccaaatccaaaaatatttattctaaaaatagtatccacgatacccccatagtctgataaaatctccgctttttttattcatttacccatatttccctaattaactcgtaattagtttaagtaagattataatcctactctaatgcacacttaatcacatatttaataaaatatgtccaatgaaatatcattatatttattgggatattacaactatcccctccttataaaaatttcgtcctcgaaatttatttaaacaactcgggttacagttgctgcaactacgactttaactttcaagtcacctttcaatcttgttgttcttccacaacactgtaactagcgatatagtctttctttcgcaacactttctcttttctctttaaaaatctgtaccgattgttccttatacgacaagtctgtttgaaattcaat

SEQ ID NO: 310436 - DNA, 736 bp, Cannabis indica
ctagatataccatgtaccacagaattgcaatcaataccatcagtagcatagagagcaagaaaataatcagtaataacctgatcaagacccgaagaccagttgacccacgcatcattagagtttttcagttgaacaatttggttggtacgtctgcgagtactagcagtggtatgaaaatacttactgtttttatcacctgcgtgaagccaaaactgttttgaacgttgtttccaatagatctcctattgagctaaaatctcaaaataattacactgttcagcagagaaatcatgagcatgagattcaccattatccactttcagctttgccattttcttcttactctgtttcagccttttcttaaaatttcccgtaagctcaaaaccccattcagataaaataatgctgcaacattttaacttttcagcaaaggataaatgactattcacggcccaacaatttttcacaagctcaacacacaaaggctcacgagaccaaacagtataaagtaattagttaactctcttagcgtaactggttacccatttggttaccttaaaagtacttggttacctttacctagtactcttatatttttcaactttttcttgaattatgcatttttttgcacagataatatacgaactcataaaatttatgatttcctcattaaaaatttagagctaaatatgattaaattataaaaaattggaaaagtcatcaaaaattcaaaata

SEQ ID NO: 310437 - DNA, 692 bp, Cannabis indica
catagccattaccttctatttttttttattttttttttataatagttgtttctaatattttaatcattcatatctttcacaattgactgtagaccccaaaacgtgtatcaaggcacacaaaacaaaatttattttcacacgtgatccgatcgaaagtctgatcaaacctcttacttaaaatatatatactaaatagtctactcaatgtatgacatgttcatagttccaaactgccaatcactaatttttagtatattcaaatgtagctgaagactctatacaaaaaataaaatagaaatagctaagactgattaatgatgaactaatcctcttagaaattcattatatatttatttatttaattcattacatgttatcccaaaatccggggatatggctagttgcttattgattttccttttttattcttaggaaagatgatttattttatagttagtctaaggaaagtgttgtccaatttttataatctttgtagatataatacttgagtagaggtattaaaaaggacattatgtagaatcatttttttttatatgtgtcattattttattttattttatttttattaaatattatttccttatttaatttttttacatatataattatttgttaaaaatactattaataaaaaaaaaaaaaaaactaataattcacttctctcttcttct

SEQ ID NO: 310438 - DNA, 623 bp, Cannabis indica
gtgcttaaaaataaaagttctcttaattcatgagaaataagctttctcgaacattttctttactctatttctctcttttttagttcttactttctctcttttagctttactctaattaagcttctacaagtctcttccaatttactatttaataaatattttgtttatatacagggattccaattagttaaaacattaatccaagttggaatgtctttttcggttgatgggaaatttttattattaaaaaacatctactagttctaatttggcctcaactttgaaccaaaagacacatttttctttttcttttttaaattaatcattaattaatatatagttcaaatttttatatatatttatatataggatccgttttgtacgtaggactgaattggattagacaggctaatttgtcaaattcaatgtttgtgcatgttagaagtctggataactaatccagctaacctcatctgtctaggattatttatcccatccagcagggtgggataaataatctcatgcaggtgagattttttttaatcattttttaaattttaattttattaatatattttaaatttaataagaatttaaaggaattatcacacatttgtttatac

SEQ ID NO: 310439 - DNA, 1640 bp, Cannabis indica
cataccttctagcccccttcgcccactcgagcaaagaacgaccatgtccgaccctactctgctcacctgagcaaagaacgaccatcgtccaaccccactccggccactcgagcgaagaactaaggacccatccgcacgaaggtcctgtccgtccaagattttccgtcgtatatgacaatatacgcgggagaatcttggacgatgatgaagctttgtcaatataaacagcacaaatatgtatatgtcaaatgaggaagatgatgaagctttaagaattattctgttgttagaattaatataattacgaacttcaataaaattgtaaaaaaaaatattgtaaacattaatgaaagtacggaattaactatccatttgatgaccttcaaatcaactttgactaaacaataattaaaatttaagtagcattacctacccatttaaaagattaattaattcaatatgaaacaaaaagatactaattaattaaaaaaaaagtttaatggataaatcattaaacataaaatgtaatagaagaataagatagaaagagaaacacaagtgttaacctcgcttttaaacaatgacaatgagtcaattaaagtgattagaaataataagtaatgataataataattaaacaaataaaatacataaattgtgagaaaagaaccaagaagttgttaatctctctcgaaagcttttacaataatttttgcaacttcagtagtgctctgaaaaaactgattttggatcccagaatagtaaaatgacttcactatttataggtaataattacatcaattaggttttctaaaactaataagaattaaaataggaaacttaagtactttccttacacaaataaagcaataaaaaaggaaactgttgccccggtttattaccaatatacgtggcagctattgtgtgtgacatgtggtcaacataggcacgtcaccggaaatgagttagaagttggactaaagaagcaacaagcatggctcatgacgctagctcccgaacatgaacaaaatacctatcttcccttcaggaagtcaagacatgggtaggcgtctccgggccagaaaggcttgagttgaacagttactttgcatttaatgtaacatggaaaaaatgtctgagaacgcctgtaagatgatgtgttagacatcataaaccttatttaaggcgattgcacaataatcaaaggagctactgacggctccatcatgaagaatcacatcaattaagaaagaacgaaggctaatctcacctaacatctacgctgcctactacgtaggtaatgcatgccctattttgtatcttttgggaacttatgcttgcccatagttagctctaaagacaagttactcattttcttattcccacccatctctataaatacccttaataaaaattaagaaggggatcggaaaaaagaccacaaaaaaaattctctataagagatactataataccctggatttatgaaatagattagcaaaaccctaattagataattatgaataattgaggaattatatcattatataatttaatatatgtgagttaatatgaattataacttggtaagaccccgttggtgagccaggggcattttagtaattatgacccgagaaagg

SEQ ID NO: 310440 - DNA, 1349 bp, Cannabis indica
atcaatcaacaacaaagaaacagttatcacttgcctttggaaaagtcattgcctttagtacattgaagaccacttcttccccttgcactctcagcttcaattcacccttttgaacatcaatcaatgcttgtcctgttgccaagaatggtctcccaaggatgattggaacattgttgtcttcttccatatccaaaacaatgaaatcagctgggaagatgaatttatccactttgactagaacatctttaatgacaccccttggatgagccaacgaccgatcagccaattgcaaggttactgtagtgggctttgcctcccccaactacaatcttctaaaactgacagaggcatcaaattgatgctcgctcctaaatcacacaacacatatatcccctatactctcttgatggtacaaggaatggtaaaagtcccaagatctctaagtttgggagggagtttcttctgcagtatagcactacaaccctcagtcaataccactgtttcatagtattccatttttccctttttgggcataatttctttcatgaacttcacgtagctaggcatttgttccaaggcttctgtgaagggaatgttgatgtgaaactttttaaatacctccagaaattttgaaaattgcttgtctaggttgatctttcggagtctctgcggataagggatcttcacatggtgatctatgctgactggtggagaagcttcttttggtataagactttcaatagtcatcttttgtgctgatgtgcaaaccggttgatcttggacctcttcttcaactggttgtttcccatcaggcccttcttcccgcttctcagggtaatttccttacagttttcttttgggttcacctctgctgtgctaggcaagttcccctgaggacgggtagctatctgagttgccaattgctccatctgattctctaaggctttaatggatgatctagtctctgtcataaactgtagcaataaatctgtttgaagactagaccctccactagaaccttgttgctgtggttgctgttgattctgttgggactgatttctctgctgatagaacccatgttgttgctaattagaaccactatttcttcaaacccttccttgattttacccaaagttgttattttgagagtaattcccgatggcttttgcttcatccatcggcaaactattcaaatctaccgggcattcgtcataggtgtgagggcccccacagagctcacaaataacttgagcctgttttgcctgcacaactatcagctttgtcagggcctctacttgggctgtcaatttggtgatggcgtctacctcatgcataccaaccaccttctt

SEQ ID NO: 310441 - DNA, 932 bp, Cannabis indica
gtgtagatatgtttgtggctttcttttttagttcttctttttcacttcgtgagaacaggatcatgatcttctaattttattttttggagcacatgtttaatttttatcactatcatcatcatttgtagccttcccttttccttgtaatgaaatatttaattttcttttagaaaaatataacaaaagaaaaaataaagccaaagcataaagtatcaccctttaataaatgaagacaaagtaaccacttacaagaaaaaatttaatatgatgaattctttttttttttctttttttgattactgggcttcgcaagagcaccaaacacaaagaacaacagaagaacaaaccacgaaaccggccggtcaaagccggcaaaggacaagaccaaccccaatagggccagcaacacaaactaacaactaacaggattaaataagttaactaaaacacttaaaacactaaaggataaacagttccaacaaaataaactaaatgaaacacgaaaaaccatctactcaactaataagaagggaactgtcaaaattggacaggtcgatgctcccaaaatgatttgcatcgagtgcctacttggctaccgcatgcgccacaccattaatccttttgagagatccaagaggcctatcagagaccaagttgattagcagagttatgaaacaatttgaccaagtcctgtacatatgatgaattcttgaaccataatattaagtgtaatttacaataatacatacactatataattttattacaatatatgtgcataataacttattttcatacaattacacattttatttattacgaagaaaattatttttaattatgatacaatgtataaatggtaagtatatatttaattgttggatttattcttactcattataatagttaatgaatgatgttatattaataat

SEQ ID NO: 310442 - DNA, 1985 bp, Cannabis indica
acaacaaaaaaaaaatacaatgtagtcaactatcaaccaaatgccacacatgatgagcttggtggattatccaacatatttcccttaattcaaaattgattcgagttattattttaataaaaatttaagagagtatgtttaaactaatgttgaattacattttgtttaaataaatatgtatttagattaaataagatttttaatttcctcagaatttgcccttgtataattttttttttatatagttgtcaaaattcttctcaaattgtaaaaatcgttacaaatatcattcagtcacattatatatgctaatttttttatagttgccaaaattcttcccaaattataaaaattgttagaaatatcccattcagctacattatatgctatttttttaaaacaatttgtttatgcggtcataaatcacatgtatagttacatcacgaaatttttttatttaacacctattaagcaattaaaaatacaatttattagtattaaacatacaaaaatattagttcttatatgactttttggccttgatttggtttaaattgaagttgtagagtagttagtgaaggcacgaagtagaagttgagctgagaagttgtgacaatcagtagtctcgtgatccgtaaagggaaatgtcgggtaagctgtgcaatctcacactgcctagggaaggtgaagtgggatgattctgagattgtgtaggtatgggactacacagttgaagagggcttaaatggattgatttgtactacctatatcaacaaggtgcatcttatttttcggtagcccagcacgaaagaactccatagttaagcatgcttgacttggagtaattttaggatgggtgacctcctggaaagttttcccaggaagcatgcgagtgaggaaaaagtacgctgaaaacactagtattgatctgtagggtcaatcatcattccatgaagcaactagagtgacgtactcgtgtatcagagtcgtgattccgtgggtgtaagggcctaatagagacttgaagcgaggatgttacaaagttgttgtaactgattatattaggttgtttagggtcttttattttctttctggtgtaaactaaagccttcgagcaactgttgtaactgtagtaaccaaattgaatgtgatttttcagctcaataagagaatttattcttgcagtaggagctttgaactgttagaaatgcttccaagtgttccaaacgcatgcaattgtatgctgaatcactcatagtttattttgaactatttatacaccttataaattaataaatcaagtccccaacagatatattttcaatagttatcattcattctcattcataaacaattagtaacatcctttattaatttaagagtaataatgtagagatgagagttacacaatttatgatcatcatttctcaaggatttacaatttctcttttatgatcattatgatcaacacatttgtaagtcgtaacttcatatataatgaatgttataatttgacaaaattaataacttatcacacttaattatttgtaacataattatttaatataaatattatattttataaaataatataatatattttcctactagattaaataatatctcatttataatatataattttgtaacacaatattttgtttaatcaatcaattataatataaattattatattatagagtaatataatatattattatactatactttttatatcctcatatgtatatatataaatatatatactttatcatctacttatatttatacatattttgtacaacccttaaaatttactatcacgatcacaatattatagaacaccacacaacacgtgaaaacgtaattacttttttattataaaagtaattacatcaaaacttgatcacaatacacaccaagcactcactctttttatttactagacactcacacttaaaggtttacttgcacactatttgatg

SEQ ID NO: 310443 - DNA, 1244 bp, Cannabis indica
tgggaaattaggacacaatattattcatcactaattcaatttctctacatattttacttccttatgctcacttaggaatcttagattgctttatcttttcattggtttgggaaaatatgaaattagtaattgttttttttatgtcactcttgtttaagaaattgtgtacatattgcttttgtttcggggattttaattttatgttgttattcttgtttggtgttttgtgaatgtgaacttaatatacatttagatatatttatatttgtatgtatcttttgtgtgagagtgggttatatggttggatttatgagaatattaagtgagaaaaaaagtgggttgtgttgtatggttatagtgtgagtgtttgctattttattgtacatgctgcaacccaaaattaaattttggtctcatttcttcacacaaaaattacattgtggtataatataatatgctacaaacaaaactcaattagtattggtataatctcaagatgaggtgtcttatttgtgttgggattattgtaaaaacaatgtattttgcttcaagtatgtaggacattatggtttgaaatatagcacatgaatcttttcttgtgttggcattttaaagtttcaagaaatataaacaatttaatttttccaaatgattatcttgaattaaattatatatacatgggatgaatgctctgtatctttgacaattttggattgggaatcttactcaagttgatacagtaccgtagtcgatcaaatttgattgaaaaagcttcatggaatgtacatatattgctactcacttataccacaaatatatgagaaaagaaaggagacataatttaattatttgatgtagcttcttatagaaaaaggagtagcttaaacaaaataaataaataaatataaccgtgcatggattttagctttctttagctgatctctttccatacatatatgttaatgtatatatatatatagataccacatgcaggatgtataacacacttaattgcttttctattgtgtctgcatgagcttttcaagtttgtcaaaggacatgatcacatgaaacaaaggctatcctttgaactttttaataattgtatttgttcgtaggttttgtggttaatcatcaagggtctaaattgaagggagaacacgatttcttccaagtgttgattggtttgctggctagctagaggtatactttttctatctttcaattaattatgaattagtaag

SEQ ID NO: 310444 - DNA, 1576 bp, Cannabis indica
tatatacataattacatatatgctagggggtcaattacaatatactaaagtttaagacttagaataacatatacataattatatacatggtagggggtcatggccactataaacaaccatgtacctccgcccctggttataagattctcaatcttgatggtgagaaggtaaaatgaaatggacatgtatatagggtagatttaatatttttgaacacagagttactttttggttagcaatacttgacatattacagactaaagaaagactatagaggtttaatatttgtcaagatactacttgtttgatttgtggtctaggtgatgaaaatgtgaaaaagttattttttgattgtcactatagttgtgtttggaagaagtcatgaattagtttggttgattagcccaaagcaggaacattgacagatgattgagatagatttctagatcgcatcaatcccccttttgtaagcaagtctattcaatggctcttgcggtgattattcaccatgtttgaaaaagcctgttgacctcaaaaagtgatcagccgagagcgtggtcgtataaatctgatgcttgccacataattggccaaacaagaatatgtaataaacacaagattaattgtagaagttcgacccccttgtgatagcgggtaatgacctactccccttttagctttattaatatcaagaattaatactatctagataactatagataggatctgctataacacccttaggaatacgatgtatgaatcaagaacagcaaaactcaagtgtagagataatgcttgtataggtgtgtgagagaggaagtgaagaagagagaagttttcagacttagacttaaagcttggaggcaagtgttaggcttaactaagcttagccttctaggttagagttaaggcctttatccaggaggcctaaacccttgattacaacttgaaaccctagatatttatatattttattagttaattataaaatagcaaagtaccattgaatttagatattattaaactattatgttcgggttttagggcccaatttatagcccaagagttgttgtccacgggtagacgtgcacagtaaaccctacaaaacaacttctggccagccaggccgctgtggaaggcaggctggccggccatggtgcagtcccaaggctggctggccatagggctagctaggggtgggcgaatagctcttgtgacggagctagtctgtcacttgatgctcgtttgtgtgtcggggtctccaattgtttaggtgttaactttgccttccgattagtgagttgtactatcatgtggtactaattttgtccatgttagcatgccacgtcaggaggaaaaaaattaggataacatttgcccccaagtccttatgtggattataagcatgtaggacgcaatacaccatagcaaataaaactaaatgagcatagaatagaatgtacgtaagcatataccattgcattatccacaccatgcactacaacctagcaaacatctcatataggtgtgaaaatatatatagggacacgattttgtctcatgatgtactttcacg

SEQ ID NO: 310445 - DNA, 848 bp, Cannabis indica
ccttcttctttcttcttcaatttgaaacactaagcttttcttcacactaaataattttagccattagtgatagagtgagtgcccacacacatcaagtggtatctcaatcatagtgtggaagactgtgaagaatcttatcaacaagaaggagaatcgagctcaaggaaggagagaaagagatccaggttcagatcttgataatgctccgctacagaaaggaatcaagggctagagatctgaacggaaggagtcattatattccgctgcaactaatgtaaggtttcctaaactttatatgtgtttatttcattattttagaaattcatattaggatgttaatgaaccatacttgttagtaaatctatatcctggtaaaataatttcgacagcttcatggactgatgactgccctacagaccaacacgtgtgtttctaacatgctttgtcctcactcgcacgcttctcgggatgggttgaactctatgatatctcgggatgtggaagttgtgacaaggggcaggttcacatatgcggaagccatagagttagctcttacagctgagagaagcgaaaatagaatctggaaagataatgccgctagaagagatgcaaggaagggtacatccttttcgagtgaccctaggaaaagggggcaagatcaatctgggcagtcaagtcaagacaagagatccaaaagtagtaatgatcatcgacccaatggaaacaatagtcgaaacattccagagtgtcgtaaatgtattagatgccattttggtgattatggtgcaaaaacatgttacaaatggtatcagagccttgaccaagccggaagtgtggtcgacgaggac

SEQ ID NO: 310446 - DNA, 1961 bp, Cannabis indica
ccccaagcctcccagagcaaaagttcatttaaaggaagcacccaaagtgagaataagaatcaaaagagagtatccgaatatagcccaagaatactgagtatactgatttggtggactctcaggaacgtgtagacttggctacaagacagaacagtcactattggaggccacctcctttattaggaggtagttcactgagagatcccaacaaaagatgcgattatcataaagatattgagcatacaaccaatgaatgcaaagatttaaaagataaaattgagagcctgatatggttgggccacttgtatgagtggatgagaaattgtttgctacatatgagagaggggcaattcgaagctcaagcacctcctggagctcacgcaacagatgtgccaactcctccaagagaactcccaccaaatcaaggggtaccaccttcacaaccacccagacagaacaagagagtggctatgatctccggaagaccctgtatagtagcttcaacccacaatgagttaaaacactatgtcagagccttgtatcataatgaataggtattggaagtaggctagctaccaaagtaaagacctcgtctcatggatcagcttataacattcactaaagaacatacatggacgatacattttcaacaccataacccactattgattgaaactttcattgccaacaaggtagtttctcaaatcctagtggacaacggtgttttgttaacattctgttcaaagaagcttttcttgccattggcctaacagacctagacctatctctgagtggttcctagctcacgaggttcaatgaaaatttcatcattcctatgggaaaaatacgactccctatgaattttttccctgacacacctcagagcacattcaaatattttacctttgttatggtggatttcccaacagcttataactctataatgggatgtctaactttggttgatttttgagccataactttgattagaaacttgtgcctcaagttccctacccatgctacaggaggtcgggtatcattcgaggaaaccaaggagaggccagaaagtgttataatttgaccaccaagcaggctctcttaattgttcaacaaaccgaagagagaaacctagtaggggtgcaggttgagctagatccccaaataggagccaagacaatgctgaaacccatggaggaagtggaagaaatttaaatttgtgaacaggacctgacaaaaggaattcgtgttggggattgataacaaaaaaaggagcgagataggagacaccattaaagaatcagtagatattctttgcatggaatcatggggtcatgattggcatcagtccaaatgtgattagtcatgttctaaatgttgacaagaatatgccagctatgcataaaaaaaggcatccccttaacctcgtcaaattagaggcactaaaataagaggtggacccgatgatgtcaaacatctacatacgtgacgtgtattacccagagtggttggctaaccttgttctagtacaaaaacccaatgggatgtggtgagtatgcattgacttcatggatttgaacaaggcttatcccaaagattgcttccttctaccctgaattgacaaaatggtaaatgctaggtccagttatgtgtttttatccttcatggacgctgaatctagttacaaccaaattaagatgcacattgctgaccaagaatgtactagcttttggacaaataaatgggtgtattgctacttggtcatgccctttgggctaaagaatgtaggaacaacttactaactgttggtcagctggatgttcaaaaattagttgggaagaaacatggaggtctatgtagacgacatgatggtcaagtttaaaaccagtaagaaccattttgacaacctcaaagagtgttttgaagttgtaagaaagtacaggatgaagctcaatcccaaaaaa

SEQ ID NO: 310447 - DNA, 1098 bp, Cannabis indica
acacaagattcgcttctagttattaattatatgtagctatattagtttagtatctaaatgtattgctagaataagagggagaatgacatgatgtatatgcctgataaattggtaactaaattctttttttgtattaataaaattcagtaaatgaaagttacatagataaccttcttatttagttatgactactaatttgtcactataacaggaaattatcatatgaataattattaagtagtactagtagcacggaggctattacaagatcatatggcagcatcgttttagcttatatctaattgttgtcataccaaaactgcttttgaagatggtcgataatgttcttgtcaacttggaaggccttagcaaggacatcagggttgatgggagggtccgaaccgaacacagcatttgcaatggtgatcactccagcattttggctgctgagagcagcaaaggcaactgctggtgtgtgtcctttgttgaattggaaatgaatcaaaccaatggggaacacgaacacatctcccttgttcaaaaccttcgtgaagaggcggtttttgccatccttttggttggatgtcacaaacccaacgtagagtgttccctgatttcagtgccacgagggtgagtgtgaggtgggttttggccatatggcgcaaagtcaatgcaagctaatgttattccaagagtgttgagtcctcgaatcatgtcaacattcagttgtgtcacattggatccaatagggttgtgtgtgtctcttggagtgtccagtgtccaccccagtgaagaaaaaagtcttctgccttgacctgcattggatccttacagaattttccattcacaaacactgcaaaagaaacacttgttagttagcactaaagaattgcactctatacaacgagtaaagagaattagtagtgagtttacttacaagctttttcagggtcatctactgctacacagaaatcctgaagaggactaggatcataagcagaggcaatggatgatgccaaagcaaatatggcaagtgtgacaaggaaatgagcactcttcatttttggttaagtggctaaggtattctaaatattattt

SEQ ID NO: 310448 - DNA, 2234 bp, Cannabis indica
gatagagagccttatctcacgcgattattttcggcagtatgtaagaaaataaggtaatgagaaaaactagcaaaatccacctaataacccaggaaatcaaggataacaacctcctcctgtggaaggggatgacatattggtcatcttgagagggccacatctcgctggagaaagtagtattgcccagaagcgatatgtcaataaagggaaaaaataatcaatcggtgtttgcaccaaaaccatcaaagaaagcaaaattaaagaacctccaattgtgttctcagaggaagatacgaaacacgtgaggtatccacacctcgatcctctggtgattacagtacaactcgccaacaatagggtaaaaagagtgttggtggataatagaagctcggtaaaaatcctttacaaggattcgttaaagaaaatgggactacaaaattcaaaattaaaaccttgtatggtgaatttatgtggatttaccagagatagtgtcgccagtcaaggaattattgaactcccattgactataggcaagccaccattatctacaacgttaatgcaaaatgtcgtacttgtggatctaccatcaatacatacatattgatgggtcgcccaacacttattggactaggggcagtcagttcaatcaaacacctatccttgaagttccaaacactgtcaggagtaggtgtagtgcgaggtgaccaactgttggctcgcgagtgctatcgcatagaacttcagaatagaagagccaactatcaataaatggtggtcataatagaggaaagcgagaagaaagaagaggatctgactccttcgatttaagacgagaaaaacaagttgaaaccaattgaagaactgtaagaaattattttagattcaaacaatcccactaatgtgtgtttattgggaaaaatctgaatgaaaaactaatatagcagttaacgaactttctaaaggcaaacaaagatcaattttcctggagccattcagatatggttgggattgaccctaaagtgatttgtcaccatttgaatatcgacctaaattacccagctaaaagacaaaaaagacagaccttggattttgaaagacaaggggcacttaaagaagaagtggacaagttattaaccaacaattttatatgcgaggcgttctacccctcgtggatatcgaattctgttcttgtcccgaagccaaacggtacttggagaacttgtattgacttttcagacttaaacaaagcatgtccaaaggattgctttccactaccaagaaactagttagtggatgcaactgttggacacgagctaatgacattcatggacgcatattctggatataaccagatcagtgaattctttccgctttgcaccacggaccgcctcattataatatttggcattgaacaagtctcgaaattcttcctaagtcatggtagtgacgtctcgggtgagggacactaattcccaccacacgagcgcatcttcctgaaatcaaaatgtagtgcaagtcactcagtcatttccaacgactcccatgaatttgaagattttttcaatctcggtgagcaattgctcaaccttcataacattcgggcctcctagaaaaactggaggcgccttcttgcaaaactttccataccgtggcttcatacggttgccagcaagaggttattctgctggaaccactggaactaaagcgacttgaacttgtggtagaggcactacaggaggaccttgctgtctcagcctcaaaatcactttgtcttgttgtcgaatttaagcttgcatttttgcaaatctctcctcccaatcctgaggagcttgaggtgattttcatgtctaccaccttgaaaccttcatggcctttgccgtatccacggggatttaggggattttgacctccccgaccgcctccgacctcgactctgttaccccgactccttgtattttgctaggcatccatttaataggacttagcttgcaaacccataagttatgtagatcaaacaacgatcacataaattctatgtaccgcacttattgattttagggcaatgcattcaaataaataattgtaagctattatgcttcctaacatgatcttctaatcacatacattactaaataagtaaaggcttatggaatcatgatctcaacttttctctgacgatgattgtacatgtgttgacgatattcagtagacaaacctggtggctctaataccaa

SEQ ID NO: 310449 - DNA, 1652 bp, Cannabis indica
aaaaatgaaaaagtagaaggaaaaaaaggtcatttctgtttgaattttgtatgtctaattttattattataaaagcatttctcattttactttaaatgtgtagaaaatacaagtgtttaaggttcgtttttggcattacaaattggcaaaatagaagaacacaatgtttttagcctgatttaatttgatgtgatcgagtacaagagaaaaatatattcatcacatcaaatgtcatcttttgaaatgcagtaacagaagcgagagcgatcagaatcagaacaagaagctattgttactacttccataagaaggatcttagaacggatgaaagcatgggaactattgagagagacccatcaagaattgcatgaaacggtctacgaaaaatcgtactgtctacaaaagagaatttgtttatctgtgagagttgttgtcatatagcttgacgccatgtatggtagtttgaaccagctgtgggtagagagtcataaagggttgatcgtcgtgctgtacaaagtaacgactactggaatcgtccatggcaacgccaacgatgtctgctgcaatgacaacaattgccattgttgacagcagaaacttctacagtagtaaaactaaaactgccacctccaggagccatgatggaaatgagtatcaactgagcaaggaagcgagcaactatgaaagcattgagaaaaggaaagaaaatgagtacgtagaaaaaagtggagcaaaaatgcttattcttttagcaatgcatcaccaatttgtatatccgctcttagttactgcgcaagctctagcagaatgctcctaagagaataacagtacctataaatattgaaaaggctcatatgtcctctaatttgtggttgataatctgtcttagtacatctcgggcataatcttagaaaaacgatatagtccacaactcaatccagagaattcattccacaaatattgtttcaactatttctctgtcgtaacaattatggtcacttggttactcttgttgtaagttttatggctcaatgtagatgttattggttgctggtatctctatttcagttaaggggtgctctctaattcacttatgaatcttatgatgaaagttacgtctattcttttaacagcagtttaatggtgtattgcattttgtttgccgtttggtataattgagtttaattgtaaggtgatgttaattccaaattaaataaattggaacgaattatcgaatgatgtttttggctgagtcgcggactatgtcgttgtctttaagatatttcgcaattctgtccgaagggtgcatgatagtttatcaaccacggcgtccctaggattaaacaacatttgtatacgaatcgttctgcaccgaatgatatcgcttgattacactccaaaaattgctctgagaaaaaccgtaagaaagaaaagaatattctttttgtgtgtttaaaaggatatgttctcctattgttctgatatgacttatatagagaaatcgatcacgataaaaaaggtaaataaaatcgtgagaggaacgttagtttatggcagtgaaaaactaatcattgattgatcgttttactgcttcaaataattaaatgataagattaattaagtaataaaaaatatttattttattaaataat

SEQ ID NO: 310450 - DNA, 1338 bp, Cannabis indica
caatttaaggttttctaaactcttatgtgtttaattttattgttttagagaaattcatatttaggatgttaatcaacatacttgttagtaaatctagatcctagtaaaatatttccaacccaaaaataccagacctacgggtcgttttgggcctaccctttaaaatgttggcacgacacggcacgatctatatttttttgtggcacggaacgacaagagatgttttttgaaaagcatggataaatatgggtcaggccagcacgatacgcacaaacttacaacaatgtatttaactaacatgtgcacccagctcccaatagaaaaatgatgacatgtcaagaatatgaaccctgacagggtatccttgcttgatagaaacatgcgagaaggtgtgaccgagatagggtctagtcgcatactatgtcacgcacagtaaaaaaggataatagcgagacatcaagagaagtttgcacaatcgcagcatattttcattatatgtgatgacttggtgtttctcccccgcaccttatgtaaagactgcatctttatagtggttgcttcgaatgactaatgagcacgataactcatcatgaacctgcgagttctatatttttagtacatggatgactgatgtgcgatcagtattatcgtgcattctattttatcacctcgatatgtttatgcccccaaaaccccaaggggttcatacactcccgaaaggtccaaagacccaatatgtgagtaactcgagtgaacttgcgagttcacatagttacaggaatatgaacagccgatgtgcaattatataatcgtgcccagtcgaacataaaataagaacggtcgaaactattatttcatttattctataaatgtttttcatttcaatcaagtgtatttaattttgtaattgtcctgtctgatcagttgtgtaattgaatagcaattattttctatataaaggagtgattcgatatgaataagactaatcacaatctatcttccagcgtggactaagcagaccgagttctaaactactataattcttctgtgtcttatatatatttgttgttaatattttgttgattgtttcagtatttgccactctaggtgaaatattcgcaattctgttagtgggtattcttgtatagctcgaatactcgtatattttagtgttgtgtattttcctccaaccacacctactaatctaacaagccggtacaaaaacaaaaacaaaacaaacaaaacaaaaaataacaatgcaaataaaatagaaaaaaacctaacttttgacttgggccataccataacaatgaaaaacaaaaacgccaactcgcgtag

SEQ ID NO: 310451 - DNA, 1608 bp, Cannabis indica
aaaaaaaaaaaaagacaaaataaggtgataatatatttatggaggacttttttgcttatgtattattgtatcctctgaatttttttataaaaaaggttcttgaactattcagtattataaataggttttctgtcaagttttgtcacacctagcaaacaaaataatgcagatacttaactagtgtcttatgtattattgtgacctctgaatttttttataaaaaatgttttgaagtattcagtattataaataggttttatgttaagttttgtcacacttagcaaacaaaataatacatggatacttaactagtgccttatgtattattgtagcctctgaatttttttataaaaaaagttcttgaagtattcagtattataaatagattttctttcaagttttgtcacacctaacaaataaaataatacatgaatacttaattagttgacacatcagtatcatatcaatgtcttaaaaaaataatttattttttaaatataattttacgtaattttcttaatcattagttgattttaatttaatgattttttaaaaatatataaatttttttaattttaaattatatacgcagtactgatgtagtaagttgataagcaaccatatcataattttatttgtcgcgatgataaaatttaagaaaataattaatttataataatgtgaataattcaaaaactatttgtgacgaactgaaaaattcaaatgacacggttgaaatgacataataatgcccatattataagtggagggcaaaaatctagcttatattaatttatatttattaaggatgacaattcacaaagcgattttagtgctcatatgataaagttctacattattagaacttattagtggaaatgacttgactagagtctagtggaaatgacttgactagagtctaagatcataataaattaattgggatatatactataaataaattcttaactaaatatatgtatctctaagagcatatttaatggtgtattattttattagaaagatatagaattttcataccattttactttaataatacactaaattataaattaaattggtaggtactaaattttacatattagattttaggtctacgtactaatttggtattaaaacttttttttatttttgtattctagtctttattttaatctattttaaaaattaatcttatattttagtcaataaattaaaatttatcacaaatataataattcatttaaaatacttaaatagtaaaaaatacaaaatcacgataacaataatactaatattaaataaaataaaaacaacataaaactaagttatgaaactaaaaagataaacataaataataataaacattaagtaacataataatttaataaatattatgtgtaattttatttaggagaattactccatatactgtattttttaacattttttcaaatttacagtttgagtttctagtggttgcagcactagttgcaataggggtttctatacgattttttgttgcaatttaggttgcagcgctagttgcaatggggtttctatgtaaaattccgtaaaactgcaaaaaaagaaaaactgttttgaagt

SEQ ID NO: 310452 - DNA, 772 bp, Cannabis indica
taagattttcttcgatctcacgcaattcccataggttcgacctcgttcttcacaatctctatacgacaataaagattcgtgcacttgcgagttgataaatgtaaaacatacactttcggtacacaacaaccgctataacttttatacttggaatctcctcctcgtagatcgtattacacataggtttgatagttggtatcccagattctatggacaaattaaatgtactgagtcgtactacaggatagtcgagcagtacggaactatgatgcatagggcgagtcacttagacgcgagctggaatttagagccaattaaaccctatgatatattcaagatcacgggttgtagggatgttagtggatattatagtccttcttcctcgtcttctagtgattatggtaaattctttaggcggggaattatgtcccagtctctcctttttacttgtctttcaataaatgataatttatcttgtctcgctgaaatgaacttcgagggtctcttccacagaaagggaaataagaggtcgatcatctcggaggtcccatcagacgcagaggtggagcccccaaagaggtccaagaagactataaccaacaagaagtgagtgttggaatatgttttacccggatctagatttactaacaaatatgtttttaacatcctaaacatgaacttctaaaacgatataaaataatcacataaaaggtatgagaaaccttacattggttgcagcggaaggaatgaaatgactccttccgctcagatc

SEQ ID NO: 310453 - DNA, 2525 bp, Cannabis indica
aactttaaagagcccaacatgttgccttacaaaggcataaccgacccaaagtgccaccttgatgcttttaacgaaataatgaagatgaagagggtcacaagcaaagcaaggtgtcaatgctttgtagtgacgctcagaggtgcatcgtataagtggttcaaacggttggcacctaggtatatcacctcttgaaaatagctttcagacgaattcctccaacaacatcatgctgcatgcaataaaattatgcctgtcacaagtgtcaccattgtgaaataggggggacaagaaagtttgcagagctacatccaacgctccaacaccgaagttaccaaagtagggaaggtatccaaagaagaactcaagttcgccatagtcgctagggtacaccctaggagtggactgtggaagaatacgttgaaaagaaagttggatgacttagataacttttacaaaagagcggagaaatacatccatgtggaggaaggaaatagagtcttaagagaagacaccagtgagtgttctttaagaagatcgtcagctctctacaaggtctattagatgctactcccaacgctcataagtccacactttcaagtgaatcctccaatacgacccgttaaaatcaaacatctaagatgctcctagaaatgaagttccactatttgagaagcatgcttggcaatggcaagttaactcttaggactacagggatcgaccacccctaaccgtccaagtaaagagtgaaagccaaaagatagttccacaagaaatagcactcgcaataatgaggggtatgcttctcaaaattagtcctaaagtgtgcgcagggaaataaatagaaatcagcaaaaggttgagtcgattcacaaaaccatcatatcccttaaaaattgaaaaaaatagttgagtcagttcacaaaaccatcatctcccttaaaatataaaaattgaaagcaaagggttaagtcagttcacagaaccatcacatcccttaaaatattataatgaaaaaggaatcgaatacgactctgagagggacacctctgttggggattattttaccaagatctagatttactaccatgtatgttatttaacatcctaaaaatgaatttataaaacaatggaatttaaacacatataaagtttaagaaaccttacattggttgtagcggaattaaatgactccttctgctgagatctctaacccttgtatcctttctataccagagtatcaccaagatctgagcccgattctccttcagttgattggatacttcacagtcttacgcactatgattgagtaccaacttgctatgcgtgggcatgtactctatcactataaggtttgaaaattgaagagagaaagatagagagaaggattcgaatttgagagagatagaagactcaagttttgactgaaggcaagtgcatcttaggctgttagttttgagtccataactatctatttataggaatccttctaggttcaggtttaaattatttggcattaaaaaaattgataaataaatggtaaaataatgcaatagtggccgacctaggaatagcaaattggggctttttcgcagattaggtcggggccccgacttgatggggcagtcccgtcccagtacaatcagatcgatattcgggtcttcgccccgccccggttaggtttttattgcgtcggggatgactcaatccggtactgtattaacttaaaaaaaaacaaaattcagtccataaatccctaaattgaaaatttccctttcccttctctcatctccttcctcgtcttctctctttcacttaattaattaatctattttctttgctgaaaactctaactgtgtattcccttcaagaggcagcaggtatgtttgttcatcattttttacttctaaattatgaacgaatggcaactctccgttctaattattttggatttttcttaaaagataaaagtataataataattaaaaagacaaatctccatgtgttgtatcttagaatctggttagataggttcctagaaccttcttttttttgtggccgaaataacatattcttgtttttgttcactgcaaatttttgttttctgacactttaacatgaagcagattttgggtgagttgtcatcaattttaatgaacttgatgacccaatacttcaaagaaaatgttttgttcgaaagttgcatatactcattatttagtccaaatttttattttctgacactattaacatgaagcaaatttttgggcaatgaaactattgttgagtgtttgtaaaaaaaaaagtcgggtcaaatacgacccagttgggccgggttgggtcaaacccgattaaacttctgaggtaatcgagtcggggcagggtggggcaatggcttgtcaggtcagtagcgggtcggggcagacccgccccgtttaccattcctaggccgaccagcccaccacttgcaattttgctatttttcaactatttatcatattcttccacaaatgtcatattttccaatt

SEQ ID NO: 310454 - DNA, 2699 bp, Cannabis indica
gctgacacgtggatccaaaacaacgttagaaactacaacaacgtaaagacattgctgtaggaaacgaaattaaaaccaatgacagagctgcacagtttcttgttccagccatggaaaggattcaaaacgcaatcaactccgccggccttgcaaatcggatcaaggtctcaacatccgtcgatactggaatccttggtgtgtcgtacccaccttctagtggttcttttaggtcaaattatggacctataatcaaccctgtaatccgattcttggtgaacaacagatctcccttgttactaaatttgtacccatactttagttacattggtaacacaagagacatttctcttgactacgctttatttagatcccaatcagttgtggttagagatggccaaaatgggtacaaaaatctttttgatgctattttggatgctgtttactctgctcttgagaaggctggggggagttcgttggagattgttgtttcggagtcgggttggccttcggccgggggaacagcgacgtcgtttgagaatgcaaggacttataatgcaaatttgattcaacatgttaagggagggactccgaagagaccggggaggcctattgagacttatgtgtttgctatgttcaatgagaatcaaaagagtcctgaatatgagaagaattggggacttttcttccctaacaaacaacccaaatacaatattaatttgaattaaggtgtattgtaaggattactatattaaggccaactcaaagatttggcttttatatgatccaaatccaatatatgtaatgataaaagaagatgtgagaagttggcatatggaataaattaacaataatgtgttaaaactatatgatgaataaagataactttttttaaataccatatattatcatatttttaagatgatgaaaaaaaaatatcatatcatcaactatagtaagataataaaacacttatatttttttgttattaaaataatataaaaagtgtgttattgttgattgtataataacacatatgtataacaataataaagtgagatacatgatgtttagctcaggtcttacaaaattattttggggaagagccttgataatagcagcctatttgataaaggttttagccaacaagaaggaattgattttaatgaaatctttgcacctgctgtgaaataaaagataataaggataatgttggccttggttgctcaatttgatttggaattggaacaaatggatgtaaccactacattcttacatgaagacttagaagaagctatttacatggaacaacctgaaaattacaaggaaaaaggtgaccagaatcgagtttgtctcttaaaaaaatctttgtatgggttaaaacaggctccaagacagtggaataaaaagttcaatagcttcattacacaacatggattcacaaggagtatatgcatgatacatgcttatactacaaaggcactgagatgttacaagctgaatatcttctactctatgtagatgatatgctactaattagcaaagaaaagtcaaaggttgaaggaatgaaggaaattctaaaatctgagtttgacatgaaagatctaggggttgcaagtaaaattttaagaatcaacattaagagagatagaagcaaaaatcagctatttcttaatcagaaagattatttggaaaaaataattgataaattccaaatgaatgattctaaaaaagaaactatgcccctatcaagctagtttcagctgtctaacactcaatgtcctaatactgataaaaaaagtaagaaatgaaggaagtaccatattcaaatgctatgggtctgtgatgtgtgctatggtctgtacaagaccaaacctagctatgcagcaagtgtactgagtaattaaatacttgagaaatctagggaaacttcattgggctacaatgaaatggctgctcaagtacattaacatcactactaaggttggattatgtttcaagaagaatcaagacatgatttaggtaaaaggtgttgtagatgcagactttgcaggggataaagactcaaggaattctaccagagcatacacatttctcatttcaggcaactgtgtaagttggaaatctcaaatataacctatagtagttgtatctttcactgaatctgagtatataactgtaactaaggcaatataagaagggatatgaatacagggcctgctagaaaaaataaatttgttcaaaggaaaagtaactgtctatacgaatagccaaagtgtactatatttgtgtaggaatcctgtatttcatgatagaataaaacatatcgaggtaaggtaccattttataaggaagaaagtgacttaagaacagattaacattgaaaaggtaccaagtgaagaaaattcaactcacatgagtaaaaaactagttccacttagcaaattccaacactgttttggaattgctaagcatagaaagaaggttttaagtcagttggaggactggaccatgatcttaggattagtttttcttggcttggttttattagtattgaggtagaatttgttgattattcagtctttgataaaactaataactgaagacaatgacatggcaagtgggaacttgacacatcaacaagatgttagactttttatttgggcttacattaacttttattggttttattaaaacttggg

SEQ ID NO: 310455 - DNA, 724 bp, Cannabis indica
agctgctactgccagttctacaaacccctcaagagccaagaaatcaaggccatcttgctccaattgtggcaaaccacgccacttagtcgataagtgttacttcctacacggcttcccacctggttatggagacaaaaagaaacaagaaaagggcaaagctatggcaaaccatgcctcttccagcaaccccaaaccagactcggatggactcactgtcaatgctgatttatctactcaatgccagcatttgatctccctcctaagtcaacaactaagtcacaatactcatactgaacccaacatcacacctgctactgcttctaatcttgcaggttacaattataattcaaatactataccttggataattgatagtggtgctacacaccacatgtgttctaatctagcatgcttttccacatttacatccaattcctttcctaagtatgtttaactacctaatggacaactggttcctgtccaaaacattggaaccgtccacattaattccaaaattactctccataaggtgttgtacataccaagttttgaactgaatctttttttttgtttctgagtacatggctctcactcctaactccattttatttcatcataattcttgtgtaatccaggatcctactctaaatgtggtgattgggacagctgaaaaatatggaaaattgtacttgcttcaacaagacaatcttcccactgcagcaac

SEQ ID NO: 310456 - DNA, 1418 bp, Cannabis indica
aatcttgccaagtcttctattttgttctctcctaacacccaggcccaagctaaaatctctttccttccctctctcaaaatggaagataagccattcattgacaaatagctgggtgttcctcaatattttcatcgctctaaaaaatcctcgttcctattcattctttaaagatccaggaataagctttctgtcttcaaccaataatcattctctagagctcgcaaagaggttttgctcaaagctgttatccaagccatcccttctgacgttatgtcttgctacagaattcccatttctatttgtaaacactttggaaagttgatttccaccttttggtggggatcactgggtaataataaatgcaaagttcattggaaaaactagccttcgatatgcaaatctaaattttttgggggtataggctttcgtaatattatccaccacaaccaggctatgctcgctaaacaagcttgacgtatttttaccaacactaactcccttgtggcctccctcttaaaagctaaatactttaggcataacgactttcttcatgctaatcttggacatgtcctatctttcacttagagaagtctcatttggggtagggaccttcttttaaaaggtttaattttgaaggtgggggatggtaaatccattcatctctcaagcccaaattggattactggccttaaatcggtctccttcaaaaataataatatccctcatgaagaacctgttttcttttttatcaacaatcaaagtcattgggatatcaataaacttgactcttattttgacaaggacattgctgactctattctcaaaattccaattaatccttgtattcaagactgtctcatttgtgggcatagtccttcaggttcccttactgtcaagtctgcatatcacattgccaattctatcaattccagccctagctcttcaaaccctaatgtttttaaacattggtggaaaatcgtttggtccttaaaaatccctcccaagataaaacaatttatttcgagagcttttcatcatcttctccgctctaaccttaacctttactctaggaaaattcttgataaccccttttgttccatgtgtttgaaccagatggattccaacttgcactccttgttagagtgttccagagctcgacaatgttgttaaaaaaatactttctcatctttttactttaaaaataagaattgtgacattaaagaatttctatcaagaggtttagacaactttcaaaaagacaaattgacagtttttcttggtatcacttggagcatttagaactctcgtaacaaatctgtttttgttaatgaggagattgtatatacaaatacagaaccatgtatcttatcttttttgcaggaatacacctcagtgcaagacaacctctcatccctgcc

SEQ ID NO: 310457 - DNA, 995 bp, Cannabis indica
tatttatgcataagtcaatttctttgtatctttgagatctatctaatgaattttatctctgggtgtgatcacgtgaactagtaataatttgcaaggattgttgataccatgtataaaaatcttgtgtatctttatttttctgcacttttattctttgctagtttctttattatataggcatagactcgtattttgtagctacagaataattattttagtaccatatttattatttttaattgaataaacaaataataaattgctaatattaaattttaaagctgatacttttaacattaaatgcaatatactcaacacattcataatacgcaattgaagaagctaaacttgttaatgtattcagaaacattcctggtgttgacattattaacgttgagaagctttaaactagctctttcaaaaatgtaatcaacatattttttgaggaatatatattatctgaagtatacattcattggttagcaaattccttgagcactatacatcaaacaatcaagcatttcgacaaccgtatgttacaagatacttaaactaagtcaaataaaacagttatcttatttaaaataaaagcagttgcacattatttctcgcttattagttaaaaatatataaaatgtgtagaatattcacattttataacttttctatggattggataaaaaataactaatatcctactcttataaataggagagaaaatattgtaaaatggaatgaccaaaattctaacttagagaaattctttcaaattgtatttctattcataaaattccaagtaagcgtaaattaatatgagtaatttgcggcataattatctaagtttaattctcaattgcaaataagtacttaagtttattttttggcggtaataatacctaagcaatgattctagaacttttggaggtacctggttattaaatgttaagtaaattacaacgtggcaatccctaattgatccaagtcattaaattttt

SEQ ID NO: 310458 - DNA, 766 bp, Cannabis indica
tcttctcctgcacttctgtctctgtgagtcttcggaagcccttgcccagctcaaagtcccgtctctggttgttgggagttgacacacgtgagccattatttgagtaatgggatgttttaaagttagttgacccaatcagcccattaaagttcttgtgagtgggtccaactgaattaacttgaatacccttaattgggcttatccccttactcggcccattatagaaggcccgaaccactttgggattggcttccacaacctcagccaattccattgtcttctccaatcccactggttcaagaaggcggagagtaccttgaatctcaacacttagacctttcatgaaagccgactccaacagcggctcagccaccggacccagcgccgccgtcaacgccttgaactgctgcttgtactcctgcaccgtggatgtctgctgtaacgctaggaaccggtcatacgccgaaccttcatgcggaggtagaaaccgccggaggaggaggtctttcaattcattccagttgcgaattcctcgcctccgattttcccacctgaaccagcgaagtgccggtccttccaaacacaacaccgctgcctccaattcatcctctgccgtgagcctttgcaacccaaaatacctctccgcccgatatgtccagtcatcggggtccgatcccgcgaacagagggagttcaatattccttggacggaactccgatcttcgtcctccatagccaccagcttcctcacggttctgagttcccga

SEQ ID NO: 310459 - DNA, 1155 bp, Cannabis indica
aaccgtatatttgaaaaaaaaaaaaagttaaaaaacagtatatacaataattcccctaatatatatttatctccaacttattagtattgtagctaaatgatagaaaagagagagttataatatacgtactactgttataaaattaaaatcctggtaaaaaaaaaaagtgggaaagaaatagtaaaattataatttcaatggctcaagacattttaggaattaagaggctataaaaatagtctcaaaagtgtaaatttcttatttttgaatcaaatctttttgtaactaagatttagagatttgtaacaaaagttttcaagtttgtaatcataaataatatgaaaaaattaagaggagtgctaattacaactttttagtcaaccttcacgctcgaaaacacacgtcagaatatttttgtcatattcgttatggttgcaatattatttttgtaaatttttgaaaaatttcaaataatttacaatactaaaaaaatagagttcttgatagtttatcacaaattgttattcatagaaatttattttttttttaagaaaaaataaaattgaatattatagtatcatgtataatttttccttaacaattattttaagaaaaaaatatgaaattatgagaattatttaatttttccttaaatacttttttcacattaaatgacaattaataatacctaacactactacaaattacatatcaatattgatacaatttaatatgaagttgtacatattttaatttaataagacaacacattgtgataggtctaaacaccacaagtacctaatatcaaatactctatatatttgtttcttttcttttaattttatttttttcttatgtaaaaacaattttactaaatatagatgaagtcaataattaatagtttgtccatattatataacttataaagtaggtattcccacataatgacattgtcatgcatgtgaaatgtattggtatttatatttatatggtccacaatatttcatttatttttctaccatctttaaaggagtgttgtcgacattggttgttcacaagtcataagactcattataacatagaaaacaaactcaaatgtcaattttacacaaaaaaaaaacagcatacactcatcacaacttgttttgtatcctt

SEQ ID NO: 310460 - DNA, 1247 bp, Cannabis indica
gtcctactcaaagaaataccacgtgttgtgattaaaaaatactattcttgtaaattgaggtccataagtcaagtgatttaaaacaaataataaaattagttaaataaataacttgcaataaacatcgatattttattataaaccaaaataatttaaagttctatatttggaatcctgtaaaatttatttacaaaatattacaagttatttagcacaagccgacctaagcggcaaaatagaatttctaagcaatttcttgttatacccgaccctcatgatctagcttggctaaaacatgtacagatcattctcaaagtccttaatctcatggctgacctgacattgctttatctttgtctgcacaatagagcactcgtgagccaaggcccaacaagacagaaaataatacagtattgttaacggtgagaacttgtcaactaatctagtggcaaaaaaaatacaaagtaacccaaaaattaaatgatgataaagatgaagatgaagatgaagatgaaaagatgtatgaaagttattttctctctattgcattcaaagcctaagttacaccaagatattttccaacccctctcacatttgaaatgggagtatttataggctctaatggcctaatgtacaaagtggtcccataggaacaaaatgccactttcacgttgcatgtcgcaggttctggaggtggtttggtacctcatacccttacttggtgtcaggtggtccctggctgcaggagtgatcctcggttgtaggcatgtggtctctggttgcaggggggcggtccccgattataggttgcaatagagtcattgcaacatacccttggttgggtcctcaaacctcataggtctgttgttgccgctactcgtacctccttgctttcaaaattctcaaaaggcatggttgtgcgctttctccttgcacaccttgtcgatgtgcgttcacctctaaccttatatttataatcctcggaacatacttacacaacacacgcaatggctcgcatgcgagacctcccatgggctcacatgcgagcccccaacactcaatacacacacaacatgccccacattacacaaacacgattcacatgtgagcccccccacacacacacacattacacacacacacaccacttgcatgtgagctcccatacacactcaactgtaacgccctaactaataggcacgttacccaagataattaagaaaccctaatcccctagacgagattac

SEQ ID NO: 310461 - DNA, 678 bp, Cannabis indica
tgagagttggggatcaggttattgcaaaattggatatggaggaaatagaagttaaggcttccttttggaaaaatgttattgtctgtatagttcttggtgctaacctaccttttagagtgtttcaaggctttgtgaagagagtgtgggggaacttgtgaattgagaagatagtgaggatgcattctggcttcactcttgttagctttagggatgaggctacaagagatttagtgcttgaaacaggtgtcatacacatttgacaaaaaactggtggtgctgaggccgtggtctattgatatggatactgctcaaatggttaaatctgtcccagtttggataagactaaatggcttaggtcttcaatattgggctaggaacaacctaagtgctttagttagcaccataggcaaaccaatcaagatggataagttcacaaaggagaagatgatgatcaaatttgctagaattttggtggacatagaaatttcagacaatcctccaaaaactatatcattcattaatgagaagaagcaaatggtggaacaatcattagagtatgagtggttaccttctaaatgcatggcttgttctatgttagaccacacagatgctaattgtaataaagaaaaagggtttgtttggaagaaaaagatgttggaatttattttaccaggatct

SEQ ID NO: 310462 - DNA, 1106 bp, Cannabis indica
ttccaaaatcacttgtccctacgaataacggtcaatccagcttaaagcttctttgatgccaattatttcagttatttcaggttgcactagccccacctttcccatcgtgtaagcttctaccaaattactgctagaatctcgagccacacaaccaaaaccaaactgaccttctcgctcaaacaaagcgccatcaacattaactttgatcttatttatagcaggtacagtccaacgctcaagcacacggtccctatcaatcaatggagacaaagaaaaacctttccttttttgaggggatttgtattgatcaagcagagttcttgctgaagcaaccacatttgctgcagtacgatttctttgttgccaaaaataaaaaaaataatatttttataaaaatatcggtttggcaataaaattatcaacttttaccactccaatttttttggcttttgcaattaagtttgtaattgtgtatcattgtgtgggtatgttgtattctttgggttagcccaattatgatagcaaacccaaaactatagccgtatttattagggtttcatccaaagtatcgcataattccttggctctcttctctctctgttactcaatccctctattgggcctttttggctttcttcgcttctgtcactaacccatcaccggtccttactgatcggaaatcggaggggaggaattccatttcaatcgttgcccggataaacaattacttcgctcacaacaggtactgtagttactgttttgaagctgctaatgagtattaaatacagtgagaccatttaaactttgtatgattgtttgggttttctcgaagtgattctcttgttttgtatagagttctatattggcattttacagggatatgaatgtttagttttgtcatagttagtttataatgtttagctgtatgtagtatcatttgaaacgttattatatgaatatgtacgagcttttgttctagtctggatggttccgacatcttgttctcaatcttaagggccaaggacaaagagactttcataattttctgattttggttcgataaaaatattctgtttctttcatgtgaatcccatttgtatggtatt

SEQ ID NO: 310463 - DNA, 904 bp, Cannabis indica
gggtaggctttcgggaaggtaagaaatggaacaaagctcttttggctaaacatctttgggctcttgctagaaaggaggattgcttatgggtgaaatggatcaattcaatctacttgaaagaccaaaacatatgggattggcccaagaaggaagatgtaagttggtatttcaagaaaattctgagcctaagagattctttggatgaaacgaaactaagacaaacaactagaggtaataaatttagtgctaagaggggttataacttgtttgtggaagataaccaagctgtcaatgcaggagccatatgggataagcttgttgttcctaaacataggttcatatattggtagagttttaacacacatttgctcacaagggattacttacagcagattttagtcattccgagcaatctctgcccagtgtgtgactcagcattggaaactcatgatcacttgttttttacttgcacttatgcaattcaggtgtttgcagttgtcaacaagtgggtgggaagcatccaatggcctcggtcgattgctgaaatggttcgtggctgctgcaacttaaagcaaaacttgactaactgaattatcaatactgtcttggctgcggccctgtattttctctggaagaataggaacaaatgcatatttgatcttagttgtttaactcctagttgcttgagtttggggattaaggacactgttaggatgaggataattagcaagggtccttttaaggattgtaaaagaaacaagtatttacttaatgtaataagtaattggtaggagttttttcttttgggctgtaattgttggttttctgcaacagcactcggtggttttgttggcttttgccttgtgtttgttttggttgtcttttgaataaagcattccctttt

SEQ ID NO: 310464 - DNA, 1341 bp, Cannabis indica
cctttattgttcttccacaattcgaaaccttgagtgatagagtgacatgcccccacatagcaagtcaagtactcaatcatagtgagtaagacggtggtaaccaaacccgaaggagagaaagagatccaggttcagatcttgataatgctctgctacagaaaggaatcaagggctagagatcttgaacggaaggagtcattatattccgctgcaatcgatgtaaagttttattaaacccttatgtgtttattttcattgttttagagaatccatatttaggatgttaatcaacatacttgttagtaattctagatcttggtaaaatattcccaacacttttgagcatcgttccattctttagcaacattctcgagttgctcaatggttttgcaaagttcagcttccagttgctttactttatggagaacttaacttttggcgacatgggataagaaggtgccgtatacaaaaaaaatacacatgagttcttgtgggttcttgaaagaaatgttaaaaaaacaaagaaaagaagaaggaaactaaccgagggactgaaggtaagactccattgttgaccaaatcctagtcgctagactaaaaagatcggaaatggcaacagtaggatgcagcgaacagagcacaatactctgaaccaatgcccatggcctcgataggcaaagtctcaggtgccttgctcgaagaagtggtggcctggtgagtttctgggactgactcctcgacatgtggaatggctggagtgtgaacatgaatttggactttaggagtctcgaggtctatagtctgcaaggcacgcttcttatttgcagtggtgttcctggatctcttgaggggttccacattgacatctgaagaactttctaaggcagcaatcctttttttcccctttctacttaagagtggagaagattctctaaatccatatttgcaagacaaagagatgcatcaatacttatttaaagacagataaaggggaaaatgggaaataaattcccacttaagggaagttaccataatcatcagatcatgaagaaggaggactatagtattcactaaactccctagatcatgtgatcatgaatatgtcataggggttattggatctaaatcccaatttgaatctggatggctcgctctatccaaattagtcccatactgctcagcaatcccatagtaagaagtagtgcaactaagttgaacatggaatggtggataccaactatcaaacctacgggtaatacaatctataaggaaggggttccaaatgtaaaagttatactgactatcattgaaagttactaacaaagtgttggaaattatttt

SEQ ID NO: 310465 - DNA, 4880 bp, Cannabis indica
tttggccaaaccaataactggagaaattttatacctttatctagctgtctcggagcatgtcattagtgcaaccttgttgcgagaagagggaaagcactagtaacctgtttactatgtcagtaaaaggtaactgggacagaatcgaaaatacccctcttgaaaaacttgcattatatgcctaattcatgcatcttgcaaattacgaccatatttccaggcacacctaattaaagtcttaagaaatcaaccactaagacaagttctatcaaaacttaatgcttcaggaagattgataaagtggtcaactgaattgtgttaattttatgtaacctaccacccgagagcatcaatcaaaggtcaagttttggttgattttttagttgaaggtatagactcagaaaaagtcctagctattgaacacgaagcagaaatttggaagttatatgtagatgggacttcaaatgagaatggctcgggagtaggagtcataatgatgttgcttgacaacttcaaattctactacccgttaagattccaatttgatacttcaaacagcgaggcaggatatgaggccttgttagtaggtttgagaataacttaggcgttaaaagttaggaatcttatatactttagcagctcacaactaattgcaaatcaagtcttgggagaataccaagcaaatggattaaaaatgacaaaatatttaaaaaaatgtttggaagaacttggaaaaatttgattattttaaaaataaacaaatcccaagagaagaaagctctaatgccgatgcattggcaaaactagcatcccaatatgatctctacaagctgaatatggtatcggttgaagtcttgagcgatccaagtatatgtgaagagaaagaaatcgagatgatacatacttcacaaacatggatgacacttatagtcaagtatctactcaacggagaacttcctgcagacaaaatctaagcacgcagacttttgaattcaatacatcactaaacaatagtcgatggcaaattatacaggagtggttattccatgcctctcttgcgttgtgtgttaccagcaaaagccaatgaaataattaaagaaattcatgaagacttctatggagaccatgcaggttggcaaaacctatccaagaaaatcatttgtcaaggatactactagccaacaattgacaaagacactcatgaatttgttaagaaatgcgacaaatgccagaggtttcacatataccttgcgtaccatcaacatagttgagaatgataatctcaccataaccatttgcaatataagacattaatctgattagggcattacccacaaggcgaggaggagcaaaatacgcagtggtggcactcgacttcttcacaaagtggacagagactgaacctctagtttccataacttgcaaaaaaattctcgattttgttatcaagaacatcattttgtagatttggactaccagtcaaaatagtatctgataacggaactcagacggtgagttgttcactgagttctgtgaaaggaataagattatttaaagcttctcatcagtatcgagacctcaagcaaacagtcaagtagaagctgttaataaaaccttgaaagatactataaagaagaagttggacactgctaaaggaagatgggtagacgagctaccacaggtgctttgggcccatagaacaacagagaaaacaatgacgggacacactccattctcattggcattcagattggaagcaatgttactagtagaagttaacattgtgacccataggcgtgaattatataattaagaagaaaactaagaacttatgaatttgtccttagacttacttgaagaaaaatgtaatgagtcacaaataatcaatatagcttatcaacaccgaatcacgatatattttaataaaagagtccgaaaaagattttttaaagttggagattggtgttaagacatgtatttgcaaatacgcgagatccgtctgctggagtgtttaactcaaactgggaaggtccttatgttattaagcggtcgtgggaaccggggtttacaatatgctttgcttaatgactctagaatagtgaatagttgcgaccttattatcagtatattcaaaatgtaaatgatttatttatctctgtaatagttaaaatacttattatgaataaaattagaatttgttcaagtaattacaaagtttactttctttaaaattacttaggggcttacatatgtgtataataactggaatccacctagaaatatatactatattgcgaacttaaaatattattaaaaatttttaaagaaagaaaatgataattgattaaaattgtctattgacaatataaagtcaagagattgaaaaaactttttcttcaggaaaaaaaaaaatcaaaataacagttgtaagtgagattaactcataaaataacaaaaaactatatgcgagttgaatacttaacgattttcattgttctggcatgtattataaacgaggcacaagagtgagtgccttgaaaataaatacttaagctaaaaatatgaatagaagatttaattattcatatgaacaatcaaaaagatatttaaaataattctaaaagtgaaatattcaaaatattttaagtttgctctaaaaaatgatgataatgatgtgtgtgtagcagatcatcaactgctcgcatataacaaggcagattagaactgctcgcatataataaggcagattaaaaattgctcctgaaagacatggttgattattaactcctattatacatcaaagaaaaagacaatagagatgtatttaacccaaagtatctagattaaattgagatatacatgtttagattgtgagataaaacacaataaataaatatatttagctcaaacacaagatacgaggcataaaaagttaaaatatataaataagcaaagttggccatccaacaatgcaaaagtttttactaaatgtcactaggggcaaccattgtctcggccaaatggccatttttctaaaataaaataaaataaaataataataataaccaagtctacatggtaggagacttggataattcttctttttcctcttcttcttcgacatccaatgcttcatctttcttagtttgctcgcaataagccagcatctctgcatcatcactttccaggaagcttaaatccatattgggattaaccagccaagcgctatcgatagaacattttacaactatattgcatctatttttaacattggcttcagcgccttcaaactttttattgtcttcattaagtttctctagaacctttttgtgggcttcttggtgattcttggcttctttttgagatttttcaagctcagccttgaggtgtctcttctcctcctcgacatcctttgtcaaataaatgttctccttttgggcatcagccactgctacgcaataaccttgcattgttcgatggatttgcgaagttcaaattccaactgtttaattttttgaaggtctctttgatgtgccaagtgagacatcaaagacgcctacaatgaagataaagttagaagaagaataggtaagaaagaacactttatgagataataaataaaaaaacagggattaaccgagatattgagattcaagctcctctcagacagttcatggaagctaccattgttgatcgaatcccaatcactcgattggaaggatttgtaatgacgccaacaaggggtggcatattgcgagcaggcctgcgaggcaatgatccttgcatctcgtggcaaggggcaggagggctccaaaaagaccatctcgggttctaaacccgagaatttgatctggtgaactgatcttaagacatgttcatcaatgccctcattagttgggaatggggagtgaacttggtcattggctggctcgataattatttggtttgaggcaccctttttgtttgccgtggttttcctctctcttcacgggttttcgatttgctctcgacgaagtctcagatgcaacaatccttttcttcccttttttcccgaggtgttaacaagactctcaaagtccatatcaacgaggtaaaaaagaatagttagcactggtaacaaaataaataagggaaatgtagagaggtaatctcccactcaagaaaattactataatcatcatctgatgacgaagaactatagtaattattaaactctctagagccagtgatcatgtatatgtcataaggatttattggagacgtatcccaatcagagtccagatggctcgctctatccaagttggtaccgtattgttcgacaattttaaagtaggaactattacaacttaattggacatgatactagggataccaactgtcaaacctatgagctatgtaatctacacataaacgatcccaaatatagaagttatactggctatccttaaacttaactagcgaggtacgctcagccttaagtgcaataggagaccatccacaattattacctctggacacttcagcttccctaggggatactttcttcaagaaatggatgcgagccacgtagtccttatctttctcgtcagcaggaactggacttgctgccacttagaatactttggattcttatagtcgcaggtggattgtttgctgttgagaagattacagatcttcagattgatctcgttcagtaaaaaaatcagctgatcgcaatccaaacggaagaccttaaaaagttatgccattctaccatctcaggagttggaattggccttttcgtgatcgctgtcaatacaataagtaaaataaataaatgccttcaatttataaattaaaaactcaaaaccaagcttttgagaaaaggtaatacttatgtataa

SEQ ID NO: 310466 - DNA, 1836 bp, Cannabis indica
gcatacttagctcctcctcgccttgtggttaaggccctaatcagatcaatttcgcatattacaaatagatatggcgaggtcatcattctcaatttggttggtggtacacaaggtatatgtgaaaacctttgacatttatcatatctcttaacgaattcatgtgtgtctttattgattgttggccaataatatccttgatggataatctttttggataagctctgccaacttgcatgatctccacagaagccttcatggatctctttaattatttcatttgcttctgctagtaacacacatagtaagagaggcatggaataacctctctatacaatttcccctcaaccatcgtataacgtggtattgagtataagagtgtgcatgcctcagttttgtctataggaagttatctacttactagatacttgacaattggattcatccatgttggcaaagtttctatcatctcaatttcttcctcttcacatatgcttggatcatctaagacctcaaccggtactaaattcaacttatccaaatccaattgagatctgtgcttctagaagacattcttagccatagttttgctagtgcatctgcattagagttttgttcttttagaatttgttcaaatttaaaataatcaaaattttccaagttcttccgaattctctttaaatatttagccatttttaggcctttcacttagtattctccaaagacttggtttataattagttgtgagtaactatagcaagtaatgtttttgacttttagtgcctcagctattctcaaacctactaacaaggcctcatattttacctctttatttaaagtatcaaacagaaatctgagtccgtagtggaattttaagttttttggcgacatcattataactcctaccccaagccattctcatttgaagccccatcaacatacagtttctatgtttctgcttcgcgctcaacatctaaaccttcttctaagtttattccttctattaaaaagtcagccaaagcttaccctttgattgacagtctcgagtgatcggttatggcaaattgtcccaatttaatcgtctattttatcaatcttcctgaagcatcaggttttgataagacttgtctcaatggtttattttttaagactttaattggatgtgcctgaaaatatggtcacaacttgcgagatgcatgaattaaacatagttaaagtttttcaagaggtggagtatctcgactctgcccccagtaacctttaactgacatagtaaacaggttgctagtgtttaccctcttctcacactaaagctgcactaatggcaggctccaagacagtaagataaaggtataatgtttctccaattattggtttggccaaaacttggggtgttgacaaatgcctctttatccccttaaatgcttcctcgtactcttcagtccattcgattttcttattgcctcgcaaaacattaaaaaatgggaggcactcttattagttgacttcgaaatgaatctatttagtgctgccatccttcctgttaaagcctgaacttcttttggctttgttggtgaaggcatcttgatttaggcctttatttgatctgggttatcttcaattcccctcgcattcactatgaagcccaaaaattttcctaagaagaccccaaaagaacattttttaaggttaagcttcatgtcatacttatggagtataacaaaacattctgtgaggtcctttgtgtgatcctcacttttcaccgactttatcaacatgtagtcaatgaggacctccatattctttccaatctggttttcaaacataccatttacaaga

SEQ ID NO: 310467 - DNA, 1143 bp, Cannabis indica
atatatatattgagggaaaaaacattctttgttaactattaacaattatttagaaattatagaaaacacaaaaacaattatatataaaatttaaggaacgtgtttaaaaacgtagggaaaacaaacaatatgtttacaactatactacacattcaaaaaatgatattattaaatatatttttcaactgcatgtaaaacattaagtttttgtcgatctggattttcaatggtaggtagcatttttttactcaacattttaggtgtatgtgtgttgttgtaggattataatgtatttgtttcatctgtacatgtaaattttcttcatatttagaatctccctatcaacataatgttaggatttataaaacactcaagaaatatataaatcacagatctaaacatattcctaaaagtgctttaatatagaaaaccctaaatcataaatctataaagcctttgctaaattaaagaagaagaagatgataaaagatgagcggaagcactaacctgaagccattgttggagattgcagagaaggttttgatcttccaagaatacactattttctagagtattttctctgatggggaaggagagaatacagaaaccctagtgtttcttggggaccactacctatttatagactcatcttagaatgagttttgggtatttataatttggcccctcaacaaattataaattaacttatggtatctacacattaattccatgacactttaatacccttttgatacccataacataattggtcacttaattttgtatcacactttataatagcatatacattatacatatgtgcccacataggatttttaatccaacaatctcccacttgggcaacatatgttacctgataaatgtataaccttatgagctcaaaatttgctattatgtaaaggtattcacaacaatctcgtccatcaactatacccatataggatcaaagcgattttcgtcatatcaatcatgactaaacccatcaatggtcacatatacaaatatagccaaatgacatagatcaatcatggatgtgtagcatggaaattacatgcaatgtgaaccgaacatgcctatttccaactggtcctccttaaaccaaagtgaggtcaaacttaaaca

SEQ ID NO: 310468 - DNA, 2550 bp, Cannabis indica
tcttctgccttcatcaaatatacttttaattttaattttaaattacagtatccttttaatatattatatatttatgtatgagtaacaccaactaaagaactacttatacaagaaaaaaaaaaaaaaaaaaaaaaaaaaaaaaaccaatacagacggtgatggaaataaaacaacttctcagagctagtgctactacttatttatgatttttctttaaagaagatggaaagggagagaaaacaaagggagggagggtcaaatcttgtttgctcaaaaaggaaatatggaatcaaggaaaagacagtcaattgaaatgacgagcataggacacgtggactgcacttctctggcttttttttttaataattatttttctttccactaaaaattaaaacactagatgattcaaggctaattagccatttttcgctccaactttgacatatctcaaatcatcatacccctaaacttttcctaaacttttttagccgttaaaaatttcccctgaactattgaaattgttaaattgtttcagtaattgtttatgtactaaaacatgctccccagactttgatatctaccaaattatgcccctcaaactttgatatgtactaaatcatgcccccatgaactttcatccatgttagaatttttttactaaaattagacaaaagtctttaaatttaacaatcttaatagttcagggagaatttttaacggccaaaaaagttcagggggcatgatttagtacatgtcaaagttcgggggaaaaattgctaattagccgtgattcaaatactaaagcagtcgggtcatagcagttttttaggaggaaaccctaactctacatgcaggttgacttcgagagttttgggatagaagttcagacagcaataacttgaatcgaactaactacttttcagtattctatattatgaagacatgaaataatcaaatctaagccccaagagctgaaattatatcagcttgcaccctggaagccaacctggggacttttagggtttcacctaaaacctaggttgatattcccaactacggttttagttttcgggaccgtcttagtgcaaatgggttaagcttttcattggaacattaactagatataccatagacatatttgaggcatcagaatcaaattcgaagtaagttcatttttgaacacccagagcacccggtgcccgggcacctagcgcccaggttgataatttgtcaatctaggggccttccaagtatcagatcaacaatctgactttttcatcttcttcatcttcattgaaaataggagaataggtactttcagggaagaaataatatttcttgggtgctagaaccaaggcacagcgcccaagttgacaccgagggctgacctagcacccatgttgacattttgtcaacctaggccaattctgatgatgtttcccaagaactcttctgagcatcttctccgttttcagcaaatattaagattcaactatttttacagaccaaatagaacttccgaagggccaaaactgggacatagtgcctaggttgacacttggcactaggctcagcgcccaagttgatatattgtcaacctggactgtttccaaccaagttctcaaaaaagtgttccgagcattttttccatcataaaaataatgaagattcaagcaaactcgaggagaaagccacattcttgagaccctagaaatagtgatgtgtacttccaagatgaaaggggtaaggaccaatgaaccacttcacactcgaaagtacttccaagatgaaaggggtgagttgtgtcgttactttgccccgtggcccctatggtcgacagtatgagtactttcctcgagtacatggacaggagttgaacttgagcaaccaattcaattctctttaaacttgtgattcgaatgaagattactttgagggaagtagccactataacactctagatcatcacacccatagaagatcatcccaagatgatgcagagtttgctcgagacatcaccagaatttccttcacatccccgtggtgaggagacaacagcaagacccaagctaactggagcagatggttgacttggaagaccaagagacctacgtgccctcttgaccaagagacggtcggtggaagcgggaacttctaaaggagaccctacttaggtaatagaagctccaactaggacacagaccaccacccatggggtcaaccgagcaaaattcaaaaccttcacaaccttagtgaagcccttcctatccctctgaagtttaagagcccttcttggcatcagtacaccaaaagagaatgtcaattgtctcacattcactacttcgaagtgtagactagtctgaaaggtttgagagatgatgtcaagtgcagaatcttccctgccatactaacatgcctatctcaacggtggtaccttaagctctctcctggatcgatcgactcatggaaagatctagtggatgcttttggcaaccaattcactccttctcaacaatgccaaatcgaacccaatgatttggtagatatcaa

SEQ ID NO: 310469 - DNA, 1083 bp, Cannabis indica
gctccaaatgtcgagaaagcaattgtgccattgcctacctgagctctcgaaccaggtccaaggtgtccaaaccaaagaaacccaaagtggttctgcccaaagaagtgtccaaagggaaaaatgtggtgtcctcatcttcaaaggccaaaagtctcaaagaaaatcccccttccgtttcatcattagattctgaacctgaagaagaaaccgaagaggttcaagattcaaagggtgtgtctgactcaagtgaagagttcgtttgcaaagaacaaccctctactaatgattttggatctgaaagtgaagtgcctgaagttgatcctatcagtgtagaactagttgctgtccctgctgcagttctaaaaaaggacaaaggaaaaagactcgtgttttatccaagccttattcttcctcaaaaaagaaagaggccctttgctattactcttgaaaacttcaagccacattctcattatttttgttacaatgataatgctagagacatgaaattttatgagaataggaattttactgttgagagaaatttcaatgtcattgctcataagccatttggggtttataacatgttaaaagaaagaaaatgggtgacactttgatcggtttgatggctatgtggatcgaattgtgaaggaattttatgctaacatcactgatgagttcctcgatgaggactcttttatgtttggcaaatctttgtcaggggacactggtattcctttactgtgaaggatgtggctgaagctcttaatttgcatgtgggaattgagtcaactgatgtggaatttgatcgtcaaaaagtgttcaggtatctcacttgtgataatgatgtggaactttttgacacaatgcatatgtctcaactcacctatcaccatgatgttcttatgaagtttgccctatccaattggtttccttgctcaaattcgattttttctaaccaagaggagcttattcttgagaatgaaactatagaaatgcctgctgtaggtactgttgggtttaatgccctaaataaaactcatttcaatataatcaaatttacttattaatatagatcagaaacaa

SEQ ID NO: 310470 - DNA, 1201 bp, Cannabis indica
gtaaggtttctcatactttatttgtgtttacttataatcgttttagaagttcatatttaggatgttaatcaacatacttgtgagtagatttaagatcctggtaaaataatttcaacataaaggaagtcgctccttccccataaaaggagagttattgtcaccattttagtcaatcgacattatcactatctttgccaagtgacattatcaccactagagatggaagctactggaaaaaacaagcaccttttgatacgatgagaaattttaaaaagaatcaaaaaaggtcaaatggtacaatcacaacacatgcaaaagctgagaaaagagtagtggacatacattgggtacaagaagtggaggtgtgcttgtgtcaatatcacctgaccaactatgcctccatcccaataccacatgccatcataatagtatatgattcccataggaaccacttacaactcatttgtaaacaaggccaataaagctcaactataaatacttctccactctcttagagggagagttagaactcggtaattttgaagagactttttttaataaaaaagcatctcacatctctctctctctctctctctctgaaatttttatgttaaaattatttcaccatttttatcaatcattactcaagattttccacaacaatgtagttgatgagttctcaccttcaacacttaccttagattaaaaatgtgtaccaagtaagaatgcctaaaagtggcatcttacaatcttctcttttatatttaggctaattatataaaatctcagttagtattgtgaggaatgtaaaaccacaaatattttgagccattggattgataaagagattcatttttttggtatcctaaggctaacatatgtatatctaaaagtaagggtagtcattttgataaaactggtaaccgggcaaaattcatctttattgtaccactatatgcattaaaataacaattaaattggtaaagtgtactttctttttcttttctttcaatgtaatagaataagaaggttaagtgttcataaatcatgatgggctaagttagtatttgtgttatttttaagtggtaaaccacctaaactttgcggtttgtaatacttaaccacaaaaactgaatttttggcggctaaactacctaaaccctggttccgttttgctctgcacacctccgtccaaaaatca

SEQ ID NO: 310471 - DNA, 584 bp, Cannabis indica
aagtcgaaagacattttacctaatgcacctaagcaagacttctttaaaagtgtatatttattcaatcaaagtggaggaatgttggtaagggctatacaattcaatctttgagtgatatttccctgggaaatgagtggaattcagagatggtttttcagttatttggggaggatctaggaacccgaatcatgaacattcctagaattcctttcccacacatggatcaagtcttttggaaacaaaaccagttaggaaagttctctgtgcgagcagcctataatacggcaattttggatagaattgaaccagaggaagaggtttggaaatggatttggaaggggagtatccatcctaggatctcagttttcttatggagagccctgtccgaagctattcctacaaagaatcggcttcattttttacaggacaaaacttgcaatttatgcggagtcgaggatgaaagtgcctgtcatatactttggaagtgtagtttctcaaaagctatctggtttggatgtcgtctgactctgagattggaagacattccagctgataatgtgctcaccatgtttaagactttgtta

SEQ ID NO: 310472 - DNA, 788 bp, Cannabis indica
gattaaaaaattaaaaaacataattattaccaaatggtacgtgtataaatttttttaataagaatgcaaaataaaagggattgaaacctcatgtagtaccgtatggccttggtcttgctacagtatactattggctcgttggctcattatttggtggtcgtggtgctctctcttggggttgggggagggattgctggtaaaagtttgtgtgtgtccagcattgtgtttattagcgtttgagagaggaagttgggtagcttgatgtattattgcaggggcttggttggacaggatggagagctgcaagacccaacactttggttttcatcttagatttgtgagtttgttgcttttgaattgagtttttattttgtttgttggccatcaaggtaagggaacccgtgcttcagtatattagttacttaactttgttgccgcttacttgcccatttaagaaataatttactctacaatccattatattagacgatagacactaatttagtgggatgatgcagatgcactattataaatgctattaataaaatacaatttaagtaacgtttggttggaagtaatgaaatggaatagaaagaaaataatttttatttcatttcaatggaatgacctttctactattgttgttggaaagatttatgctattttgaaatggaaggaaagaccatttcaatacatgataagattaaatttaataattttttattaatttttttatacattttaaattttattctattctatatatattccgattctcattcttattt

SEQ ID NO: 310473 - DNA, 1132 bp, Cannabis indica
tttactaaaataaaaaaaaaaaaatcacttttagtcacaacaaaacttgtgattagctaaaagtaaaattgttgtgactaattataaatcatcatttttatgttatgactaaaaggtccgtgactaaaggtattagtcacaaaattcacaatttgttgtgactaaatgtgattttagtcacaataagtaatttaatgacaacttgtatctaaatactatgttttagtcacaagtagtttttcgttgtgactaaaaattacatttaggggtgttcattatatcacatccaatatttttaggcctatccagatccgatccaattatatattggatgatagattttaccatccggttcgatctaattaattttagtcatctaatcgatccaacatccaatggatgttataaattggatcggttttatccattggatatatttgatgtatatatattagtttaatttagatttatccaatattttagaccatttattagatcagatcggatccatatctaatattttagatccaaaatctattgaattgaattcgatctattaagtaaaattttaatgtgtattttcatgtatacatatattttttttacgtatatttatgttgagtggtcaatgtgtagttatttagcttaagatggagtatcattatttcaattgttggtgttctgatctatctactgaccctatgtttagtggttttcagatccctagtgtttgattactctctaatatttggtcgtttgctattgtttgttatttcgattttgaataatgaatttaattgttcttatttttattggaagatcttatttgggtgatactcattgttaggttatgtctgtagtatgttcatttagattgaaagtttggctcttttcacactcttttgattcttcaaagctagtggcttagtcctttagtttgagctaattatgagaaaaaagagagaacaaagtgaaaacagagcaagaattttactatggctcttcaacttgagtttacaaatgagaaatgagcttatatagctcagttcaaacaaggaaaatcagttggaaaaataaccaactgttaaccgaaagattagctacaaaatatcaagattaacaacccaaaact

SEQ ID NO: 310474 - DNA, 2369 bp, Cannabis indica
gctctcaagaagtccttccccgcgaaatatctagcttgaaacaggcgaccaacaagagtatgaggcttacacagcagacgccacccttgcttactcaataaggagagattaaaatcatgaagatctctaaatcccatccctccttttgacttgtgaatcttcaacttatcccaactcttccaatgaatccctttattgttctgtgaagaagatttccaccaatacttgcacattaactgctccatttcattaacagtcttcagaggaagcaaaaaaacattcatggcataactaggcaaagattgagcgacagttttcagcatgagctccttacctgcctttgacaaaaacttgccttcccaactctgaatctttttcctcatcttatctttcaagaaacccagaagagcatttttatttcttcccaagatgttaggaagacccagataagtacttgtatctcctgcctcttgaaccctcagaatagagcagattcttgcacgaatatccatcccagtattggcactgaagaaaacagaggacttattcagatttacctgttgtccagaggccaactggaaacactgaagaagctcaatcacattattcgcctcctcctccgtagcacggcagtataaataactatcatcagcaaagaacatgtgggtaataacaggagctccacgagcaactttacaacccctaagctttcctcgcctctcaaaatctgagataagagccgaaagaccttccgcacacagaagaaaaagataaggtgatagagggtcaccttgtcttagacctcgtttaggcacaataggacccaactcctttccacctgaaaggatattgtaggagaccgagcttacacagcacataatcagctgaatccattcctcactaaaccccatcttctccataattgcctgaagaaaaccccattcaaccctatcatacgccttactcatgtcaagtttaatagccataactccctcctttcccgtgctcttccgtttcaagtaatgcataatctcaaaggaaattaagatattatcagtaataagtcgccccggaatgaaagcactttgagattcagaaataacctgatgaagaacacctttcaaacggttggctagtaccttcgagactactttatagatcacattacagagagcaataggacgaagatcactcatagattcaggctttgattttttgggaataaggacaatatgggtatcatataggttgttcggaaactcaccaaacattacaaagttttgcaccagcttcaccatatctgaaccgactatgtcccagaacttctgataaaaccctggattaaagccatcaggacctggggatttatctggatgcatttggaacaaagctcttttaacttcctcactatcaaccggagtcactagctgataattcatctccgcgcttactcttccatgaacacaatcagttactcggtcccaatttgtacagaagcagaaaaaagctctttgtaatagtcaaccatcactgtagccaagccactatcccaatcaacccacacaccattgtcattcttgagagaagcaatctggtgtttttcttccttgtatttgcacaggcatggaaatatttcgtattctgatctcctgcttgtaaccaaagttgctttgaacgttgtctccaaaagacctccttctgtgtcagaatctcaaacagttgtgcatgtgtttccttatatttctgaaccgaagtatcatctctgcgccccttcaattgtttcagctgcttattacatcgagagatacgatccttgaagttgcctgttatatctttcccccattcagcaagggaagtgctacaacacttgattttctgatgcagaggatcttcattatgcatttcccaattgtcactaacaatctgtctacacataggctccctactccaagcattctaaaccggaaccttttaagaaacaccaccggtttttgaaaagcaagatcaagccaaagtggagaatgatctgaagcggagatctccatattaaaaagctttgcatccggaaaaagagaattccaagcattagaaataagagcacgatcaagtctaacttcaatccagtttggcgtacctttccccttctcccaagtaaaaggatggccaattaactccatatccagcaactcacactcatcaacaacttcttgaaaaccatccacaagccaccctggataaggacgtcccccacgtttatcaccttgagacaagacattattaagatcccccatgatacaccaaggcaacgtagactccctagaaagttgtcgaattcttccccaagtgttcggtcttaagcttctttgtgg

SEQ ID NO: 310475 - DNA, 653 bp, Cannabis indica
ttctatttgttcatctcagatctaccacaccacactaatttgaaaaccctaactcatctctttctccccctcttcgcccaatgacaacctccattcttgcaaccatcaaacataaccaaaaaatcagatatctatctctccccttctcgccggtctctcttggttttctgggtggagccaccctcgttcgtcaaaggcctaaacggaggccatggctgacctccaccagccatgaaatctcaggaacttgtgttccctgatccctctctcgctctcagacactctctctgtcgcgtgaagctcgacccaacgccgtgattcctctctcgcgtcaagcacgaccttaaccccgtgattgtacatccaaaggtggtgatttttaagtggataaaaaaacaagaatatgcagtagtggacgtagtgtggtagcataccatatttgaaggtagaagttaaaacaagaattacaagtgttatgtctaagaaagttacaagtaataatttaccttagtttgagtacctctaatagactacacaagcaaaccttaaatgagcatagattatacatgttacgtacgttattctaaaatgaaatacacagaatatgataattttaagaattaatgttttatatatattctatgtaataaatc

SEQ ID NO: 310476 - DNA, 673 bp, Cannabis indica
gggacgatttatatatgagcatgttgatttagttggcgtgggtcaataattattccaagacgaccttgacttcatttgtttttctgtcgtttttggttttgccatgatcacgtaattaacaatagaaagaaaggagtacgtaccaatagtgaaaagaaacatataatttaaatggcgggaccacttccctctattcaattattcactttgattcgatctgtttctattttaaataggtctcacctaccatttgcaatcatcaattttaagtaattatttatttgatacaatattttttttttctttgtaaatagcttgaaaataaataaattagtttacaaatattatttaattttgattgttattatttttaaatcggagtacatatattttaatttcaattatgtaaagaaaatgttgggaaaattttataatgcactctatcctcatgtaattttttgttatttattatggcattaagaaaaaaaatttagtcttttttcttatgatcgtatacatttgtagttatttaaaacatcccgcaaaattttaacacaataaaaatattgtccaaataatcctgcccgcatgaccttttattttagggtaaatactattttagaccctgtgttttgcaaaagttatagattgaaccctgtattttgttaaatga

SEQ ID NO: 310477 - DNA, 1232 bp, Cannabis indica
cgttggggccctattttggctcccaaaggatctcgtttgctccttgagatcacttgtatcttcattatttttaaaaatgaaaaaagatgcccggaacacttttcgtgaaaaatgactagaaatagcccaggttgacatgagtgctagttccagcttttttccagtggatggttctgcttgattccaagaaacacttgtatcttagttatttgtgaaaatggagaatatgctcggaagagacctcaaaaaattgattagaaatagcccaggttgaaaaaaatgtcaacctggatgttggcccaacacttaggtcaacttggatcctggcccatcacctaggtcaacctgggcgctgggtcccaggtctggcttccaaatggctctatttgttccccaaaagcaccccaaatcttaattattaacgaatacagagaatatgactggaacagttcttctaaactgatgttggaaatggctcaggttaacaaagtgtcaacctgggcgctagacccagcgcctaggtcaatctgggcgctgggtctccattttgtcctcaaagtcgatctatttctttcccgaaagcacttgattctttgttttagatggagacgaataaaatgctcgggatacatcttcaatattgtgattggaagcaccccatgttaataatatgtcaacctgcgggttgggtgcactaggctcagggggcgcctagtgcctctggtgctcaaaaatgaaagtgttccgattctgattcaagtgcctcaaatatgtccgtgacaagtcttattcatgtcaaagtacaaagtttgaaccatttgcactaagacaaactcgaaaattgaaaccctagttggaatgttaacttgggtgcggggtgaaaaccctaggtgcccgggttgacatccaaggtgttgtttcgtctcttttcaatttctaagccttggaattgattcttcttgtcttcttgatttagaatactgaaaggtggtgagttagaaataacttagtgtgatccaaactcccatttcggagttcccgaagtcaacctgggcacagggctagggacccctcccaagtcgactgctatgactcaagactattcaactccgagatgttttctttcttgccacatgacgagcattgatgtccacgtcacagggtcaatttaccagtaaacattttcattaaaaaaactaaaacatctttatataataattatccaaatgata

SEQ ID NO: 310478 - DNA, 3339 bp, Cannabis indica
atagagtctagtcgcattattacgcctcgcatgatgcaggaacaaagactgggtttaagactcgcagataccaagatatatgcgatgtccataaaggttttcctatgagtaagtaaagatcgattctttacttagcgagctggtccagatgacctgacacactcgataacctgataaggactcacatgtcctaagttattgactttttacaagatatttgtatatgtgactcaaataggatgcagatatcttaaacacgtgagactcgattagtcttgtacgcatctttagcccgtgagcttatgagagaatataaacagataactcgcaccaccaaggtcgcatacgttgttgtagttagtgaattgggccgaaactgttcttcatttattatatttacgtttctattgatttaaatgttgatattcaatgtaaaaacgaattgataattaatcaaattctatataatcaaaggacacttgctttgtatataaaggagtgatccaatatgaaatggacaagactgaaacccttgcaacagtggactaaacagaccgtgatctgactgaatcactatatttccattgtgttatttatattttccagtatgtctgagtgtcccttctttgaatacttgccattctaggtgcagtaatcacatacttttatttataattctattttaatattttatttggtgttgtcaaaactcctccaacaacaaaactataaaaatatcactttgggcttatcttgaccttttatgatgatctaatgtctaaaactaactattgatgaaaatcataaattttcaaagtttggatctagtccgttatattgtttttgagtaatatgaagtaaaaattgcacttgtcttgggcgctaattttggactcaaaatctttagaatttccatatgggtgtgaggcattacttaaaagagctttaaaacacatgtctaatcgcatcaattcgaggaataatgagggagttatggctgttttactaaaggttgttcaacacccaacacccaagttgacttctaatgcatgggttgacatccttacgtcaacctagacattagacatcaacttagccattttcttagttttggtgaaagttttcaccaaatcttggagatgttgctttttggtgaaaatgagtagattcaaaacttcccgattttgcgatattccaccttgttgaaagggtgcaatatcaaagtgtgaatttgacctttcacaattcatatctctcatttcctacaaaaaaaatagtcatatgcttgagacaaaactagatttttataagcacaacccagcacactatgctatacgtcaacctaagcgatgggtgcttctcgggcgacttctcaaggctcattttcatacttctaaggaatttgagattgtaaataaggtctcctacccaaattttgaccaaaatatgaagaattcccatagtcaaatttacgtttgaggagcgaaaacatgtgaaccaggttgcatgtctatatgggcgcaaggcccaacaccagtgtcaaccttggcactaggtccagttttttgcgaccaaatagttttgtttaattcccaaaaaaagtcttatctcaattatttgtgaaaacatagaatattccggaaagacttcttggaaaaacttatgggaaatgacccaaggtgacaaaatgtcaacctaggcgctgggtcccagttttggctcccaagtgacttcatttatttcccaaaatcaccaaaatattaatcattaatagatacagtgaatattcctagagaacttcttctgaacaacgcttggaaatggcctagtttgacaaagtgtcaatttgtgtgccaatcccatcatgtaggtcaacctaggcgttgggtcccagttttagcattaaggtagatctatttctttctcaaaagcacttgattcctcattttggatggacacaaaaaatttctcgggatacttcttcaatattttagttggaagctccccagtgttgggtgcactaggtgcctgttgccttaggtggtcaaaatggaaagcactctaattctaattctggtgcctcaagtatgttcgtgataggtcttattcaagtcaaagtacaacttttgagctattgacactaagattcatcctccctaagatttcatccactgtcagatcataaactccgaactctttttgattcggaaacaataagtaacatcattaaagataggtgggaaaccaagtggccatggtaaagataggtgggtgtggatgaaagagcttaatggtttatttactactaagtctacttatctggtccatgctttagagagatctcctgactgtgttgttgcccccacccaatggaataaactttggaactctaaaattttggagaggcataaggtaatctgatggtgtatccattcagataccctgcctacctgtgtccttcttgctcagagaattagtattgaggaggtttcttgtccactttgtagggcgggtgaggaatcgatggagcatctctttctctattgtaacttcgggtatctttggaggtcttccccttagggagttattcctatttttgaatctaaagcccgtgtttaggattgggtaacatttctctagaacttgaagtcaaaagggtggatactgacaagctgttccgatatgcatcgattgtagtggatacgatttgggatacccgaaatgaaaaggtacataacaactcctcgagttacattaagcactctattaattctatctctgtttgttacacaaattatgtggcttgcttgtttgctctggcgctggctgttctatcccctgtttggtcccctcctccagaagattggattaaaatcaactgtgatgttaaggccggtagcagtttcatgtgtgtggtgacttttgtaagggatcatgcagggacatttttgtgggtagcagctaacattctcaactttgcgaatcctatgattggtgaagctgtagcgtcttggttagcgttggaattaacagtgttgaagaaacacctttttgttttgattaagagtgattcagagaaggttattaatgctgtgaagggaacttattccagttggactattgataattaaagttttatttgtaatcaactttctaatcagtttttaagttgtaatttctagtttattttcagatgttgtaatcttgcggctcataatatagctaggtggacttttgttcaaaatatttcaagtatgattgagatctcttttatatctgattatatcttttataataatgggaggtccaactttttctttatttatatattacgacact

SEQ ID NO: 310479 - DNA, 2107 bp, Cannabis indica
atgtatttatatattaagataagatgatatattcccttggcgtgcaagtcattggtggcccaaagtgttccccaactttcacatctctctccttttaataattttttgttttacttcttcttcatatctcatccacaaaattgtagagtactacttccttaattctttttggacagtaattacttacctatagataactttttcatatctaactctatacctagctactacactttattatatgcttttattttttctttttctttttctatttcatatcattcttgtatgattttattcttattagagctctctattcataaatcaatcagtttgcacagtcaattaatgtatagcttttgaaaaccttagaccaaacatcttttcaagagatgaaaatatatagtttgtttcatcaccaaatgaactatagctagccatttcaataatttacaagaaattaattcaatttattttaattttaacctaaaattatggcaattccaaggctttttcttcttaaaggggactaatcataaaatctagtgtccttcccaaatttggtgtttaaaggaagaaaaatgaggatatatatagaagggagggatattgtttttcaattatttgtgcttgaaacatacataatagaatgactacatgtacaaatttgatcttatttaactacactactatatatacaattttcttttgttgtgttataaccacttctatttttaaatttttcaatcacagaaataaaaataatttttttgtttttgaaaaacaaaaatgtgttttataaccacttttgttttttaattttaaagcagaatacaaaaatgtattctgtaaattatattttcatttgttgattttatttaagtcgggtccgggactggggtccgagtccagctccgagtttgggtctggatctaggtcccaatttggggtccgagtccgggtctagatatgagtatgggtacgtgtacgagtataagtcccagtatgggtaaaggttcgagttcaagtatggggtcagagtctagatccagagttcaggatctgggtctagagtctggggtctggggtctagggtctaggattctgggtccggggtcctggtctagggttcggggtttgggtctggatctttgtactggtcttggtctagggtgtgggttcaagttctagttcgggttgggatacgggttcggggctgggtccaggttcgggtcggggatcctaatcggggttcgatgtcgggatcggggccaggtttgaagaatgtgtctgtgttcaaggccaagttcgactttggatttaggtctagggtcggggtctgagttttggtccgagtttcgggtccgaggttcgagtccgggtactaagatccaggttggggcggagtccaaaatattgcttaaaaaaaaaccgtttaataaaaattaaaagtgatttttttttcaaaatttttattctcaattaaaaaaactgaaaaagtaaaacaattttataaaacatagttatagaaaatatttttaaatttttaattaataagtattactgaaaattaaaaagtattactgaacacaccattaattttttttttttactctttgtgttttactcaaaaacaaattttgtgattaacaatgaaaacttgtaaccgaaacaattatcagtcattttcatactactataggtgtatatatacgtataaaaatactatgacaatatattttattatcatacatttttttattatagataaatagtttatcagtaaaattattataagtgacaacataaaattaaatattataagtataattgctgtccatattttataaaaatattttcataaataaagtgttaattccaacgtgtattttcagatatatatatatatctttatatatatatatatatatatagaagttgattaagaaattataatagaaaattgacggtaatatttcaattcgattcaattatgttaatttcaagtgtgtacgtaattaacatttaacatatatatgttatataatcagttttattttagttataatcgatttgagttatttcgtgttatttatttttatttatt

SEQ ID NO: 310480 - DNA, 948 bp, Cannabis indica
tagaggggaccggtgaacggagcttcgggtttcgaaggttggtcgtcgattttgaagagtggtggtgaacggaaccggccgtgggtttggaagccggagttcgacagttggtgggtttcgtcgctgtcaccgtcgtgagtttcgtagccgtcagtgacaatgcgccgtcgagagagatacggatgcgcaaggggttttgggatgagaggaaggcgggatgtaagggatctgatatatatatgtatatatatggaagggttaattattatatgtatatttattgttattatgttctagataatatacaaattttaatttttaattattttatttttctaaaatttattagttctagttcatcattatattgctcacttttgtaatttaattcaattactttattgtttaatttttagtttaattcagataaattttacttaatcaatttcatccaaattgtttagtgctgattttttatattttgttattaattcaatccccaattatcttgcctatcatcatatattatttatgtgattgcatacatttaggtattgtattaattttcaattttttttttttttgttcttctcaagtctcaaattgcaattaattgttcttgttaattttctttgtagcttggatcaatgaattcctcacttaaattacatatatattttaatcaatttataacgctcacttaaataaatttatgtaacatacaaacatgtttcaatatatagtctttactaggaatattaaaatttttattgattactagatgagagctacgtggcgagccacgtaatattagtttttttataagttctagtagtttttatttaagagttcagtaactaagcaacgataacaacaatggtagatacatctatttaagtttttcatatttgtaaagattataaatctaaacttttaattttcttgatt

SEQ ID NO: 310481 - DNA, 2188 bp, Cannabis indica
caaaattcaataatgccgatatccctaagtggccagcagccaacatgagagggacccacctaaccctcaacacttaaataaaatgacaataatgccccttacataaagcttaataactaaagtggcctaggggtaaaatagtcacttcacaatacctcacctaatctcgacattctcaatgtctaactatattgcctaactaaaactaaaatgccaaaccataagaaaatatgattctattgtccaaacatcacattccaatgttgtcggacataaaatatgaaaaacataaaattccatatatagaataaataacacacctagaattcaaataaatctctataaattcataaatcataattaggaatctaattttatacttaagtcctaattatctgctaaattttcatattaaaattaagtggtctttacaatattacttagttgatcttagaccaattgatcttaatcctaaaaaagataattctgtgttgtttattgctctttcttattttcattattcaaacacttatattgtcgtttatttgactccacgttgtttaccaaaaatgaggtcaatatgtattattaccgttaaaaattaaacttaggtatttatctgcaactgagagttaaacttagatatttatgtcacaaattactctagttatcatcatagtcattatcgtagtcatccctttcgtcctcatcattaccttcttggtcatcttcttcaagaaggttttcgtcatgattctcctccagtttgtgaccatctcgaggagggtagttccccacttttgatgcctcaccatctcctgctgagaccgtctacatgtctgttagaggaagctagtttatcaactcgccataagaataccatgtctcacttaagggctcacctaagaaatccaagattcgctaagagacccaaggctcacccaagtagcctaaggcttgcctaagagctccctcaacttaccatgagtcacctgcccaacgacaccacctagaggcatctcgctcaaggcctcacaaagaggtgcctcacccaagggctcacgaagaggggcctcacataagggaaccgcctagaggtgcctcactcaagggaaccacctaggagtgcctcacgcgagagcctcacaaagaggtgctttgctcaagggcaccacctagaggtgcctcacttgagggcctcacaaagaggtgcctcgcccaagggctcacaaagtggtgcccatacgacttgacacccaaccaccactacttctgttctactgccacctgactccattagagtagtacatggtcttccattgggagcacataggcttctgcttgtaagaaaggctaatagagctcaactataaatgcctattcactccattaaagagagggatgaaaaatttgtagcaagagaacatcatattatcaatacaagcaccattttctctacaaatcatttgtcttctttaagttcataagttatttcatactttctatatattcattacaagtttttgttagaacttattttaccaaggtcttaatttattaacatgtatgtttgattatcacataaataatctaacatcctaaaatatgaaattcataaaacgattaaataacagataagatactagaaatccttatcttggttacaacaaaattaaatgtctccttctattcaattactataacccttaattctcttttgtagcatggttattgccaagtaataaacttgagtctctttcttgaatttgcaaactcattttctacacagtctttcacaaagatttgagtaccatcttaaatagagtgggtcggtactcaactcaatatagggccgatttctagagagatggtagagagagaattcataaatctatatatagagagagagttttttctagtcagatttaggtcaagtcacttgaattagattttctcacttatctgacaaagcctccatctatttccttatatatgctctctactggactagggttatattatgtgggctagaaaaaagatagtgagcccaaaaccataagcctagctcgaaatacactaaggccttagggctttgatttttgtcactttatttcattaaatgaaagaaacttatattttttttttaaaataccattcatctaatgtatttatttaaatattaatttta

SEQ ID NO: 310482 - DNA, 969 bp, Cannabis indica
tcatactcgagttacgccatactactcgagcatatttacaactaaaaagtgcatgtccaacatattcccatacttgattacaaacagagcaagttgagtttgtgattacctttcttcaaactaaagaggtcgcaatcagaagagcattgtggatagatagccctccatgcaaaatttttaactttcgggggaaaatgcaaagactagaagaactttcaacaagatgaagctaagtgtgaactttaactttgatcaatttcatcatgaactgatgttaagtgatagtcagtttaaactgtgtagaaaccagagttgtgatgatgccaaattagggagtctatgttgttcaaaaaacatagcgaaatggttaaaattctgttcacaaccaagggagaaaaagttgttgtggtatgggaacattccattgtctttcatctgttatcaaattggcaacaacccaatcaatcagtccagtgtaatgaagacaaatgaaagtgatgtgtctcgagatccaaggatcaatgtcagacctaatctttctcccttcaccaattttccaacgcaagcctattgatagaagatccctatcccaatgaataccctgccaagttaaagagggggaacaacccaaagatgctttaagaaaagagctatttggaaaatattgacactttagtacacgactgagaagagagtcaggtttctcaaggattcgccaagcttgttttgccaacaacgcttgattaaagtggacaaaagaacaaaaatccgtgcctccatctgctttagttttacaaagaagattccaagaatgccaatagattttcaaaccgttttcagtcataccccactaaaagttagtcatcattgacttatgttgtttacaaaaataatctagtagacgaaaataactcatggcatatgtaggaattgattggaccactgctttgagaaggacttcacgacccc

SEQ ID NO: 310483 - DNA, 926 bp, Cannabis indica
gtctgtgaactaaaagtattagtgacaatttgtaactaaatacgatgttttagttacaagttaactttttgttatgactaaaagtcacatttaatcacaaaaaattatgttgtgactaacaggttatcattaaaagtagcagtttttttgtagtgcataatagaaattacgaattcaatattattttgaattaatttttatatacaacttaattaatatattaatttgaatacaattttgtgtaaataattgaattaaaaagaacactatataacacaaggatactaaagaaataataataagtatattaataattaatgcatattacataaaccttttctctaagtcaatattattattaatattgtacaaaaataatattacaccattgtaccccgacaatgtgagcagtacacatttgaaatttaagtaattatatatataaataaataattaattaattatacatatttatatatatgaatatttatagctgtttacaacgaaatctcatatgcatatattttttatttttcaaactcaaaatcttcacgaaatattattcaacaaaaaccaaaattgacattaaattcaaagtgagaacgcgttacaataatattacttgttcaaaaatataatctatatttttatatatgtaaattaattaattaattaattatataaaaattcatattgatctgcaacttgtcacataagatttttttttatttaattttcaatttctaccgacaatcgatgaaataataattcacacaaaaaataaactttgagatcataaaaaaaatattaaatctctgacaaaatttaactgctcctcaataataaataaataaataaaaattattgaaaatattttaaataaataaaaacaaagacttattattattattattatttattatctt

SEQ ID NO: 310484 - DNA, 2006 bp, Cannabis indica
aggtttgcataatgcaaccctattttcatttgcgagaaaaatattttcacgagtttcatttaactcggtgtatactgaataaattgaaacatatttgtcttgctttttctatttcattttatttaaagatgattctctcgagtcttcttttctttcggtatttgaaccacttttatcatctattttagttgagacgacacttgttgttttcctactcgtgttaggttttcctttcaagatagttttcaacagcttcatctcatttatagcttcttctttacgcacaaatacttgtcctctttgattgaattcattaatgttcctcactgggcgaccctgtaggtcatcccataactcgcctccaatcgtagaaacgtcagttgtgatccctgcctaaggagcagtaagctgaatactttcatttaggtttctaacctttgtagtggatgtggtgaagtgactcaagtaaaccttaagtgactcgcatggttgttgctttatgttggttaaggacgatgctttaggtcgcttgtctctaacaacttgaaattgttttttttaaagtccttggacagctgttcctaagacgttatagaatgatgagtaaatttgtcaaaccagctacttgcatcttcagttaaggaagtcgggaataagatgcaacacaaattattcgagacattgcttgctcgcattatagtattaatgttattcaagtgagcgactggatccatagttccatcatactatgagacatgcgagtttttgaatccttgagggaattcacaatttaaaatatcaggatgaaacgactcggtttcctcatccgagtcgtaaccaggcaattttccatgttctccatcctgatactttctctccagttcaattattcacatttggatgggatctacctcctgttgatttgcattctgattaagttgatggtacaaattaggtgcattttgatgcactcgctcgtgaagattgggttgtctttgattcaagtgctcacaaagattaggctgtctttgctcgtaattactcacagaccttgtctccgagtaactctcagatttgtagcttcgcatattactcatgatttcttggtcagcataacgtcgaggtctagttccctctcgcatttgcctacccgatcgactatgtcctcgagaccttgagtgtcctgaactagaacttgcttcatcttgtatcggccttctactttgaaagaggttagatgccttctatttagagtgtatacatcctctctctctctctctaatcaagaaggacattgagggtatcttgaaggtagtccacttgtcctaggttggtttccatggtttctttcattgccacaagggatccctgattcccaagtcgaggctatcttgcgtccccattcctgtgagaagcttctagtataccattttgttcgttcccttggttcgtaaatccttgcgatcctttaggaacatctcaccgttgctcttgattatttgtttgattatctattggaacatcccttttactcccaagttgttcctgggtgttttggagatttccctggtttgtttttagtctcctagttctagaacctcgagctctgcctcgcggtcttcttaccgccggatcaggttaattctgaggatttgttccttgggtcgccctagccgctgtagcctctctttccaactcagcgttttgtcagttagatttggctaagcgttatcagagttgtctattttctaattccactaatggtacatacctaattggatcataagcatcctcacttctaggtacgtatttagcagaatcattggtatcttcattccttctttctgaattttgatagccaccaccatcatttctccttgattgtgatgttctagtggtatggggtctttgagatcccattggctctttctcagggtgatgtgtagttttcttaggataatttccatcattttgattgttttcagccattgaatatggatagattt

SEQ ID NO: 310485 - DNA, 1045 bp, Cannabis indica
acttataaaaaaaaaaaaaaacatcatttatacttaatagaaatgctcaaatacttgtagtatgtaatttcatgtaattaatcacatattggttttttaaatggcaattattattattattattattattattattattattattttatatataaagggtcaagaagtgagagtctagtgtatggtgtttgatttaactcatttaaaatttggataggcttttgtagtttgtaccatccttataggttatgtcaatagaagatattcatggccaaaatataattaatgaacatgattacccatgccacacatatatatgccactccaccaatccaaaataaatgatattgtagtgacagagtttttgacattgatataatttaatatccaatatttgcatatttaaataaaatttatgaaaagaaaaatcataaaaaaaaaatgtataaggttctattaagtgatgttgtaataattttagacccaattttaaatgataacttaattattgagttaaattaataatgtttagtgtcccattatttttttaaaatttattgggttttaccactcatcatttgtgaaaatatggacaagattgatatacctttccaaatttgtatggaatttttttaaaaaaaatatgggaaaaatattaattgagagtaaaattatggataaattaacccatctttgtacaaaaatatagaaaagcaaaattataaaattaaaaattctacagaaaaagccatatttttgcgaactaattattaaacaaatctcccataacaatactaaaatttaaaaagatattcctatctaattataccaactcacaataaaaagcaaatagtgtttttcatttaacctatatataataatataataaaagttaattatattttcctagacctaatatcgtcggatccaaatctcaaactctgtaaaataattagtcaaaaacactaattataagtcttcccaacccacttatttaccataaatatataaatatatgccagttcattcccttgaatgtgttcat

SEQ ID NO: 310486 - DNA, 839 bp, Cannabis indica
ataattgggaaacaatctaagttttatatggaggagtatttgggaaactcaggatatcgttcggaagggcataaggtggcaagtgggggatggcggttcaatctctgtcttgggtgatccgtggttgcctgatgttgataaaccgtatgttctttcatcccatccaggcttggaaggggttaaagtttgtagtctcatgcgcttgaatgaaagatgttgggatatggagattttgcaggacatgtttggggatcgggatatcagattgatcattaaaattcctttgcaagtgtccccgttgtcggatcaatatttttggcatatggagaattcaggcctttacacagtcaaaagcacgtacagtcttatcgaacagagcaaggggttaatctatgaggacagcttctccattttttggaagcacttatgggcattgcgcattcctccaaaggtcaagaatttgatttggcgtgcaggtatgcagtgtcttccaactatgtgtcaatttcttactaagcgggtagcagttagtgcggtagtcctatgtgtgaactcgaggaggagactatccttcactgcttgtttacttgccatcatgtgcatccttgttgggacagggtagggataggaactcagatatctgataatcataatttcttatcctggatggcttttctttttgagaagttagaggttgataaaagggggatggttgctactcttttgttgggctatataaaatgccggaaatgagctagtgtggaaatagaaaagtgtaacaccctaactagcataggcgtgtttacgtgatttttaaacgtactatgcagctcgttgct

SEQ ID NO: 310487 - DNA, 543 bp, Cannabis indica
tcatgctagaaatgtcatttaaagagtggacctaaaaatgatatcatgtgaataaaaaaataagtatgtggaaatttttttgaagaaagtaaataaggcaaaataatattttatttttattgtcaattgatttatgaacgacgtgcaacatcattaggtctggttgtgtcacaagaccactgagaactagagagaaagggataggacgtgatatagctggtagattagaggaaagggtttgtgacactgatgtaggagattaaatcgaattgaaaaattcacataagattaaattggaacaaattgaaaacctaatttttgaaattggagatttattttattttgtttttttataaaggagaaagatgggtcaagcggttctgtaaaaaaataattaattattcaaaaaattattttagaatgaagtctaatatttgtaaaaaaaattattatgtatattataattaaatagattgacaattaaaaaaatttataatagggatttgaatataaaattaaaaataggagaattactccatatac

SEQ ID NO: 310488 - DNA, 777 bp, Cannabis indica
gctttcaaaatttaatcatggcagagtccattaacgaataattctctttcccaaactcctttcattagagctacttgctctaaaaaatggtatttttggggttcgtttatcaataaataaataaatcataaactatattaagcaccttgatttgcagttattattattattattattaattattattataacatttacaaataaattttgtaaaataatatttagcattattctatattgaagagttaataaaccttttaaaatattgtaaaactttttcacaaaaatttcacaatattctttttcaccatcattaattattcccctatacattttgatagcatcagccctattagtatggaagtcttttttttgttgctttctttagttgatgaatatggaggaagtggattgctctaacactacacctacatacttgaaaaaagaaaccattaattacataaaggaaggtgttaagcaagcattgattatagtatatggaacaaacacaacaccaacaactactatacagatcatcattatcatcacaccactcttctccatattcatataatatatatattatgatcaatcatcacctccacacaatcaagatcaagtgctcaaagagcaaaacaaatgaacatcaatggcagcagaatgctgcaacagtaaactagtaaaaatcagggacaaaaccagcaaaaagaagttgaatgaagtgtgttgatttttttttataagtagaggaattacattgagagagagagagagaga

SEQ ID NO: 310489 - DNA, 703 bp, Cannabis indica
tgtcacacttgggggcaacacctatacggagcagtcaagtttggattcaaagcttctaataatgaagcagagtacgaagccctcattgccagtctaaaacttgctcgggagttgcatgttgaacacatcgagatctgtagtgactcacagttggtagtgaatcatgtgtctggagagtatgaggcccggggggaaaattgataacctatttgagcaaaatacatgatctgcttgcacaatttaagagctatgctctcaggaaaattctaagagaagaaaacacaattgccgacgcatttgcccgatttgcgagcaacaacatagctgataagtctaatttagtctcaattaaattccttgaagtgcctagcatcacctatgcgggagaaattgaaatgattgacgcagctccaaactggatgacaccaatagtagcctacctcaacactggagaacttcaaaatgacaagaatgaagctcgaaagataaggagaaaggctggacggtatatcagcataaaagaagtcatctatagaaggggattctccatgccactacttatatgtgttacacaaggagaagctgcacggcttttatctaaggtaaatgatggattttgtgggaaccacgcagccggacaaagcctatcaaagaaaatactaaggcaaggatatttttggccgaccatggttgaagattcaaa

SEQ ID NO: 310490 - DNA, 3780 bp, Cannabis indica
tcaaagagatctcaatgtgacacgagtcggtcaccatgctagccaaattcatccactttcgcaagcacaaatagatcaacttaaaagcatggtactaggcctgaccggcccaaaacacacagatctcaaacacgaccgggcacgaggatcacccttctcacctaaaattgatgcttttgacctacctcaaaagttcaaaatacctacattgaaaatgtacacaggaaaagaagatcgtttatcccatttgaagtactttgaaatgtagatgacctttagggggtaagaggcaatgtacggtgcaaaatttgtccagccactcgtagaggctgcccattaattggtatttcaaattacctccaggaaaatttaattcgtggatttctttctcctctaaattccatacactattttcttcctcctgtcagcttccctcgcacttagaaaacctagtaaaagtgaagcaaatgcccggagaacctttaagggccaatattaggaggttcatgactgaagcaacaaaagttaaagggctaactcaagagagaagattagcagccatactgggggcattgagcctctaggagaattatagaaagatatcaaaagattaactatgggatagatggctaaatttttggatcgagtaaatggattcattaagcccggagcagtacaatgtgtggatacagtaggacaaaagaagaataaaaaacacaccactacggtcggtgcatccacccaaaattcacagtgtcttagcagtatgaatccaaatggaaagaggtctaacaacagcaatagacacggtaaaggaaagaaaggcaagttcactggcaacaccaaacagcattctagagagaatgattctaaatttattacatttatagtcctaacagatgatatagaaacaatctatgcaaccattgagtctatggttcggcacaagaaacccttgcccatgaaaaatgacatgggtaaaagagatacagctaagttctgtcgttttcatgtagactacgaccatgacacgaatgaatgtaacaacttaaagcgagagattaaatttttaattagataaaacaacccgcacttacaaaaatatgtcaaggctgaccaagaaaaaagggccacccaggcagataataaccaattgatgcctccaccactggacgtgcatctacaggtaatcattgggggcccgcacctcgctggagactcggggaaagatagaaaaaagtatgctcaagccttgcagcatgaacaaaattacacaaatctggccatggaagaaaggaaagaataccacttgtaggggaaccaacaataacattcattgaagcatatgctagcaatgttatcttaccaattaatgatcctttgatcgttgaggtacatattgcgaacaagatggtaaaacggactatggtggacaatggagcttcctaaaatattctattcaagacaacctatgagaagatggggctccaagttaaatactcaacttgtctacgggttcttcggccagagtgtagaaccacttggacaaattcgcctaccacttacagttggacaggctccgaggagcataactgcgtggcacaattcttggtgattgatgtctcgtcaacttttaatgtcatgttaggccgaccagccctatatgacttaaaagctatcacatcagtgttccatctatacgttaagttcccaacaaaacaataagtggagtaggctatttaaggagaaatcaaaggatcacacgagaatgctaaaaccttgatttatctaaggtcaaaaaggaaaatacctccaaccagagtttagacaaggggaagagcattgcccaataggaatctgcccaaggcgaggacgaaatcatggatcccctacttgggaaaacaaatacaaatgtatggcaataaagaattagaaaaagtggaaatcgatccagctatcccgaccaagaagctcaaaatcagtaaaggttttatgctcaaaataaaattagccttaataaaaattttaagagcaaaccttgacatttttgtctggtcacatgagaatatggtcggtattgaccctactgtgatgtctcacgccgtgaacattgatctagacttccatcccatctagcaaaagagaagactgctagaaaaagaatgtacacaagcactaaaaaaagaggtagaaaggttgcacgcaaacaagttcatcattgaagctttctaccggtttgggtggctaaccacgtacccatactagtacccaagccaaataaaaaatggtgagtatgtatcgactttaccaaccttaataaggcctgccctaaggactgttttccacttccaataattgatcaattagtggatgcaacagccgggcatgaaatcctaagctttatggatgcctattcagggtacaaccaaatcagaatgcctccacctgaccaagaacatacaagcttcccaataaattttgatctacactgctataaagtaatgttgttcaatatgaagaatgttggggctacctattaaaggttagtgaacaagatgtttagaaaccagatcggaaagtcggggaaaacagatcaatttcctttttctctctacaatttcaaaaatttatgttcaagaagagtaatgttctaatttctcaattcaagtttatttttatagtagttaagtctatttaaataaatcatatttaattgtttgaataaataaatatctataactgaattttgttactgatatttatgagggaatctctaaactacttgagagaatatctcaataaccttgaaatatctataaaccacttttcaaattagatatttaccgaattaaattaattaactcaaaaatacaaactctatatggataggacataggctaagcgcgtaacttgttatttatgacaatgttggtttcttttgtccagacaacttttgtcttaaaaaatcttatctccacaaattttgtcttgataatttttatcttttccctatttaattaatttaaaaaaattatttacttattataaaataaataattaatatttttctaatttaaaatatatttttctgatcaactttatacaactctttatccttacccttgatagtattttaagatggcaattcggggaccataaatttataattctaaggtccaataaacttgattatttattgaatctcatcaaccaaataatcattgtttattaattccatgattactctactataaatatagaattgaatgcttagtaattatagaattatatttaatgagtttaactgcggtgcctatttatataattaattctagtgattagccctctatgtgttgattcgcaattattgttggtcaaattactgttttacccatttgattacatctttatcctttagtaccatcaattcactggtggaagtataatttgttgggttttgtgccctaaataaaattcatttcaatataattagatttactaattaataaaagatcagaaattacttttatgttgcatgattcacatgatttatttcatgattatatttaatttataaattctattaagtccataacatatataaatatgtatatatttgttcatgattatagtgtcgctagcacaatagaagataatcatgattatatgttcaaaggtttgatttttgtgatttgtcagttcattagatttagactggcatgataatggcgataaggtatacttacaccttagatacgtgttatgtcctttctagggcat

SEQ ID NO: 310491 - DNA, 786 bp, Cannabis indica
tagtaacattatatagcagtatatatttaacataattttgctcttttgatatttgtgaagcaagcgagagttcatctgctcgacagagagccctttcaggatgcttttggaccaaagactaagaggaagcgaccaagactcttagctgctgattatgattctttactcaaaaaagctgatggttctcagggtaattattgctataagcattctactctttattagattctattaagtactgattgcttttcctttcatttgaggataattttttttgtggtaatgtgtagatgcatttgaggagaagcatggtgatgatgtcaatgttgacgaaggtgaaggggatggattcagagacctggttcgacataatatgtttgagaagggtcaaagtaaacgtatttggggtgaactctacaaagtgatagattcttcggatgttgttgtccaggtgtgtgtacttcactctagattgttaacttaatttgattttaattcaattagtgatgtagaagcattgccagttagtttagtgccagttcctgcttattagtgatgtagaagcatcatcagtaaatcactgtatcttagtgtactatattagatagttttctgctgtcctaccatatatgatcatcttaaaaaattgctaattcactattgaatgatttttttatccttcattctttctctaaatttccttctcatttttcattttacaggttttggatgcgagggacccacaaggaacaagtgtcaccacttagaaaggcatttgaaagagca

SEQ ID NO: 310492 - DNA, 3463 bp, Cannabis indica
ctgttgcattctcttctctaggaacttgtcttatagtatagcctttgagctagcttaatagtgatgctcaaataggctatcattttttaccttaggctgtatattcacctagaacatgattaatgaccaactaggagtcgttgtatatgtctaggtaatcagcccgcacattgtgttctaacttgaggctagcaattagagcttcatattcaaccttattatttgaaactgaactttattgcctcgtgcagttgttgccccctggtgtagtgagggcaatgcctgcaccggacaggtggtcagtatagcttccgtcaacatgcaacctccatgctgaattttcttattcttgcttcttctcaagctatttcttttctcctaattcttgagagatttcaggagatatacctatgcattcaaccacaaagtcaaggagagcttggccttttatagccactcttggctagtaagtgatctcatattggccgagtttaatggcccactttagtagttggcctgatgcttcaagtttctgtaatacttgttgcaatgacttgtcagtgtgcaccctaatcaggtgagcttggaagtaaggtcttacctttcttgaagctaagagcagacagtatgtcaacttctcaatgagtgggtatgtactttcagcgtcaataagtctcttgctgacatagtacactgggtgttgaacaccgtcttcttctttaattagaactaaacttacaacatattctgttacagccaagtatatgcccaatttctcattgtctagaggctttgataggataggaagttgagatagttatttctttagctcttggaatgttgtctcacacactcaaatttcttctttcctctaagtatgttgaagaaagggaaacatttgtctgtggactttgacacaaaactgcttagtctgcaatacgtccagtcaagctttgtacctcttttatctttgttggcaatttcatgtccaaaaggtcttggatcttctcaaggtttgctttaattcccttggcattcataatgaagccaaggaacttgactgagcctaatcaaaaagagcacttaaggggattgagcttcatgatgtactctcagaggatcttgaagcatttgtttagatcctctacgttccccaagccgttttggacttgactagcatgtcatccacatagacttccatattgcagccaataagatctttgaacattttatttacaagtctttgataagtggcccatgtgttttttatgtcaaaagtcatgactttgtagcagtacaagcccacgtccatcataaaacttgtatgttcttgatttgttgatatattttgattttattgtaccttgaataggcatccatgaagtgtaggatctcatgaccagctgtagtatctaccaatttgtctatcctttgaagtggaagcagtcctttggacatgccttattcaagttagtaaaatcaatgcatactctccacttgttgtttggttagggcaccaagacaagattggatacccagagcaggtagaaagcttcaaggatgaatttgttggtactcggtatttcgacttcatcttttagagcttgtgcttgctctttatcaagtaacctcctcttttgttgtacaggtcagaagttgagatctatgttcagggcatgagtcattacggatgtatctattcccaccatgtcttcatgcgaccaggcaaagatgttgaggtttgctcttagaaattttaccaattttgattttatttcttatgttaaacccattccaatcttcaatcttgtaattagaagagtggggtcaatctctacttcttctaacttctctaccattccaaagttgtcagcaggatccctaaagcgaggatctaagtctacctccccatttttggttgtgttgacctcgcttctagccaatgacagtgagtcaaataataaagcaattatgttatataataaaaagagaacaaaaggaataaactaaagtgaacacaagattttaaagaggttcgaccccataagtgtggtaatagcaaactccccttgtattgtatagacttaagagaaggagagaagtgttcttcctcttgaaagctcttacaacgaatctctgagtgtgtttctctcttagatcactattttctctctagaatatctctctgtggcaattctttcgatccctttcatagtgaggctaggtcactatttataggggcttaatacatgagggatggtttccctttcgcttacaatgcacaaaataggaaattacaatgtttctaaaactatgatatatgaaataggaaactagaacaagtttccatttcctctaatcaatcccatgattatagggatcgtcctcatgtctggacacaatgagattattctctgaagtagctatcttttgtaagatgctcggcacaagcactcttccatctggtcggacgtcttctccacaaccctactcagataaccgactattatagatgctgactagtcaggtgcaggctgctagggatatttccctccgcccaggtatcgaaaatatataggacatgtgtggtttgatcatatcgccacgtcaatgtgcaaaaaacttgataacatgctaaacttcattgctttttgtcagacacttagttacagttcttggcaggcatcttttctttcttggctttcgacaaaacaaagttgtaggagtgtcgggcagattattgatctccccttaggcaccctaccccacgccttgttgggaactttaggcctaggtggtaaattaacgtcactgccttcaggttgtatagggctagctgagttatgcctaaagttcccaacacgctaatggtaacgagtatcacttgtcatattagacaggtaattatgtatcaataaatgtttataaacttgtgattacctgagtttaaattgatggtatttgtgcactaatttgttgtattatgttaatattttttttactgagtctttgtgactcacatgtgctatgtggtgcaaataaaagttaaataaaacatttgggcagtcatgagtcagggatcttctttggtaaatgtacacatcagtcgatctgcaagtggagccaagttgtcaagattcatattttttcaatgttctgaactttaaaatgtagttttttgaaataataaatgacatcttttataatattttagaggggattccaaaacataaaagacttatgtcaataaattttatgtttcaaattaattagcaatattttaattaattcataaaatttagttaaatcgttactttattctcattaattgatttataaaactacacacgtggtaatcctaagtgtaatgccccgaccctcaaggacgccacgtgtgtgtgcttttacgaacttattcatagttattatattagtttatgaaaagtggggtttaattaaaaac

SEQ ID NO: 310493 - DNA, 914 bp, Cannabis indica
tcatacaccaaccaactaaactatgaatatttttttattttttattctggccccccgaaaggtgtgggctcaaggcacgggcctagcctgcctatgcctagggccgaccctagtctctagcaccctcctaggtactataatgctatttgtgtaattaagtatcgggttctatataaattaattaaataacttttaaggaatatcactaactatttacatggtgacacctctaaatggtactaggcaccacaatataatcatttgacaaaagaattctcattacataggttttttttgtatgagtatgttattaagtatacttcttttatggtgcatttaaaaaaatacattcgaggtggaattgtatttaaatcatgttaagtactaagttttaggggtgtaacacgagaactttctagaaagtccttcattctaatactactttcatccaaacacgcttaattattattaggttaaataaaaaaatttattattaatttttacacatttgtttaactaaataattacataattaattgaaagtaattgaattgcactattataaaaagtactattatcatcagccaacacgttggtcaactattgactgacacaattgatcacgggagagaggagatgtccttccttaatcgacacaattcagtgatcaattgcaacacaattaggtgataaattgtgtcggtcagaacactcacagtaagagaaaagttgatgggattgagtgggagttttttcaaaaaaaataaacaacatatatgttggttgatcacagtcacaaaggatggttgcacctctgctaataaccccctcgaagggatcagatcaattcactttgattgtcttctccaattcaaatttaggactggccattttctctgttattttctccgccc

SEQ ID NO: 310494 - DNA, 1002 bp, Cannabis indica
ttttatattttcatttctatagagttatactctttaatgtaggcaaatgttagcaaatttaaggtctctatccaatttggttgtttgatcgcaaattattgttatgctaatatcattttgcaaaagaactttcttctaaaataaaatgacactaaaaaaggtaaagccaaagttgagtaaagtgagagaccagtaagtggccttgaagggtaccacttccaaagctaaaagaggaaagggattgcttttcctttcccttcttcttctcatccacatacacaaccttaagtggcatcatcacccatggcagaaactctttcacacaaacacaaaacttttctccaacttgggttcgagttttggggtccacaaatgcccaatccaacccaaaatgcctaaatatcaaattcagatgattcataacaaaaaagaaaccattttgacatttatacaaacatgttacatacatacctccaagattggagagcattcttgcccttttcatatgtgtcaatgccagaaccaaccaaaacacgtttgtggtttaaaaaaaagccatctttggagagccctttatcttgtttgagggaattaagtgggttagcactagctcctatgtattttgcatcatagttcaaactatctgatctgggcatatacataacaatcattgtaagcttaagttgaatagtgaaaactgtaaagtttgagtctttttagtatttataattaagttacctgtcaatacaagatttccaatcctcaggagatggccgagcccagctgaagaaaaccatgttcctcaatttggttaagattaagaagtatgaacccctatctaatgatttcaagttataaaagaaagagagaagggaatttgttgcagatgagtcaaaaaaaaaataaaattattcattagaatataaaaatctatttagaagtaatattaatagggaaatttggaaaactatacattaaaaaccctaatattttatgcttaaa

SEQ ID NO: 310495 - DNA, 629 bp, Cannabis indica
taaaaaattgtaaaaaataatttagaaaaagacaaaaataagtttttttttttttttagatccatttatatcactacgtagttaaacaaaaactcttatgagttattttgatttgggaaaaggccaataatgggagttgaaaactttagaggaatatgggatcagcaagattccgctatagacggccgaagagggaaacatgtctctttgtcatttcacatttgtcattattaggatcgaatcgtaccaacagcacaactttgatatcaaactcctaattattgtcttattagtgctacttgttttttaatatttaatttacgcaccactaaccaatgcacttcttctcttaatgattcaccaaactgtcattatagtttaaatatattatattgtattatattatatataaaaatcatttccccaatgtctttttgactttagtcttcatcattgaaatatatcttgaaattactttttttggtagggtgctgataaaaaaattatatagcaccaaaaaaaaatagcaccaaaaaaaaagacaataatatatataccctttgaagtaggaagagggatcaatcatagttacatttttttttaacctattactattaaatggttgtgat

SEQ ID NO: 310496 - DNA, 936 bp, Cannabis indica
tgaagcggggacgttacacccacagaataatattatggctagcaatgcttgaaagacttcagagaaaataaaggcttttccgattttagttatgttaagatcagagttgtttggtttgtggtctcggtagtactgtggagcatctttctttgagtgtcattatagtcaaagatgtctacattaaagaatggctgggatggaaattttcaaatgtaactacttgttgaggtggatagataaatttgttttgtcttcttttcgaaagcaagtgtttttgccatgaccaccgctgcagtggtctattaaacatggaaggttagaaatttattattgtgggaatcaaaggtgactaatatacctacagttatatactatataaagcaaaacataaaaaaatagattattaatgattttattaaagaaactcaaataacaggatagattatcaatgattttagtctgaacaattataaataggaatttttgtttgtatttagtggtgttcactgttcaggcctttatttatgagggcgctgctgttagttttgtaaatgagttttgatgcaatacaatttctactgccgatttagaaaataataataataataataataatgcttcatttctattcaaaaaatattaataacaataaaaaataataggtagaagtcatcatcatcgatattccactcattacactttgcccagattgcctcaaatatgtatggccaataattttcctttttttttttggctatattaataaatatagatataattgagcatgtttaattgattggaatcaataatgtaataaaatcaaagggaccattataatgtttagtttgggtttttaacttttataatagaactactaaacaattcacggagaaagcggatgtttaaaatttttaaattacatatataaaataaatt

SEQ ID NO: 310497 - DNA, 1557 bp, Cannabis indica
agggcataaaacccaacattgttgaccttggataccaaggcccgggattcacctgggttaagggatcaagtcgaagcatggctgctggaagaggttgtataaaacgtgcaagacttgacagagggttagccacagcagattggagaattcagtttcccaatgcaatagtagaacacctcttggcctctgtttccgactataggcctatccttcttgatactacaggaggagtacgatgccgtagtcgtctcttcaaatatgaaaatatgtgggctcgtgacaaacggtgtttttgggtggtcaaagaggcatgggcgaagcgacttcatcataaccctttggttaattttcacagaaaggtcaaacaaacttgtcgcaaactcagcttatggaataagaactaattcaaaaatatacaaaatcaagtcaacttaaaaagattggcccttcaagaggctgagagccgtaaccaggatgatctcttggccattgatatggctaaacatgaacttaatgaagccctcctaagaaaagagatccactggaagcagaaatcaagggtccaatggctgcaagaaggggacatgtgctctaaattcttcatggcatcaacgaccataagacggagaagaaattatatccaatgcattaagaagagcgatgacgggatctggataagagagccaaaggaaattgccaaagcgtttattgagaactactcccagctgttcaaccaaaatgccctttccagtatgccctcctccaatagaatctttgatccctgaatttcaaccaaggattgctgcgatcttaccgcaatcccctcggccgaagagatttctacagcgctgaatgagatgggtcgggataaagctccaggcccggatggtcttcccccaagcttctattctcatcattgggacactgtgaaagaggacctgaccgagatggtgacataattcttcaaccacggaactctgcctcactatatcaatgacacatcctttgtgctcattcctaagaaggaaggccctgcttacaccaaagattatagacccatagcattatgtaatgtctcctataaattgatatctaagatccttgctaatcgattgagatatttactacccagaatagtttcacctaaccaaacagcttttgtcaagggccgaagcattatggagaacacaataattgcaagggaaatcgtttattcaatgaagaagaaacgaggatcgagaggctttatgatgataaagattgatatggaaaaggcctatgacaagttggattggaacttcatcatacaagttctctcttctctcggattccctcctccgttcttaacttggatcaaggcctacatcaccgttaaggagattaagctgcttcttaatggttcggtgatggggaaattcaaaccttcttgcgggttgtgacaaggggattcgctatccccctccttatttatcattgcggaagaaactctatcgagacttttcttcgaaatggaaaataagaatcggatcagggattcaaaatgggaagacaaggtga

SEQ ID NO: 310498 - DNA, 1680 bp, Cannabis indica
atggaatttgttggaaaacgtaggttatgaaaataaatctagtttattaattgtaaacgtttttttatttgaatgtatcaacaaaattatttgattattttcgatgatgattcaaaattgtgtttaagaaatgtaaacaggaaataacttttgttagttttcaaaatacatgataggttaggttaatattttcttaaaaacaattttcacacctcaacaagaacccaacccaagccgacacagactctagacgtcgagcctggaccccaaaccccaacttcagacctagcctcaacggccctaaacctaaacttggaccccggacccaaactcgacaccgaccctattgaactctagatcccagactcgatcccaaaccccagtcctggactaaatcgccaaccctagaccccaacccccgaacctggctcgaaacccggatcttggacccattccggaacctcgactaggactaatgaagaagaaaaaaataggtaataacgaaaaaaaaatcaaaactagaaaaaacaatgttcccggatttttttttaactaagttttcaaaatatatggccaaacacccactattggtttttaaaatcaattttatagaactatagtcaacatttttctttcattttctacaagttttggtattaaatcttacataacatagtaacatacttaccaacatttgcagcagaaatcataccaagaagcgaattgcgaaaattacttgcccttcttcttctgttgctattgttattagtatcactatgagtactgctgtcctgtgagtatggttccattgcatagtcactcttgtgctttgaaaggtccattggtgtttgatagggcattggtgatgcattattactatgatcacctctactttgaaacaactcttttatgtcttcatggccttggtgatcagccaaagctcttggtgtccatccattgttatccggtttatcgatgttagctcctttctccaaaaggaaactcactatttcggcatttccttcacaaaccgcagcgtgaagagctgtggttccgtcgatctttggcatcgtcacatcgtagccataatcggcgaacattcttagcaattctaagttgttttgttcaactaaaatgcatgcaaaacgaccgaaatccctagaaggtatctctgcttcattctctaggagaagtttgattattgcttcattctttccttgtattgcttctccaagaggaacatttcccaataaatctgtagagaaaatgtacttaattaagagatttgattgtattgtgtgcatttatggtaacatatgcttatgattattttacctgttgcattaggattggctccatactctagtagaagaactacacaatgctcatttccattagctgctgcaatatgctgttcaaaagcagaatagtaattttcttaagagaagtttttagtttataggataaatacagaatagtaattttcttaagagaagtttttagtttataggaaaaatattatttcgagaccatttgtttaaatcaatacttttcctaatataactatcctgaaatctgttcctagcaggaactgagacaaaacaatgtaactagtctggtcataataatacgtctaaatcaagttattattaagttttaatttaacaaaactaaaaattt

SEQ ID NO: 310499 - DNA, 812 bp, Cannabis indica
tgctcttcacttgaaataaaaatggtactcttttccttctgacacttgtcagttttgttgataaaatttgtaatctacatattttggttttttttgatgaatcagaattttcattactctacaaaacttatgactttacaaatataagcaccttccaagaaaaaaggccttaattttagctatatacaaatttcttataacaaatcaaaccaatctttatcactttgtttaatcttttttggcattacaaaaagtattctactctttacaatccacttcacttgctgcatcacttcagagatccctatcttttttccattccataatagttcattccgagtcttctacaactgatatacaacagtagcaacaccagctaccagcacactttttttaaacctggaacagcttgctttcctcacccatctcattaaagcttgaagtgaattagccctactcttccatccaaaccagaccttcaaacatctctaaggcattctgcagcaaaatcacactcaaaaaataggtgatttgctgtttctgcagcagtgttgcagaagctgcaacaacctgtgtcaatcaacccttgtttgagtagtcgatacctggttttgaatctattcagcatagctaaccataataggaagctatgtgtaacgtccccgcttcaagcctccattgggtccttacacccacggaataatggctcttatacacgattacgtcactttggctacttcctggattgatgactgaccctacagaccaacacgagtgttttcagcgtgctttgtcctcactcacacgcatcc

SEQ ID NO: 310500 - DNA, 1072 bp, Cannabis indica
ggctctatttaaaaaaaagaaaaaaaaaacaaggctaagttattatcatttgtttatttcttattattaattttgggagggaccaaacttttaataaaaagatttggaatcttaggtgcgtggttcaaattgtcttcacttttctactttctaaatgagcatcacggcaaactaatacttggattggatatggatataattgtccagccttaaaaaaaaaagaacgatcaagaaaaaagaagatattatgatattaagaaatgctaaaatgcattattagtgtctaggacgctctttaatgttatattgctattggtctaattaagtatcagatctcgtataattttaaaaaaataaattttaaagaatatcaataactaattataggacgctacggtgatggacaccactatacccaataacaatgctctatgaaattagctgatattacaaatatagcattgctatgaagcattcatggtgcctagcactacaatgaagtgtcactctataattggttagcaattttctataatatttattaaagtataacgagtgagacctgatattgagttgtaccaataacgatattacacctcacaagagtgttaggtaccatggatgcccttcatttttcttactaataacaacattgctatattaggtatcatatggtgtccaacaacatactgatgtggcgcgttgcgattgattaacagttttctatattatttattaaatcaaattgtgtggcacctaatattaatttatattaataacaacatgtcatttcttgtagcgtttgacaccataaggtgccacttaacatttctccacaaataaatgattggtgaaaaatgttgagacaccatggagtagatttatttatagagaaatgctaaaaacgctaacggtaattaagtgctaataattaatattagcaagaggtgtcatactgttagttattagtgtaatttaatattaaattttttttatatatatatattttaataaaattaaaaccgaaaataaaatataatgtgtacaataagtatatgtgatttgaatcaag

SEQ ID NO: 310501 - DNA, 2176 bp, Cannabis indica
ttcccttcttcagttaaccgtgccacttttgtggcctctgtcatgaatctgctgatgtaagctcggagaggctctcttggtcttttcctcacttcaaccaggtcttctaaatgtaatagaatttggcgagaagaagagaattgtgcatgaaattttgtagagaaagccttccaagaattgaaccttcctggtgtcaacttaaagtaccattgttgggcggcttctgagagtgtggcaggaaaaactctgcaacacaaatctcctcgtaccccttgcaagtccattagcatttcaaaatacttgagatgtgataagggatcttctttccttggacacatcttccaggtcggcatcttgaacttgtggggtagctctagaacattgatctctggagtaaacggggatccaggtgctcagtccaactcgagatcattgagcttttgaccggccaggccttggaacatatttttcagttcatccaactatgcttgcactgatcgattaacttgttcgtcctcttggtcgactagcgtcacgtcaggatctctttgagctgaatcttaaatgtggaccccgggttgagtggctggttgaaaatattgctcgtctaaccctctctttctatttaggtcatctctgagatcatgagctgttcctagtctattaaatactaatgcaccaggatgcctcaatgactgttggtttggccgagtacttggccagaactgctggtctaggcagagtgattgggtataacctaacctgatgaattaccagacaaggtctggccacctaccacttggcccataggcagaacctgcgatcggggattggactactgatcgttcagagtttggccagtatgcccagctggatttttgtttgagtcgcccagcgggatgctggacagaggttgttgattagcaacttggtaggctcttcgtatcagtatggtggcttgtcttgttcagtcatcgatggctatttgttgagctttcaatgtttccatctctctatccctccattcagtgaattgacgcctttgctcctcgaacgcaaggtccactgtagcacggagctcttcctgatcatgaatcaaagtattagtatgaccttgcatgagcccaagagcattacagaggttttggatctcggtgtcatcttaatggttgtctggacatttgttgttgaaggaatctcagtgctgggagtactcagatcagttgttgaactgatgtttccagtctcttacacaccgggtgtgattctagccaaatgagacatcaaaccttaacccccggtaggtggttgggtgattggttgtttaggattagtgacttgtgggacccttgcattccctagagtctacagtgcgagatctactgccagtggatccacctgatcgaccacgcctctacgagtttgtaccaccatcgtgtttatgattaaacttgaagtaaagagtaagtttatattattgctctcaatgaaagcatcaaaatgttgaccttacttttagccaacgacaatgagtctaataagaatcgaaaaagaatatgacttaagtataatataagcaaataagtaaagaacacagggtttttaaagaggttcaaccccgtacaggtccagtaatagcctactccccttgaattgtattaactcaaaaataaagaatacattgtttcctctctttaagctctcacaatgaaatctcttagtatactctcttagatctcttctaagtaattcttttgccccctttaccagtgagaataaatcactatttatagggctacatgcttgagggaagattttccttctgcttacaatatctataattggtaagcacatatattacatatttagaatacacagattgtgggatttggacaacttgtcatatctctgtgatatgatcccagatttatagggattgctcttgtgcttcacgatgcaaattctgaaattactaagtgttgattcgttgctaggattatccactcctcggctaggaagacactgtctgtgcagatgtatgttgtgccctcctcggagcacctctctcgggcagatatggggaattaggttcacgtgtcaccagcatctgatgccacgtcatagtgcaaaaaaagggataacaaaagaaatccatctatggactcaagtaagcttc

SEQ ID NO: 310502 - DNA, 1163 bp, Cannabis indica
cttcaagataaatacctgcccaactggaggatcttgtcagaataatgcaaacacaagatgaacctttgaaggactacattcaacggttcatgactgaggtcaccaaggtcaaaggcctgacagaaaaaggctgatacacggctatacttctggaaagatattaggaggatctcaacaaacaatatggaggagttccttgagcgagctggtggcttcatagagttagaagaagatatccagcaagcccacacgagagggcagcacaataacgaacaaacgtagagccttatagtgccccaagcactttccaacatgccgaccagtgcagacaatctctgtcgattctcaaacaatgagaatagtggaggcaagcacaacattgacggttctaaccaacataatggcaaaagagggaaattcaatgattccctaatgccatgaagcctaagggagacggaggggaagggtgcatgcttctctctcctaccaaactcccaaagcatatcatgccctgacatcccagtagggcaagtcaataattcaaggctggcctccatcttttgtcaggggcacaggcaggtgtcaacaactctgcccaaacctccagtggcaggacacataggggtcgtcattggcagaccccatatagaaggcgacaccagcaaagctacagagcactatgctcagacactccgtcacgagcctaaaagtgacttcatggcagacaatgaacaagactctaagcaaccaaagcttggagggcccacgatctctttctcaaaaggagatattccccaagtcaattcccatgcaacgactccctggtcgtttttgcacatatcgggaatttgactatggaaagatacattgtgcacaatggagcctccttcaatattcttttcaaatcaatatataaaaagatgaggctccagctcgctgacttggtaccatgtagttaagtggtgtataactgataactctaggatttagagttattttgatatctttaagcttgaattttaagctaaactgtggagtaattagtgtctataattgtgtaattgtgtttagtttgttgtgtcattgtaataaatggaagtgtgtgtgtgttagtaagtgttaaatagacttatgttgttatttttatgtgtattaagcaaaaa

SEQ ID NO: 310503 - DNA, 2165 bp, Cannabis indica
gtaaaataatttccaacaatcccgaacccccactttcatccaggttgcaatccacttgaagaacgaaaatttctcggcatatcgtatacaccgtactctctcttgttctctgtttttggcgtacgaaatctcaacttaaaaacctactttttatcatgtttaaaaccaagcaaaaagatcgctttgaatcgaagtggaacaattctcattccacaaaaatctcggcggttatacggttatacatcataccgtatatgcataagcatattaacagaacaacaacaacaacgttaataataataataataattaacattattattatacaaaataattgaatataaatgataaatatcaactttaatatctcatacatattactactattattatacttacaccaataataatatgcacccaaatcaaacaaataacacatttatttaatgtccagatatatatatttatttggcattatgcacatgccaatgaaatcaaatattatatcatcacaaaaaaaagtctcatacatatttaaacccataaatatgtaaaataataaaaatactctcagctaaaaaaaaatataaaaataccctttctgagttagcgggtattacagacataaacatgtattccggagagtatggttgagtttggggttgatttgtgtatagggagtcaatttttgggtttccctgcacaaaaccggttaatcggtttgtggaacctgagaaattggtaaaccaattttatccccttaagaaacccagagaatcggtcaactggtttaccggtttgggttttccaagaaccctagttttccccaaattgttgatttttagggtatggtcatgtctttcattgatagggttattcctagtttgattttaaagtccctgagaagtgttttagcgtatctctcatcgagttttaaatattatggtttagggccttgaaaagcgtcgagctgcaattccactcaggctgactgacacactttagcacaaaactgagataggatagcataatatatatatacgcgaatggatgcatgttatgttatgattgtatatgtttttggtgctatcatggtggcacaaccattgtgttggttcggcagtacatgcatcgtactagttaagagtgatattcacctcagaaagtattaattggcgctataatagtggcacaaccattgtgtcggttcggcagtacgggcacagtactggttaagagtgggtgctattgatgttatcatagctgtacaaacatagtgtcgatcctgcagtgcgatcacagtgctgatagtgggtgatatcatggttaatagcaccaatcattgagaacattcttatccatctagtgagctcagttgttgaactcaggatggcttaaacataaagtcagtgcagcattacctttatatatgttatgcatatcttactgagtttgtcgactcatcagtttactaccttgagtaggtaagggcaaagctaagctgaaggatcagtgagttggagcttggcagtgattgtacatatcacggcagtgtagcctggagggtttcagtctttcaacattttggagtcatattgtatggttgttacaccctattctatagggacgccaaaaataaacattagtatatagatatttggtaatacaaaaccattataccaataatgaagtcatattcatttaagcatataaataatatatatgttacctcataaagcaaccatcttcataacatcatgttgcctaatcaggcaggtcgatgctttaatctaataatcttgtattgcattgcctaaacaggcaagcctgtgccatagcctggcacccatatgtcgcataactgcatcacctaatcaggtgagcctgtgccaaaaacctgcacccatacatcatataattgcatcacctaatcaggtgagcccgtgccacaacctggcaccaatatatcgcatcgtctaattagacgaccccgtacctacgcccagtacttattatatgtcactgacgctcatacttatacccagtacgttgttaggaaaatttcatcacctaatcaggtgagcccgtacctacactcagtactcatcatatatcactggcgcccgtacttacgcccagtacgtcgccaggaaaattgcatcacc

SEQ ID NO: 310504 - DNA, 3420 bp, Cannabis indica
gtcctattcgagtcacttataccgacatcctacagtaagtcgataacttaagacatgcgagtccttaaaataaaagggctttagccttcaccgagagccagtatacaaggagccttctgagaaacaaaaggaaagaatagacaagcgtctatctaaacagacatcaacaccaacatcagataatacattgagtatatatatgttcttttatagcataaaaattatactaatcttatggctttctcgcagaaatgacgttcctgaagcaggctccaattctcaaccgaaagcttaaggctggaattgtgacaacatctcctgttatcccggagaagaggaagagtgaggttgtcgtgactcctgtggctgactcctctaagaagcaggtcaagattgaaagacaaggggaagaaagtcatgatcgaacctgcttttacggctcgcaacatcataactctccaagataagttcgtgagtaatgagcttgtgtccaaggtcaagggagttcctaccgaggaattgttgccgcgctctggagaactggcctcgcagttcatgaccatgttctcgaagggttttgtcacaggtaccaaggaggtcgatctcttgaggaagcaaaacagtcttcttcaggagaatgtgaagaaactaaagttggatgtgacctcgaaggagaaagacgtcgaggaccttgggaaggctaaggagtaggcagaggagaaggctaagcaggcagaggacaaggccaaactcttggaattgcgagttgaggaattgactcacaatcgtgaggagcatgggaagagatagtacgatcaagctatttctaactacatctacacgactttgtccaaattgcctaacttcgacttaacagtccttggagcggaagcagctgaaatagccgaggcttttcgtgctatgtcgcctacccaaattcaaggatgtgggggaaaccttttccctgcggaggccgagaacgcggatgctgaggaagtcgctgatggtgctctaagcaaggtcgcaaatgactccatcattccaggtccttaattcttctaagttctttttattattatcgagctttaatttcttttttttgttagcagtacacgggtactcgtgctttgtaccttagagaaattttatttgtttacctaacactatatcttttcgaggatatttacttttgcatatttattaagcgatacaggggtactcgcataattaaactactcttttgatgattgtctttcatattactgttcgcaatatttttatcattacagcttggttagaagataaaaattttctaaaaacattggaaacttcttcttaataatcaatagtacaatataaggttatactccctatacttagcatattcattgaaataaattgactaagtataaatacaatgcgagtactattgatattaatactataaactcttgccattccaagccctcttgattgctgttccatcgaggtctaaaaatcggtaagttgcactaccattttttttagcgatcaggtatggtccttcccagtaatcaccaaaaactccatgtgcttattttcgtgtgtttggtaataccttttttagaaccaaatctcctacttgcaaactttgttctttaactttcgagttgaaataatgatctgttcgctactgataggctacatttttcaaatgagccagatcgcgtatctcttccagaagatcgagttgtaacaactaattttttgtattattgttgatgttgaaaaaatctctccttaaagatcctgttccaactttgactggccccatggcttcgcacccataagaaagccagaagggggtttcacctgtcgtggagcgaggagttgtattgtacgaccattggggaagttcctatggccctgcaccctttctttctttgagtttacctttgatggtatgtttaatgatcttgttaactgcttctatttgactgttactctgaggatatgcgactgctgtaaaagctttttgaatccccaattcatcgcatagctggcgcatttccttacaattgaaatgtttaccattgtctgaaataaatttataagggatgccaaacctgcagatgatggcgttgtagacaaacttgcgtaatttggcggctattatggttgcaagaggcttggcttcagcccattttgtgaagtaatcgacaaagaatacggtgtattttacccctccttttccttttgggaattctccaatttaatctatgccccagaccgcaaatggccagggactagtgatagaatttaattggctccattatctgtttacataagtagctattcgctgatacttatcgcaacttttagcaaagctagctacttttgctcgcaatgtaagccagtactatccttgcctcatgatttttagagcaagggaattgccaccagcatggttaccgcagattccatcatgtacttctcggagtatataatcgcactcagtcccatcgatacacttgagtaatggctgattaaagcttctatgatagagcttgtcgtcataaatgacatactgagtggctcgatatcgctattttttggcttcatttttatcttcaagaagcgtcctattttcaagtagtcaattatcggggtcatccaggtgacctttttgactgtatcaacctccatcatctcatctcgattgattgttggatgagttaatacatctacaggaattacgtcgagtaattttgcttctcttgttgaggccaatcaggccagagcatctgcatgagaaatataagcacgaggtattctacaaatgactatccttttaaacttttgtaagaactcacaagtttaagaaagatatttggctaggcgacctcctctagccaggtactcccgttgacttggaaaactaagatctacgagtcactaaatgcttgaaggtactcgactttcatctcaagagcgagttttaatcctgtgattagagcctcatattcggttttgttgttagatgcaagaaattcaaatctaagggtagcatgtatcttaaatttatttggacttatgaggattactccaccccctgatccttctggccccatcaacatacaaagtccacccttcgctcgttggtacgtcgggatcaactcgctcatctgtgattatggccactacgtcatttggaaactcgagtatgaaatctgtgagggcctatccttttattgtcgatcttggtttgtacctaatgtcgaatggcttagttccactgaccatttgagtagtctccctaatgtttttggcttggcaaaaactcgtcgtaggtgatagtttgttaacacctcaatactgtgtgcttgaaagtatcgtcataactttcttgaagcgatcaccaatgcaaatgctagtcgttcc

SEQ ID NO: 310505 - DNA, 503 bp, Cannabis indica
ctcactctttgtaagtaatacttattcaaacgaaacgtatacttgtgtgttgcaacatatcacaacaaaaatagaagatattactctttttattatatatttaagatataaaataactaattaatatccctaagagataggtagatattttgaggttgaaaccctacttctgtgggttgttggagccgtctcatgagtgaactcgtgtgttgatccgtgcaggaggatgattgtgggcccaccactcgaatgggtcttcttaaggatcttcacctatgttggccaaccctccttttgcctagggcttgctagcacatgattatccttagctggccagggtgtggtccagccagaccccctggctagccatttccttgtaacttgatcttgtttgagtacttggatccctcgttaattgtggtgttgtgtatggtgattttgcctacctagtgacacgctgcattccatgtggcattaatcttgcctatgtggacatgccacat

SEQ ID NO: 310506 - DNA, 1148 bp, Cannabis indica
gatttaaaatttatgctaaaatatactagtaggatcataatcttacttttaacctgattatccaataatataaatataaatcttaattatttactattatacttattgggatattacaatgagggatacaaatcaaagctcatttgtgctcacagaaaaaaggggggatgactcgggctagatgatcggggatgaacgacgggactggaaggtcaaggctgaatggttggagaagaatataagagaagagctgagaaaagaaaaaagaataagaaaaaaagaaaaagaaaattatattcatttataattttaatgtttattttcaatgagaatgaaaaagagttttaagttttattttgtaattccttttatttttgtattttaatttttaattttaaattatttttatagtatttaaataatgaaaatgatgtggattaataaaaatatgtcatgtgtacacaaatacatctatcagcaattcatgttggcacttaacataatagtaaaaattaaaacagaatgtaagtttagagggttttactacaaaaatatccatttgtagggttacgtgttacagtttgtataactcaagtagtattgctccaatatccctttaatcaatacaattttatcaatctgaccaaacagttcttagttatatgtaagtatgtcatgtgtacacaagtacatctatcagcaatccatattgccacttaacataatagtaaaaccaaaacaaaatgtaagtttagaggcttttactgtaaaaaaaatctatttgtagggttacttgttacaatttgtatagttcaagtagtattgctatcaatatccctttaatcaatataattttatcaatttgacaaaacagttcttaagtatatgtaaataaataattaaatttgaatttaaaattcataaaattgaagagagtttgattatattcgtaaaatattatcaatcaaacttgagttcgtgatactaaatatatataattttgaaatataagaaatagatgatactaaatttgtattaagataaaacacaaaataccaaatatataaagtgaaaattacatgaaatatgagattttataaaaaaagaaaaaaaaaaaaaagttataaaatatggcatttataggtttg

SEQ ID NO: 310507 - DNA, 846 bp, Cannabis indica
ttatatatttaataaaataaatagattaatttgcgtcataaatatataactttaactcacaattaaatacttaagtttaatttttagcggtaataatacttaaattataattctgaaacttttgtaggtaccgttgttaagtaaattgtcacgtgataattcttaattggttcaagtcacaatatttattatgactaaaattaaattagtaacaacttatactaaatactatgttagtgttgtgactaaaagtcacaatttaatcacaaaaatattatgctgtgacaaaaatattgtcactaaaattaaccgttttaattttttgtagtgcatgtaaaagcacaacacaaaactttataattatttaaattcaatgtatgcgaaatttaaatataatcaaatatactttttcaaaaaaaaatataatcaaatacacgttcgatttgaactgtaaatagaataaaatttttattgaattatcaaatgatacaacagcaaaaatattaaacaaaaaaacaaaatattaaccaaaaatatatgggacgaatgtgtaaattaaattattgaatcaaacacaaaagatgatgagcaacacaaatctcatatctactgctaatatacgtatacatatacattattcaaaaaccactcaattaatcataatcatcaaaccattaatcctacaacatggtatgtatgatcactcataataataattcaccacaaaatataacaaacgaacttgtaaaaacaacaacaatatttaagtatctcaaaataaaattgcaattgcaccaaaaacattaataacaccaattgttgccaccatgccattcgaaaagcact

SEQ ID NO: 310508 - DNA, 635 bp, Cannabis indica
atatatatatagaagagagagagaagtgttaaggaaaaaatgtggacaacaaagaattatctaatttttatattttatatagtaaaaattttattaaattgagttggttttttaatgtaattttttattttctttcttacatttttcttttgttattaaaatctagctttcaaacataaggttaatgtttttgcaccacaaataaattcttttttctttgaaagtgcaccacaaataagttgatatctcttttagaaatcctactgctactatttactgaatttttcgaaactcaattataacaaaatattaagataaagaaagtaaaattgagaagaaaataaaacaagatttttaattggagcattaataagtcttaatctacaagtcattattattagctcttcatgaagtatcggaaaaatgagagttaacagatacttcatgaagcatcgggaatagtttgtcttattagacaaataattgaattattagtattgtgttatattagaatgatctgtttgaatatatgtctggttattgataactctagaaattagagttatttttcacatttttttaaactaaaatgggtttagttcttaagtttttaattaatttagtaagtttttaat

SEQ ID NO: 310509 - DNA, 2931 bp, Cannabis indica
aaaattcacattagaagaagctcttccttttctctagagggttgaacccactaagcatcattttcctgagatttttgcactgtttcgacgatcaaagtctcccacattcttcgtcaatggtttcatgtagtgggtaagctttctattcccactatttcacttcatttggttaatcttcccatgaatgcatggacactatttcttgctttgaacatgttttgattcctacgttagattgttctcctttcggtattttgatccgcatgatagctttagaataaataatgtgtgatttctagaagaaaaagatctgaacctgaccttcattgcaattcttggctctttgagtcacgaagaacccaatgaacacgaagaacacgtttaagctcttgaaaaaacacaagtttagattcgtgaaggtcctagccgaccaatgaggtcttgtgcaagacttggccaaccaaagagggctattagagggtctggctggccaagggggtgtacctaataggctggccaacctatgcctggaacaagggttcctggctggtcactaggctgggtcatggggtctggctggccactaaggcctggaaccctggctgagaaaggccaaggctccaagtggccaacaaatttgcttccctttattgatctctactagggtctcatgacggccttagaggcatatacaactatctccttatgcgtggttccccttgggaactctgtataaggtcttgtagtgagtccattatagttaatagtataactgaagactcactatgtgtcttaataagtgtacttaacatggtactttgtcgataatagaccttgtacattgtgattgacctggaaggtaccatttggtactgttggctagaatgtgtttgtagctttgttaggttgctcacctccccttacctcttctatacaagtcgtactcggtattgaataggggaggtggcggtcgtgctaattccatgtctattttgtaattttgcccaacacgaagtagacttgtcatagagtgtctctgtgtgacccccatgcagtcaaggtggctacaagggatcgaattgggatggtagaaaagggtactcagcctcatattgatgttggcttagagattgactgtggggctgagagtcccgatgttgagtttaatctcgaggaggttgtactggctcagagaaagatatacagaccttgtatcatcctctctaactttccttggggtcattatgataccgatggtaaccacctaaacttcatgagccttcaccacttggcttagttcatgtctcagatcagtcttttgagcctaagattctagatgcgatatcacaaggaaacaggtggatttcccctatagcttctatctcggctggcagttttgagaggacacgagctagtgggctattaggcggtatcctttgcaagttgtctctgcaggattaactagtgcatagactggccctcaactggatggctggtcagagtaccacattgagtaaggagctgtgttacctcttcaaccatacttttgaggtgttgctacttatttcaggatgtatccaacacaaatcaccccggaaggtatcaagtaccttttggcaatgtttgttctatataaggagctaggctggccacagcccactccttatgagattggatattgcattgatttggagtttgttctatagcaacatcggtttggatacttctactttagccaagttggccaccagtgactagatgataccaatagttaacctatgctgaaagttggtgagtacactaataaatacttcattgcttgggaagttaaagaggtttgccatcagcgcttctagagaatgccatttttcaagtgttttatccccaccttacaaataagggacagagtaaaccacatcctgtctctctcggcggagtagagaaatctactctgaatgactagtttggccaacttccataagtatggtttatgtcctcctacttctagagctacaggagtccagtaataaagggagtctatcttggagatggacatgttcctaacttatatgatgatgtacctttatatcgcattgcacagaatctagagaggaaggagagggctcttcgctgctgcctggccagcgggggtccgattggtgatgcttctctttagatcgggcttagaggcctagcttctgagggacctactcaccccatgcctacatctaaaggcaagcacaaggcagttgtagaggactctgatagttcctcttctgatgagttgataacaccatattttttgtcttgcattgaatttttacgattgttttcttactttgctactttctttttgtaaatatgtcttctaggctgagaggtctcactaggggaccttcaaatgagcccacgggatgagcgagggccaaggtggcccaaacttctcgtggtggggatcatattgggtcatccccacctcctcctccaccaaggcccgcacctgttgcgcagcctgcgatacggcccacaggccatggtgctcggaggcccgacagaggagcggggtcaactacagggtagagggctgttgaggtagcatcgagatagcttttcccttcatggataaagagctcaaggagcttggtgatggtgagctaaacaagctctactctactggccttcaggaccttactatagtaagttgtactttcagctttattcattttctaacactctttaagttggttggccataggttttactacatgtatggccggccttggatgtacctgtgaagggttggccagccatagcagtcccaaagaggggttggtcgaccagcgttgtaattttgacactaatgttgtcttgttttgtttttaggccttgatgaagctgagctcagtacgcgattgctcctggtggtccttg

SEQ ID NO: 310510 - DNA, 661 bp, Cannabis indica
aaattcaaatgtataaaatttaaataaaaaaaattatgaattattgataatatattaaaaagtaaaaactatgaaaacctatgaaaataataatattattagtactcatgctgtcatgcattctaaaattagacaaagactatatgttattaataacttactatatataaatattttgtcatagttacatatagtacgaacaataattatataaaatatacatataagtaatgtgacttagcagtgtgggcacggtctagtttgggttgagtagagttagatttttctaacccataaccaaaccatacatacacgggtcatgatttttcaggccaatgaaatacggcccatatttgacataacccttttgcataaaaaatgggttgggttggtcggtttggtcggcccggcccatattttgtgcaccccaagaacttcttttgattgttttcttgtctcgtggccctggactctcggggccttccccgtggtctccttgcagatggatcaggttgagtttgaggagtcgctccttatgcagccctggctgtcgctgctttttgctctaattcggcgttccttcagttcgcttcagccaggcattggcgaagttgcctattttctagttccactagtgggacatatctggttggatcataag

SEQ ID NO: 310511 - DNA, 1983 bp, Cannabis indica
tttgagcgccttggttgtcacactagatcattggtttggagtgaaggtttatgccaatttcttttaagactgaggcaatacagaccacttcagttgctgtagtagagagtgacctgtattcactctcagtgctagagcgagagacaactctttgtttgcaacacccccaagaaatcaagttgtcaccaagcttgacacaaaaaccagtagtcgacttccgatcgataatatcacatgcccaatcgttatcagaaaacccttcaagagttaatcgagaggcaggtttgaagactaaacctttggtcatagtacctttaatgtaccttaaaactctcttgcatgcacaccagtgagcaagagtgggggattgcataaactggcttaacttgttaacagcaaaagacaagtctggccgagtgagagttagatactgaagagccccaatggtacttctgtagagtgtagggtcagaaaacacctcactgttggtattgtacaacttgtaaccatgacaaatgggagtattgcaggacttagcattcaacatatcggttttgtggagaatttccattgcatatttggattgacagagatatatggcagaatctgtcctgtgtgcctgaaagccaagaaagtaactcacttgtccaagagcttttaaaaccaaatttgttgtttagatgagagatgagttgttgtatatctttggattgagccccagtaatcgatatgtcatccacataaacaagaactgagtgtcagaacttgaagagggagattgaattcctcataaggaagaataatccccacttgcattgttatgtgcaaaacgaccaatctcaggaacaagctgcctagaacagagaccctatgcaacctcaagtggtggtaacttaggagtcattattggcggaccccacattgcaggcgagaccagcaaggctagggaacgctatgctcggacactacgtcacgagcctaaaagtgatatcctagctatcaaaaaaagggctccaaataacccaagctcagagagtcgactatctctttctcaaaagaatatgctgctcaagtcaacatctcacacaatgacccctttgtcattactacataaatcaagaatatgacagttgcacggtgcatggtggacaatggagcctcctccaacaatcttttgcaatcagcatatgaaaagatggggctccactaactgatttggcaccctcaacacaagtaatgtacaacttctttggctaaggcattgcacccatagggcacatttgattgcccctgacagttggagagaccagaacactaatgacacggtttgttgtaatcgatgtgccctcaacttttaatgccatgataggtcatctagccttgtatgacctaaaggtagtaatatcatctaccacctttggtggaagttaccaacacggcatagcgtaggatgtttgagtggataccaatagtctggtcgtcattgttacaacttggctttgtccaaagccaagaaagagaaaatgtcggccaaaagctctaacgaagagcccaacaaagggcaatgaagtccagcctaaagtggggaggcagacatagatcctcactttgaagatctacagacagctttgaacttgtagaagaactggaagaagtcgaggttaatcacatttttctagctagaagactaaagattgtgaagggtttagcactaaaaataaaatcgacattgataaaaaatttaagggcaaacctggacctcttcgcatggtcacacgaagacatggtcagaatagaccccttagtgatgacccatgctctcaacattgatccaaacttctgacctgtacaatagaaaaggaggttgccagacatatatcacgcccaagcactcaaagatgaagtcaaaagggtaagggcccatgtaatatcccagaaaataaataatatttaaatagacatattttattaaatatgtaatta

SEQ ID NO: 310512 - DNA, 1167 bp, Cannabis indica
tgtgagcttgaggtatcataatagatctcagatattgctacagtgcgcttccaatctttagtaacaagttctcatagcacttgcactttcctccacaactctcgaggccaccacataaccaaaagtgcaacatctagttaatgcttgaacagtagacacacaaggggataaagagaatgttgcctcattaaaagatagacatctccctttaataacaacattaactacctccataactaactcacaactccacacgaggaacaagccaaacacgagcttcacaagcaccacaataagaaaagacaaaggaaaggaaaaggagaaatcaaccacaaaggtgagaggaagttgaacacaaaggaagatgggcagggcaacaaaaaggggtaaagaacgtaaccgagaacagaatcacacagacagctaaagaaacaaagacaaaggacgaaaccaaggcaaaaaaaacaaactaataagtcaaacaaggagaacaccagtaaaaggaggatggctaaaaaaactaacaaggaaaaagaggagaagaagctagactagaaggtaaaaggaaggcacgcagataagaaagtggtagatgaccatctctctcctcaaacttctttgagccaataaatcacttccctaataataagaattatgatattgttgataccaacccggtctaaaataacaaaaatatcacttcggatattaaagcccaaaaaaatacaattagcatttgttggaacatatttgtgaattatcaaaaattagaattttttaaagtccttagaggactagtcccacattgcgagaacacttatttataagcgtataaagtgtagatatgagcaccaaggttgggccccaaagggtacccacttttgtagaagagggatgagtcacacaaaggctcacctaaacagcacacgtgcgcacgctgccatccgtctgaccgagttggttgttgttgtgtacaccttattttttagaaaaaattatttattaaattattatttttatttaattaattaaaatagtttttaaattgcgtctaattaattagtaaacatagtcattttcttgtcctcttttttagtcatcgctcccacgatctcacgctctattgttcccatgattagaaatatctttctttctattactcctttt

SEQ ID NO: 310513 - DNA, 1549 bp, Cannabis indica
gattatttttcgatacacctggacctatataacactagtgtctacatgtacattatgtgtcttattattaaaagcaaatataaaaccgatcccctggttgtttgattaaattattatgttttcccttagtattggaaacgaaactagctatttaattaatgtataatttccgtagcaaggagcacataatttcaaaatatatatggtgataaagctacgtgttcttttatatctcttattaaaaaaagtacactatatatatatatatagaatttgactcttgtaagtcttgtttatgtatatgtatattggccggtaattggattacactcatattttcaatttttatttttattttcaagtataagttatatatgatttcgccatataataatgagcataacttattttttttttctttttttacgaatgagcttactaaaaccaattacttttattagctactatttttattgtctaggtctcaggacattgttatacaacaaatatagatttgctatgtttgaatccacacacttattgtttattgttttgttttatatgtatgatcagtgcttgtttattatctatcgtcttttataattacaactgtttgtgaagattacatgggatatataacagtggagtgcgcctcttaaattatcagttttgtaacaaaaacattaatatattcactcactgatcactgtatgtgaaatatgcatatatataattaataatttggggttttattgtggctatatatatataatatatatataaatgttgcagtgtgggtggagagggttcgattgaggatgttcatatgcaacatcgatctggagaggagcaatctctgtttgctaggcttgtgcttcgatcagcttcagacatggaagcagttcttcaaggaaaggagaaagtgaaattctccattgatggaaaacatgtctgggcaagaaagtatgtgcgtatgacgtcagctcctactactactactgttactactcccaccaacaccaagtcaaacccatcctcaccaaaatccgaccaggcttaatctataagctcttgcctcctgttaaattagtgctttcttttaattatctaatatatatatgcatgcactaatttccagaaaataataataataataataataataataataataataataaaaatgcgtggttccaatgattgaactttttatttattattaaaaatgatctcttgaatattgaggacttctaatatatggtggcctgatttcttgattagtcgaagcatatatatatgtttaatttacagaaaaaaaaatagacgtttgacaattctttactcaatattactgaacatatatattttcttttgagttttttcgactaaattcttgcaactaacctttagttgcacttacctctctcaaattttgagttttacaaatttaaggtgtcatcaactatttataattaactttcaacataaatacacttttatacacataacaaatttatattagtgcactaatattattatttaaaaaata

SEQ ID NO: 310514 - DNA, 2165 bp, Cannabis indica
tttttctgagttttatcacgaagactctcaatgaaagcaccaaactgttaacgtagatttttgttaaccaataataagtcattttcgtaataaatttaacacagaaattataagaaattaataaagtataataagtataatattaacaccagatatttttacgttgttttgcaattaaatcagcatactctacgagtctgtcttattcaagatatttctgtgtatttaatacaatatacaattgatagtatttctgtatttctctcaaacattttccgtccctttttttgtgggatctacccctctttataggaatataggttggtagttatttacattttaaattataattataactgcttcatgaaacgtgggaattgatcacgttttatttaaacacgtgtagataacaattggtaaccgcaaaactgcttattattcttatcttcaaagatggtagatgctgatttggaaaatagcacctgacttaactcgtagatggtcaagtgttaatttggacaatcatatgccttccagcaatgtcatgagcaccagtgtactaagcaaacttagaactgctctttgaccataaggcctcatagactggacaatcatgtcttgtatattttgaagttgttacacttagttattgtaatgtagaaaatatgctaagtgtttaacaaatgattcgcctcgtcaatatttcttatgaaaagcgaggtgggcacctcactatacgtagtccaaatttgctctgggtaacttcacttattcctttaaaataaacaaatcttctctttggatttgtgtatttcgaggtaggctggtgtctcatcaatataggcattaatagttttgtatccttatctcgcttaaaactatacagctagtgagttatgaatatgctctattaattccatatttaatgagttattcctctttgcattaaatgatataacgttgttatactaagtggttcatattccactaattgacacatgtcaccctttgaagtgtagccgaattttgggtataacacttgttacgaagtgagagttggatgacttttgtgatagttatacttttgtgacaaaggatcagatcttgtcccttgtgtcaagccatggtagtacacgtaccacctctgaatacacctttttgcccgacgactccttttagggttttgtctactaagtgaaacctctgcctgatacacgtcttgtaccaaaagtggttgaggaagagccttcttaagggcctaatagtgagtattcttatatatattctacccagtagttggtgaatctccctagggtgagcttaaactaccactgttgggtcgtctctgacagtgtagctgggaatacgcgacaatgcacatcaccagtgaccttttggaggtcaagcagcatgtcgatgtacttgatgtaagccagcggttcctctcgtctggtatacatcttccatactggcatttgaaactttggtagaggtagggcattcatatatgccaacaacggtgatcccctcgaccgatcaagttcgaggtctgaaggcttagggccagctatgcctaatgtccctgagttggtccaattgcacctgcatagaaggatctattgttgtggggaatttattgaccgatcttccttagggaggctgctaattctaaagagacatgggctggctggccatactttgggagagtgtatggttaagattagccatgaactacagaccctagtcggccattcccaagtacaagagttggcctagggtggccaggcttatgcccggttgttgtgcttggtcgaccataactacattgggtagggtcttgccgcccgtgatacctccatggcctagacttgcattgggtagggtttggccgcctatgactcctcggtcgactagtgtcgactatgtgttaattcagggtagatcacaccagttatttgagtttggtggatctagacgcttgaagtaatcggtttcacttctggaatctccattttggatgtttccacctagtctctattggaaatattttaccaagatttacatttagtaccatgtatgtttcattaacattttaatatgaattctaaaacaatggaatatgtaacaccctaactagcataggcgtgtttacgtgatttttaaac

SEQ ID NO: 310515 - DNA, 1043 bp, Cannabis indica
aataatacaaattgaattagacgaagaccttctttttttctttccaaaagctaaaaaatgatggaaattagagtgttggaatatgcaagtctaaaagtaaaaccacaagaagctggtttttgaccagtttttcaaatttgggcttttgatagaaaaataggcccagtccaaagttcaatgtgggctgatatttagtagcactgatgacccagtccaatctgactatggcccatcaaccccgccgggtcgtccacggcccaacttttctatcttcttgttcccacctttgcatggctcacactcaaatgcatcattccattttttaatttgttcctaatttatatatatttttcttgatgaacttgttcctaaattcatagcttgaattctgatgtttttattgtaatctaaatttccttattttattttttaattataaccaaaaaaaaaaaatactcctttcctctttatactttaaataataaatttgtgatcgaagttgtgataaattcgaatcgatgacttgttgcctatttatcccgcgggtactgttactatttttgtggatgtagcatgtagagattcggggtcgttggtgctatcattgccaaaaataatgtcgttgtggtgttggaagcattgactgtcaggtttgatattacttctgatcccccttcaggccaagactattgttcttctccatgaaatttctctttgtttttgtgtgaatggcaaggtttggtactccattcgaattgtgaggtgttggttgatggtatttcttttaattaaagttctttactggaaaaataagtaccagttgattcttatcgtaggaccttttacatagagacgagtagggtagtcactacttttaaaaaaaaattaaaaaaatatatttttaaatagttacaatatatatataattaaaatataatattaactacgacatatgataattaaattatttacctatattaaaatattaaatttggttaatgtatgctatatatgtatagataggaaaatgttgattaaatggt

SEQ ID NO: 310516 - DNA, 1322 bp, Cannabis indica
tataatttaaaaaatattaaattattaaattctcattcaatggataataaaaaaataaatttgagtttttatacttaatttagctacttaattaaaaaaaattataaaaaaatatctctttttacaccatatcaaaaatatatttaggtaaaaaatatctaagtcaaactctaattttttttttttttttttttttctaattttctctcaaacgatagaacaatcccaacctatataatataaaaataaaatatttattttaggaattttttcaaaagtacgttaattaaaaaaattacaatcagttttaccgtaatatatcttttaattcaaaaatatatatactaaaacttttacatcaaaaatacgtctcctatacaaaatttttcttttccttctttgatctgatctttagtgtgagattcaaacgagagagaaagagaagaaagctttgaagagagaaagagtaattttgttattgattgaattagttaggaattacaagaggttatatatatacaatgaataacaactaaccaacaactaactcctaactaacaacctaactgtcaagacaaacacaactcaacaatattaacagaattaactaactaagctcccttgacagccccttcaaactcagtgtggcaagagaaataacactgagtttggacatgaaatcactgaacttgctgctgctgatagacttggtgaaaaaataatcaacaagttgagcagatgtagggacatgtttaagctggatttgccattgaagaactttgtcacgaacaaagtatagatcaatttcaatatgctttgttcgagcatgcaaaatagggttatcagccagcaaacatgtgctttggttgtgtcaccacacagatggagaggcagggattcgaatttgaagttcttgcaacagtgattgaatccacacaacctcagtaacatcactggaaaggcttcgaaactcatcctctgttgatgatcgagagatggtaacctgtttttggaatttccaggcaatgagattacctctaaagtacacacagtagcctgtagttgatttcctatcatccaagtctgatgcccaatcagcatcacaaaacacatccaaggcaaagtcttgagcaggtttaatgtggaggccatactcaagagtaccagcaatgtaccttaatattctcttaactgcagtcttgtaggaaagcaaaggagtttgcatgtattggcatactttgttgactgataactctagaaattagagttattttcacatttttttttaactaaaattgccttagtttttaagtttttaatta

SEQ ID NO: 310517 - DNA, 882 bp, Cannabis indica
aaacagttacaaaatagtaacagagctaaaatagttataaaaacctaaataaaaaaaaaactatttctttaaaaaataaaaaagtctataaatattaatttagacttagtattttacaaaattagcatgaacttgtattttttaaaagtagtacaaaatagtattctgaaatcaacctaaaacagctaccgatcaaatccttaatttttattattttattttaatataaccaacttaaaacagtttttagcacaaaaatacaaaaattgtaaccatagtagtaacacttattagtaaaattattattaagtttattttgataaaaattaaaaattatgctcagagtattattttatattattttttaaaaaatataaagtttaaattatcatttaacaaaataaagtctctgatgaataatttttacaaaatatatattcttttatatcatatttcctcttcttctgaactcccctaactccaaccccaactccttcttcttggtatgtgtcgaaaataaactttgtagatttaagagcatcacgtaagcttttgataacaaagacctttgtagattattaggtggtgttaaaaaacacacacgtaccaagttattacttgagacacaattaaattaggattatacgagaaatactaaaatgtatcagtgcatttttctcggtgttatatcgttattggtacagttaagtaatcaagttttatataagttaagataataaattttagggttgatgcaaaatgattttaaatttggtaactaagttagtaaatgtccactttttaaaaaaattaagaaaatggccgaatctaataaattagctaataaaaattataaaaataggtttatcacatatttttttt

SEQ ID NO: 310518 - DNA, 1631 bp, Cannabis indica
aaaaataaaaattagtgctaattgcccttactaatccaaattactagagcggtcattacataacctttgatatcggactggtgaattaatacttattcgtggtggaaatttatgttgaactgtcatttttagtttccatccaacagtggttggggtgatgtcatctactgattggtgtagaatcgacaactgatatgcacatttaataatgatattttgaaaattaaataaaataaaaaatttatagttataagaagcaatacctcaaatgtaataaaattatattaatatggaaacaatataaatcatattttaaaagtaattagattagtatatgaaacatttatgagtttacgaatgctaattacatagtcactttgcaagttttttgaagagattaatttaaacatgataatactaataactctgtgtacactatatttttagtcgagttcttatcttgttgggaagttgaaacaagttagattaagactctaactgtcgatgatgtctttgctcttgatattgctatatataactaaccgtgtgaaaaaataggttgtggtaaatgaatcccaacgtaatccaatgtgtgtccatttgacttatttatagtcattgcaaaactcaatctgatttaaaattatgttcatttgaatagaaaaccactattttcatccacatttggcaagaatggtatccttagaatgaacgctctttttcggatatggtgtaccacggtaatttcagcatctacgacattttattcgaatgcctgacatattaaacatgttccattgcataaaccttcgaaatgattaatgtttctaaggtgcatgatgggacaattctttttgagttgtaattcatgtgggggaagtccattgtgagttagagtgtttaagaagtcttccattactgattgctcaatattatctaccgtctcatccctactatagtagaggttgacttctctgaaacttccaattaacaacaaatttatttcatcgattaagttgttctttggtgtaagtatcgcacggttcatcatggtagatacattttctaggtattgctaaatgttgtggaaaacgttttctatcaagatatttaaagaactgatgttgtcatcatatggtacaagcatttcgtttggaatttttatgttgtcattaattgtgtttggtggcatgccattgcctaccgacaacacgtagtgcaaaaacaatagatccagcatggctctcatattttaaattagtcaaaacttagtcaatgtaggccacaagtatgaataaaccaagctggaatttatctgctcttgtctcattccttttcgtaccacaggtaacacctatcaaaaatctcctccaaaaagaattacctttccgccaaatggtaaggttgtatcatttatgtcttgtagcattatatctaatgcttctatgtgttgctttctggtcattggggcctcgtcccatataattaattttgctgcacatagtagttttgcaatctcactctgtttgttgacacaacacatgctttttccgtcggcatcgagtggaagcttaaaacgtgagtgtgtcgtacgacctccgggtagaatagatgctgccacacctgatgaa

SEQ ID NO: 310519 - DNA, 1355 bp, Cannabis indica
ttttttttatttagactgtatatatatttatttagccagctaaaagtatttttgtaatattattacttttttaggttaaaacttataaaaaagtctttttaaataaaaaaatactattaaatgtataaataaggtgtaaaagaaattattaattatattattaagtgataatggagtaaataaaaaattgtagtataaaattaaaatcatgttatagtttaatataattttaatatgtactaaatttgaatcactttatttgtacactatactattacaattcacttttattataatagactaaaatatactaggtactactttagtactccattaaaaatttaaagatgctcttaaataccataccaatttaataagtaggaagagttaccattacctcctcatgcatccaccgtgttatatgcacagtgcaccctaactatcactttatggtcattatcctagatattatatataaactatcactttatatagtccttaaatgatcacatggcacccatggaaaattattttagtgatatgggtataaacacaattattagctattaaaggtataaattaagtttccattagctattaaagaaaggtacatcaacacaaatattacaaaataaagaaactcagagctgtataacaactaccagcaaggccaaccttattaattaaacctttagaagacaaaaaagaaagaaacaaaaattgtacacatgtcgtgaataacccaaagttcaagccagtattattaattccattttctctgtctcatcatcaatcatgccataactgaagttgaactctttatttccaaagggtacaaaagcaaatagaatcatcattcatggtcatccagtgtgtgctactcattattatttatttatttatttgattttgcagattaaagaatgaaaagttaagaaactaaatagacacatattattggttcttcttttttttattattattgatagtcatattccaaatgcgcatttatttcaaaaaaataaataaataaactaataccattgaaattcccaaattgcattaaaatatgaaataaaaaattgtcattttccattcctcgtatggatagtagacgcgtgtagaatgtgtatataaatataggaaatggaatagatcaaagtcacacccattctctccaaaaacaactccaatttcttcttctttaattttgttccgatcatggttctctctagggctgtttctcagtctgatgtctccgtccactctaccttcgcttctcgctatgttcgaacctctcttccaaggtatttattttaaattttttttatatataaaaatatatatatttgggg

SEQ ID NO: 310520 - DNA, 2969 bp, Cannabis indica
aacctttttatcttgtcccataactagtggttcatttagttttcgtttcctgatctactaataagttggcttcatatattacaccacatctagtggtacaataggaagtgtcgatagtacaagaacagacacaagatgagcctattgttcttttagatctcagatttgtttccccttgttgtctaatcatatcctgtatagcagaattttccatcccttttaaacccaaaatttccaaaccccctgtccaaattaaagataaatgcaaaaattagagaccatttcgtataaacccattaagacgacattgctagttgccataggcgcttcttggaagaaataacagagagcaagcatcattttttgagagatgctgtttggcctgaacctctcagtttatattatattcctttggctaggcctttgtttttatccagagtcacaattgcttttgaaccaggtgacctagactttgaaattatgacttctaagcctcaaaaatcaaagactccccaggaccttaacgtcaccttcaaggctgaactaatagagtcgaaggtgcgagccatcagagactacgtaggtagtattttaaagacttgtggtattgaatacaaacaaaactgctaggttagatcagtagctgttggcgagtttagttgttacccacctgaacgaatcactcgcgaagcacccgaggagatcaatgtcgaggccagtacgagtggctcaacaaggataggcacttggagcctcgaacacatcagggctggagcaactatccccctgcgagactactacaaggatttcctaaaccatctcacaattgccccattccagttggttcccatttcatataggatcctcgcaagtttgaaggttctgtacaaaattttgaattgggagtccctcacacctttggaaatagaatacctctactcggtgaaagcaatccctgcaaggaagaatgctgtaggggttttttattacctcaggactcacacaggcaatcgtaagatcattgttgggttgccaaataagacccctttcaaggaggatttcttctgtacgaatggcctctccctaattcgcacaaccaccttctgtataattcgtaagtgatatttgcctcagacttgttaaattattccatgtctttaattgtggcttcactaactgtaattttgcttttattttcgacagctgtctcgaaaagactagtccctactcctgagatggctgagcaacgcaggcttctgctgggtcttctattcgacctccgatcatttgaatttctctttaacggggtcaacttgaggtccgtgggtctcctcgcggagaaggagtttacttgtgattataaatatcccaagtattcttcctggcagcaggttcctgtcccagccgatgaggagaaataggattatgtggctcgggcatactacctcaagaacgtagtccctcgggaagccaaagaaggagcatcctgaggtaatcaatgtggttggtcacccacagtgcttagggccgagcgtaacactttagtgttttttcgagatagtcgttataatttctacacctagaatccccttctaatagatcgcattacccataggttttatagttggtacccaaagtttcacgtccaacgtagttgtactgaatcctactatgggatagtcgagcagtatgggaccatgttggatagggcaggtcacatagactcgagttgggatttagagccacttatttcctatgacattttcacgatcacagggtgtagagactttagtgaatattatagtccttctacctcgtcttcttatgattatggtaaatcccttaggcgggaaattatatcccaacttccccttttacttgttttcaaacaaatgtcaacacattattttgtcttgcagaaatgaatcttgaggacctcattcaatcttcaggcaagaagggaaataaaagattgactgcctcggagacttcatcagatgtcaaagtggagcatcccaaaaggcctaggaagacaacgacccataagaagcgagttcctcaagctattgatctcgaggtccctgagactgagactcaagttcagtcccctcatccgtccctcggtcatactgagaagcccatccccaaaacgagctaggccgctgcttcttcaagccaagcacttgagactctgcctattgaagttgggagtgctggctcgaagtacactagggagtttggtgcagcctgttggcgtcattttaagtccttccttcataatgaatgggacttgattaacaatcgaaacctagacgagatgcttcagaggagtgtcgataatggcctctcggtaaattcctttgtccttctcctcttacttccctttttaacatccttcaaaatactcacgcatttttacttattggtttttattaaactttcatctcctttgtcacccaacggcggggtatggagagaatgaagtacatggagagtgagatccaaaagctgatagctcagcgtgaggctgtgaccaaggaatggaatgactccaaggttgaggtcactcacctaacgaaagaagtcgaggaggtgaagaggacccacaaggccaagcttgaagctattaagaaggaggagaaggataagaccaaggcattctagaaactccagaaggaataccagattttccaagaggaacttaatgtagccaaagtaacgctcgatgggaaagaagttgagaccattgagcgatgcaatgttgttggactacgttccatctaccgagcctagatggcaaatctagggatggatttgagtttcctgggaaagtccatggaagaagtccttgccaactacgagaaggctaagagaattgatgaggaagccgaggcagcaaaagaagaagaagaagaaacatccaagtctcctaccatgtaggcttggtttttatttattttttttatcta

SEQ ID NO: 310521 - DNA, 1285 bp, Cannabis indica
caagatctaaacctggatcttctacttttggttaacaccgtcttttgcactatgattgagtacttgacttgctatgagtgggcatggtactctatcaccaaagactcaaatttgttgaagaacaataaggagaatttgaaattactatagaaggagctctcatttactagttgtctgacaaagaatgaaaactaggtttagataggtcagagcttttctctctagaatttggagcttcaaacacttagtctattgttgtaattaccatctcgtgagaaatataaatttgaagtaggcgtaactccataactatgagtgaactactataaatttgttgtctctctctcttataattacttaactactttttcattctagccaatctagagagcgggtgtatcttagaagtgtactctaaatttttgagttagcagttcccgtaggtctgtatggaccaatttaagtggttgagatgctctacactcagaatgagaatacgttaattaatgactttttccttgttcacatgcctcacaaaattttagtgcctttaaattgcttaatatgtctagttgagataaaattttggctagaattttaagtgttggatggccatgtttggcatgccacaaattaaaatcagtcttctttgcattaaacacttaaggggaaacaagaaaatgagactcaaaaataatctctttattcattaacaattcattacaattgtttagagctcaaagatcagctacagagttataaacagattgagatataggagttatttctgaactggtgctgttggtggctagatgacactgagttgaacatttggagtgggaaatgaatgatgagacaacgtgtacaagccattcttgaatctccccttaagcaaaacaatccatgtggctttgtccttgacaaaacaataaaatgaatgtaattacaaaaagacattattatcatttgtgaattgtaaagtattggcaagtttcttagtaatgctaggaacttttaagactgtgttaactttaagggagatctagaagagggtaaagaggcattaccaatatgggtgatgtggagtttcttaccattgccaaaaactagagcttttgaaccaggatatgacatctaggattcaaggtgctccattccatgtgcaacatgtttgtggcatctgtgtcgacataccaatcataatcatcaataaactttaaaactgaacttcatttgtaaacctgaggagtttttgttgggttttatgccctaaataaaactcttt

SEQ ID NO: 310522 - DNA, 2075 bp, Cannabis indica
taaaaaataaaaaaaaaatcctataatttattaaaataaaaaaaatcaaagtggaatttctatttttaagttgagatatttggaatgaaaatactacaattttcaaaattattaaactcgtagaactactagaaaaataaataaataatttttttaattaatttaaatttatatagaatttaatcaatttaaacccctccaaaaaaatcctattacctaatgcattatagagggcgtttagtagttgtcttcgtacgagagtttaagtttagttgaagactaaacatatggatgtctctttgttgtgtttgatttatcatggggtaggtgaattaattttgcactatttagttgcctgggattttgcgcagaattgttgccccgtagtggctttggctatgattccagttgatgcagggtcgtttggggactggtttcttcatttgttctcacgagcttttctccactgatcaagagtgttcagacggtgatgttagtttgggcaatttggttcgcacaaaatcaactcttgtggaagggtaggaaaagtttggtggagttcgttgtcgatttggctcatatcactcttgatcagtggagaaaagctcgagaaagaagtttgttttctacgtttgatacttggtatctttcggatagggctgagctatggtctaaactaggttatgaaaaactcaaggtcaatattgatgttgcattgtttgacgaggagggaatgcatgggtttggtggggttgttctggatcacaagggtcgggtcatggctgggattatgggactacggattgggcaagttcttccagagattgctgaagccatgactctcaaggaagtgttatcatggttgaagcgcgattttctaggtgctagtattatcgaatccgattgtctggttttagtacaagctgttagaaatttgaatgttttgtcatccacttttcatggtgtcgttgaggattgtaaacaatttttatcttctttcagggatatttcttacgttttgtcgaacggtctgctaatcaggctgctcatcttatggctagagcatcttgtttatatgttgatcgtatttttttcagagtataatctcccttttgatgttgctaatattgttgaggccgagttagtttagatgaatgaaatttacagttaaaggattcgaacttgggacgatgtgtgaaactactaagctattcctatcaccatattttttttaaagctgcagtaatactttcttattgtaaaattaacaatacttaatcgataaataattattttcaaaaaaacaaaataaaatcaataaataataattttcgactgttctcatcaaatcgacaattaaatagaattaccactcctttctaagaaataaaataaatataattatcactatattatgatattctccaacaaatcttttgctctttttttttgacgaatgtaacaacagatgggcaattcagttcaagttacaaaaataatatggagattagtctcgccagatctactccttctcaagccctagtgctgtcgaagccatatcatgagcatgaacattaaaattcctaggcaagaattccaaaacagcagtagagaaagtagacaaagagcttttaacatcttgaacaacatccgaagtggctgaaagatccatcatcctggagttcacctttcccaccaacagttgagagtctgaaactacttttgcaagtggaaaatgaacattttgacgctagagtaatcctgctttgagggctaaagcttttgctaataacgggtttatctttgctttaacaggaattgacaacccagcaataacagaacccttccagtctttaacaacagctcctaaaccaagcttctcagcagcaatgttaatggcaacatctgttaagagttgataggatcattttgtgacctgcttgtcatgatgagggatgggttgttggaagttattttaccaggatcttagatctactcacaagtatgttgatttaacaacctaaatatgaaacttctaaaacgatataaaattaaacacataagagtatcagaaa

SEQ ID NO: 310523 - DNA, 2247 bp, Cannabis indica
ttatcccaaattttgtccacctaatgtggcatgtccacgtaagccaaagagagagtacaagtggagtaaaaatctgccaatagcaaaataaggcctccatgaagatatagcaaaaatttcaagtagcaaccaaatggagtgaagtgagccctcaaggagttgtaccaacttccctggccaaccaagagaagtctacagtttggccatggtgagcttataggctagccaggatctatgcatcagatggtcggccaagaagtgacttctagaccaatggagcttctattcgaccaagggaatgttacctctacaaggaaacagtgtgcaaaattgtcttcaacttgcaaaaggctagtctgcacatccaaaggctggcctcctcttggtagagctgtagtgagctactaggtcctgtaggccttgaccttccagatcctgcaagccttgaattgcaaaatcatgcagcccttgggaggcaagattaacctggcaggactctatgtaaagcccaatacgtagaaagcaagtcatgggctgcgaattgggccctaaaagcccagtagaatggctgaataatatctagattaaagggcactttagtcttttctaattatctaaaaccctatgcaaatatctagggatttaaactataatctatggtttaggcttcctatattgaagccttaaccctagcctagaaacctaagttcacttagcctccaaactctaagtctgaaaccctattctctctctctctctctcactctctcttgtacacacccaataagacactctctctcttctcacttcatcactcacatgcttctaaggctattaatctcgctcattagagatctgcctacttgattcatgttgtgtatccttacagagagctatattaggtcccccctatagtgatctgaatagtattatctcttagtattaatacaactacaaggggcgtatgtcattacctactatcagaagagggccaaacctctataacaagtcgctatgtttatttcttttcattcttatttgtgtaacacgtggcaatcattagatccatacgaccctgctatcggttgatcactttttgaggttaacagtttgatgcttttattgagagcgtggatatcgtgtctgatcaaatgccatggttaacatgagaataactcctgaagcaatatctacatctttgggtctccctcaagacccatagattttaggtccagatactcaggttccagtcacaactagaatcctgatgaacactatagatgtggtgaatcttgtcactataatagtcaccatgaatctcgccactacaactggccaaacttatacaggcatcccggtggatccaagtggcaagcccctacctccaaggaaggactctccacaagcacctccagctaaaggaataatccttggggccaccctccaagaataacgaccgtgtcatccccgctactatacaggagagacgagactaggaattggcgagccccacgtggacatgtgatcgagaagatctccagttagctagacttagagaggtcgtcttgcatgttggcctaattaaatgaccacccactactgactgcgatgtattcgctcagcagagatgtgaatttctttaagaaccactcactgctagttgcgatgtgctcgttgagcagagacgcaaattcctaagatggatggatgaccaagagtacatccatcgatctcaacaagaaataaacacaaggatttgttatagaggttcgacccccttgtgtatccttatagagagctatatcaaatcccacctatatctctttgtatcaatacaaccaaaagggtagtaggccattaccctctatcacaagggggtccaacctctgtaacaaatccctatgtttattgcttttcattcttatatgtgtaacacgtggcaagcattagatgcatacgaccctactgtcggttgatcattttttgaggtcaacagacagtattattgtacttagagttccatagaaaactaacagatatatgtttggcaaagtactgattgacgctatcacatcgataggattagagtaccgagtataggctgatattatggtcaatagtcctgtcaattctagactcagtacgcgtgggacgtgggatatggttatgtttggggtgtatgggcacctagttataattttgtttatgttatgttattgtaaagatcgcttagtttaatttggaaat

SEQ ID NO: 310524 - DNA, 654 bp, Cannabis indica
aataatctattaaaaattattattattaattaaaattgatatttaagcctaaatatattaaaaataatattttattttgaaattagggtttgaaaattgcaaaaattcgaaattggaaaaaaatcccagaaaaattgaatttttggggcaactatggaagctgcccagtaggaggctgcacgcagcccttacgcgcgcgcggaaggagaatttgcaacctctggcgccgagaaccttggcagctacagcatctccctcggcgcagatgcaggcttcctgggcaagagcagcgtgtctgaacggatgctatctgtgtcttcagacacgatttcccttgttcgcgtgtatatcaccttgtccgaaggaatggtgtgcgtgcgatggagcaccatgtgtacccgtttttcaaaccttcatatctttttcaatttttatcagaatcaagttccgtaaaacccaaaattgcttaatttttcacaaggaatccaaataaaatattttcatggaaaaatttcgtaattcacattcaatcatcaattaacacataaactaacatgaacacatccaaatcaatacacaaacaatattcatcgttttaaatacatatttcacgaaagtaaatcgttaccatggctctgatgccagttgttggga

SEQ ID NO: 310525 - DNA, 1893 bp, Cannabis indica
taattaaaaatatataaaacataaaaattttataaacatattttttatatatatatttatgattataatgaactagattaaaatattatcattattataatagaatcttaacaagtcgcagcactttaaaaattataatttaccaaacactcggctcagttttttttcacagttttggtacagctgcttttcctcacagcacagctacagctatagctgctttttcccacagcacagctgtatcaaactggccctaagagtgtcacaattagttatattatgttaatttgacacataagatacttgtatcataaataaataaataaataaaaataattaatttcttaaaaataaagttagaaggaaaggaagtattgattttaaagtatctagatatatttatggaagaaaattaaaacaaaatgaactaaatttttcgtaatagtaatactttttttttgcaatttctttccaaataagcaatgacataatcaactttacatgactttatacacattgtatttgaaatggctattgatggcatagtgactcattctagtcttcaagtttctttatttttgtagatttcagatgacaagagtagttgctgtcaattgtatcttataatcttaataattaatgatcctctataaatgatttacattaagtagggacaaaattaccgttacgctttcaatgtattttattcttaaaatacttagcaacctataaatgatattttggtgagctaatataatcactaaattgagcgctctatcatttctctatatttaggtaagctcgaaggaaattatcgtttcacttctatgttcggataaaagctatagattttatatctatgattagcgctcccactcaattgaactaccatgttcttaacctatacgtcacgggaagaaccatttggtcgactttaactaatagattaaagaacacaaataatgcaactgaactagaacctaaccatctcaagattgagatcctttgatctaggatcaactaggtgatattgaattgaatagatattacggtaagtttatcatatctagttcaagttcaatatcggtcccttccaatgcatactccatacatcaaacccaaacttattactttaaccaatgccctgaaaagacatagcacttatccaaggtgcaagtaaactacgttgtagttatcatatcagttaaaccctgtgtactgataaatcataggattacatttaatcacacgatcttgattacttttcactgtgttgacaacacaataaacaagaatatcagtgtgataaggatttagatgaatttataaatataaatgatcacatgaaccaaataacacattaaacaagtagtaaaattaaatttgcttctttattcataattgaataaaaaagattaaattgaaatagttttatttagggcacaaagtacgacaatctaatatatttaaggcctatctagattcgatccaattatatattggatgttagattttaccatccgatccgatctaattaatttcagttatccaatcaatccaatatccattaaatgttggattagatcagttctatccatgtatttcatatataaaaatataactacaaaaacaaataaaaatattaaatataaaaaattaaaaaataaaataatttcccagcaaataactctaaagaatatcactaacacgatcaacattatcaatagttttaatttgagaatgcatggaatggaacatcaactatctttttcttaagaatctgaatcaacatcaaccgttttctaggattttgtttacatgataaattctccaaatgtaacagaaaaacaaatccaatttaattcaacaatatagatttttttttttaaaaaa

SEQ ID NO: 310526 - DNA, 690 bp, Cannabis indica
aaaattgcttttgctttctactctgatatagataataaaaaccaacattgtaatcttcctctaaaatcacaaaatgatactagatataccctccttctagcacaaaataatttttgaaaaaaataaataacactaaaaactataagtattcaagataaataagagcacccacaagaaaaataacgagtattcacttagagtggtgaatactcaaacataatgtaacgataactaaaagaaaatattgaatctttaaatgagacagagaattataattgtttaacaaaagcttggtctgcttagtttaattttaaagagggttggtgattagtctaattcatgtttaatcatctctttatatagaaaatagatgatcaattaattatatatctgatcagacaagatcgttataatttttaattacatttatttgaaatgaaattttttacaaaataaatggtagaacaatcattctttatttaagtccataacgggcacaactatctcagccgcatgttggtcgttcatatacggacatacagggttcatacccttaacaagtcatcattttcttacaaaaaaattaggtctatgtgtcatatttatgtgagatttaactcgctacttttgcatgaaaaattatcaaataataattattaattgattgatatgttaatgggagtgacataa

SEQ ID NO: 310527 - DNA, 1000 bp, Cannabis indica
aaaattcaagcttcgactttgctcgaaaagattaaagggtgaaagaatcacggggaataacacaaacttcaagtagtcctaccatttcgagaaggagggttgaagacgtgtcatacccctagtgatccttcatgcacgaaaaacatcacgcctgtgagagtcatgttgaatttttatttagcaagcttcggcttccacgagggaaggctaaaattgcataaaaatttaagcaacgactttgcttgaaaacatcaaagtgtgaaagtttaacgtccttgcttcaagcctctattaggtccatacacccacagaatgatgactcttatacacgagtacgtcactatgactgcttcatggactgacgactggccctgcagaccaacacaagtgttttcagtgtgctttgtcctcactcgcatgcttcttgggaaatctttccaggaggtcacccattctgaaattatcacaggtcaagcatgcttaatcgtggatttgaacaaataataatcaattcattcgaaacctcctccaaaataaattaggaccaaatgttggtgtttctataaaatagtcacgataaagtctttcattaccttcaaccctattgcgttgaataatagtacaacttatagtagatccacgacgacaaggggctcgaattttattcgtcatttcttcttcttcagccatcaccattgtcaataataaaagatcatcataattatcatcatcaaaaagcattttagctaatcgattacaacccatcactatttgtgaaatattttataaataaacatagttgatataaacttgatagataaaatttaaatgaataatatgagaaacaaaatggacttatttatcggcaaaaaaaaatagccactgtaaatataaccgttacaaatatagtcgttgtaaatatagtcgttaaaaatatattcgttataaatataaccgttgtaaacatagttgttagaaatgtagctgttataaatatacc

SEQ ID NO: 310528 - DNA, 717 bp, Cannabis indica
tgaccacaaaaaaaatttatgttctttctctctggtgattcccagtcagaaatgaatcaacccatttaactctccgttcctccatcatcaattcgcttccccccctcttcgacttctttgagatcgtccatctcctcttctgttcttgttttttcttcttttttatagcagattagtgttttaggtcactgacggttgggggttttcttgcacctagctgtgcttgcttcgacgagcgacggccctttctatcgcacccatcgacagaggacaagttaatcggagttgatggctgaaccaacatcgtccatgatactgggcatttaatttgcaattttttctggggttgacagctaaaccaacggcccggttgagttttttctggggtttgatatttgcagttaatatgtaattttttttgtttatagatttagggattagttttgatttatattgtatgtttgtgtgttatgaagtttatattgtagttgaaataatgtatatatttttgattaattcttactcatttttgttgttgttggttgatgtatagattttttgcaatgaattgatgtatagatttttgatttatttgatttttaataaatttatagtcaaaattaaaatatattaatttataattgataaatgtatacttaattaaattgtattattaattaaattatttttacaaatttataatatataatctgaatt

SEQ ID NO: 310529 - DNA, 1320 bp, Cannabis indica
gacaatttttataagttgcaagctcatccggccaatgaaacctcgttacctttcaactttcagaagaatgttaaggaatttcgtcataggtttttcttctcttctgggcttaaagcctttgagcgcccagacctgttgacagagtgggttaggatccctccaatgcactacactactcccactcagcttttcttgaaccatgcacaagtatttgccgtctataagaaggaagactgaacgtgggtgacttggtgacgatcgctaattttcgaagggccaaattgattttgcagactcaatcggtcgatgatttcaatctgtcaatagtcatttgccctaaagctcggaatcctaggagcggaaaggcacttagggcggacattatttcatctgccgagggtaaatacaacaagtataggtaaaagaaggaacagagctcgcttatgctcgcctcagaatgccttcgggaagcccatccaggtggaagcagggaaagaaaagacacttgttaggcctaaatttttgtttctaatttcgaactctggggcccttagtgccattacctctaaagctcgtaagtctcctttgaatatttatttcgttccttctatccaagattattctaacttaaggccagtggactttgacatgaggctatacaagttttggatgctccattctcggtggggcaataatgcaaaaagtttttatttctccaatttaagccatttcctgggtcagtcccggatgggctctagtcctcctattccgattcttttggaccattcctcctatatgatctcaagttggttccttcctttagatagctttctaggggatgacgacaccagatctttaatttacgaatttgctagggcagaattagagagtcaaggtaggattagccttgatgtattatacttacatttgtgatttttaatgcttttttaactgattagtttgaacagcaaaacccatggatgacctgttagccatgttggcccgtacccacagccctgagccggaggtgcctgagcctccacgagcgatggcgactctaggtggaccaactaaggaggtacttgggaaccaggatgtggttcttattgaggaagaggaagaataagttcctgcacttgaccgaaaatggaagggtgtcatttctttgccggagccttctaagaagcccaagcgatcatccatccccgatcctagcactgactccgggatcccagctgagatcgaagacttcctcgctcccccaataattctcttgacccccgcccatcctgatgaagagagtgttgggttttgtgccct

SEQ ID NO: 310530 - DNA, 3094 bp, Cannabis indica
ccgaatagtgtcaatgcatttaagaatatccactggacagttattgtgtaccttatcattccgagtctgccagatcgtgtcaataataagcgaagcatatagaaaagcttcatgctcattaatgcctttatttttcaggtcccataagaatttaacctagtcccacattcttataccagtatcacagatggggaatataccccagggagttgaccgccataagtgaaaggcaaaattacaagataggaatagatgctccatagtttcaacttccgctccacacacaccaccaaagaatctggagtctctctagaattttactattccagagcttgttccacatggatggggcaacttcgccaggactcgctctatcctcagcttgggccctataagctgatttgcaggagaaacgaccattactttccaaagtcgagaaccagctatcctttccaaggccagaaggaatgccccctttcaggatagctgagatagtttcattatcaaaaaacctgttaagtttctggatattccatccaccattgtccaaaaggagctcagcgacctttatctcttcattcaatgtcggccgttttggttggggataaagcccttcagatgcgcaatccatggatcaatccatatattagtatcctgaccatccgccactcgcttgtaggcacccttatgaatgatggctcttgatttagccacattcttccaaaaccacgagtccgagtctttcgggtcacagtctagaaagggcttccctttgaggtatttggcttccagtgttcgatagcataaggattggttgcctgtcagaaggttccacccccatttagcaagaaaagcctggttcatttccttagattttcggaagcccaatccccctaaagacttggggaggcaaattttgtcccaggctttcaggtgaagtccgtgattacccttctcagaaccccaccagaagtcgcgcaccaatccatcaatcttagcagcaagtcgattggagagctcggttgtttttatagcatacattggcagagataaacccacaaacttaattagagtcactcgccccgctttggagagattcttagctttccaaccatgcaatttcatagtcaggttatccaaaatgaagttaaactctgcatctttttgtctagatctgaataaaggaagccccaaataattaacgttaccctccagcgatcatattcccagcagcgccctgatcctctgtttcatattagtgggagtattcttactgaagaaaattgaggtcttcattttatttaccatctgtcccgaccaagcgcagaacttctcaagacaatcccagaaacccttggcctcctctaaattggcttttccaaccagaatgaggtcatcagcaaagaagatatgagatataatagggcctcccctactaagcttgattttgctgatgcttctcgatgcttgggcgtcctctagaagcattgacaaaatttctgcagcccagataaatagatagggcgaaggcggtcaccttgacggaaaccacacgaagggaaaatcttgccaacagatcccccactaaggcaaatattgagggaggtggtcgtgatgcactgagatacccaatttcgaaactcttggggaacaccaaaacatgacagcacatgaacaataaatcctcagctcatcctatcataagctttcataagatcgatcgttattgcaaacaaaccttctctgccttttttcctattgaacgagtggactatttcctgggcaattacattattatcctatatatgcctcccaggcacaaacgcagcttgggtggggcaaataagcttaggtaacagtggtttgatcctgttagcaatgatctttgagatgaccttatacaccacattgcaaagagagatcggacgaaagtgattaggtgtcttcgggttctggacctaatcaagtgagctcgtatatcacatccataatatcatcacattatcaatacttaaccaatcaatctttttattatataacaacattaaccatatctcaatattaatcaagtcagaacaatacttattgtattacaatacaacatactatgcagtacaatatacttttcttacctttaatctaggttgatacatgttggccaacccaagtggaaaactatccccgatgatctcggccctatgtcacaacaacgctaaaccaataagtgtttatctcaaaacactatttaacactcgcataagacaatcttggggtttctacaaaacctcgcaggataaatactaaaacaaaacttatattttggctctaaaacataaaccatattgtagagctcattgcaagcttcaaaacagtatataagacgtccaaaccaaacaccctagtgaaaagttatgacaaaaatacgattattgatctcctacaaatttctaaaaacgacagaacatgaaaatttcaaattttacactcaccaaaacactaccgaaacttatccaaattactccaaacttcacaggccacatatatactataaatattacaatccttacgtaacaaaaattaaaattgaacccttaaatgaaaaatgtcattgacgttcggactaagcgttaaaaaagtttcaaacttgatttctaactcaaaatcacctcaaattcaataagtaaacatcaaaactagtctcataactaccgaagaacaattctataaagtcagaatctccataactattataattcatgaaatccttatataaaactaattattttaagcttaaaataaaattaaaccatacgttaagctttccctcttcaaagatttactatcccactactatcagagcttagatcgctaggtttttggtagaaaataaaagaaaatagatagaaggggatgaggatttcgttgaactaagagagaagggtttcgttcgtttcttttgtttatgtttttaaaacatataacttatatatataaactgataaagatttgtttatatattataataaaataatattaataaagactttattaatagtaattatcttattattttttagccactaagaaatcttta

SEQ ID NO: 310531 - DNA, 1164 bp, Cannabis indica
gtattatttaaaatatatttatttttgttagtcaagctatttttttttaataaacttagtaactttattaactagcaatcgttaataacaatagaacgcacttcgttggaacaattctccaattgaagcacacgacctggagagaaacaagaattcctagctaaaacatgagccagcttgtttgcagatcgttttacaaaacacaactcaacattatttaaagataagagaagagtacgaacaccatgaactaatagaccaaaaaaggatgataaagtaatttggctatcagtttccaaaatcaattgtccccacaaatgacggtcaatccagcttaaagcttcttttatgccaacaaattcatctatttcaggttgcacctgccatttcggcataaaattccctgcttttttctccgctgccggccattctctaataactactcgactccattgacacccgaacgaacccagaaccaagaaccaataactaacgccaaaaaccaaaaaaccaaaaaaccaaacccaaactatagaaccatgtcaaaagacaaaacgaatgggaaaacttaattagtttcaacacataaaactaataattctaaccccataaaatactaatttaaattaaactaataacaataaaataataaatgaaaataaaactaaaaacagtaaaaccaaaactcaaaacaaactaatgactatcatttatattagtttactgtttgttataaaataacaatggatcagaaatcgcctcccaaattaacaatatcaataactatctcgacttaaacacaaagatcccaagcgagcccaatcgtcacaaacaactaacccaatcgtaccaacttcaaaaccagcctaatcccgcatcccagcacccgttcggacccaaatagggcttggccgagggaggctccgtcgggaatggagatccatctgtggctaagggagcggcattgtcatcagacttgacaaagggtcgtcgggactgagaacgaggacgagcgggctgagaacgagggagcggagacgtcgagaatgggcacagaggcggaggcgagggttggccggagaagacaacttgagcggcgtcttaggattccgtgcgtgcggcttagggttttcttttgttagtcaaactattaatttttgtttt

SEQ ID NO: 310532 - DNA, 1250 bp, Cannabis indica
atcacatgatatacatacacaatatacacaagtatgttactttggtaaattacttcttaaaataacgactaatcctgcaaatcaatacaagtatttttaacataggtcatcaaatatgcttaactttagagttcttaagagaagatgaatcttattgatatatgtagtacccatcaatccatttaaactctcttcagctgtgtagtcttatacatacatagttttagaatcatcaaacatgatacctttttcaagtcatgatgtgggttagcacaacttacacggtttttctcttgcgaatcataggactctgattgtcacaatcacctcatatggggacagacatccttgtcaatcacacttttgactgggtgaaagctctgatacatttgtaatacccatgattcacctgtgtagtcacatacctacacagtatacatgggtacactacttactacttcctaaaatgatgactaactctgcaaaccaacacgagttgttacaatttaatttgtcattgtctgcacgcttcttgagaaaatgtctcaggaggttgcccattctaagattgcttgatccaagtcaaacacgcttaatttttgagttcttaagtaatggactaccgaaaagaagatacatcttggacatagtttctttcattgacaataaaaactcagtaatttcttcatttttttcaattcaatttgagttattactactttagttaaaatactagtcattcaactacgaaaaatgttaagaaatatcttaataaggtaccaagcatatgcttattattattgtacacatatttatgatctaaataacaattcccattccaacatactaacaattattgtgataatttattatagcaccaactaaaaaggactaggcttgcatgactttattattatataaccaaccatccatccacttgtgtggtgatagttattagtaggagtagtacaatgggattaagtttcaagtggaaaaatcttgtctttgtgctaacctcccctttgccacaaatttcatggttcagacctccttttatttttggtcttgtttgtagtacataaatatataaatgtgtactgtttataacaacaatacattagttgcttgtaataaattaaaataagattcttttacaatgaccactaattagtattgtactcatataatattacactcacaactttgatctgatatgtgcacacatacatttgacacacagtaaaaaataa

SEQ ID NO: 310533 - DNA, 1945 bp, Cannabis indica
gggcataaaacccaacaattaaggctgtaatttcttcattcattacattgttccaaccttcatgagaagagcttcagcaacactagttggttctctagtgctggggatccagaccacttggcccatgaacaccttaggcttgaaaatgccagccttggctctggtgatcatgggatgtgtagtaggagcctgatcagttgaagcagcaagctgttcagcaggtgcaacaacaacttctacaggtggatttaagtctagttcaagatcaaaaaatgtagcaatgggtctgggaggatgatgtttaggtgatcccttctcactaccggaagtggagccaacagatgagtgagatgtatgagtagggtcagtgagatttacctgagaattgtgagattgaggtgtggaggattctgcttcctcagtgcttgaggatggactgtctggtgaagaatgatgacctgtgatagatgaaacagaggataaaatagaccaagtggagctttgaataatgactagttttttaggtctatagttgttgacaaaacctgtttgaaaaggaaattcaagctcatcaaaaaccacatcccttgagatatagactctatctgtgagactcaaacatttgtaacctttgtgtgaatcactatagttaaggttcacacatttgatagagtgaaattggaatttgtgtgcttgataaggtctaaggcaaggaaaataagcaactccaatctcttaagaaacttgtaatttggaatcttgtgatgaagcatttcaaataatgttttgttttcaagaatcggcgtggacaacctattcatgaggtaaacagtagtggcaaaggcatctgaccaatatttgagcggcatgctagattgagccaacagtgttagtcccacttcaactatatgtctatgttttcttttcgcccttccattttgggaggaggtgtgaggacataaatggtgaaaattaatgccataagtgacaacaaaatctaataacacttgatactcaccccctccatctgtcctaagtaccttaatttttctttcaaattggttttcagccaatgacttaaatgcaaggaaagcatcacatgcttcagatttgttttacaatggataaatccatgtaaatctagtgcaatcatcaatgaagtgaatgtaatgtttaaagccatgattggatgtgactagaaatggaccccataaattagtatgaacaagatcttaaacttttgaggttatactgttggaacttttaaagggaagagagtgagattttccatattgacatgcatcacaaaaatgatcaacttcgtttttggaaattttaatattgaaagtacttaaaacttgatgtaaaactctagaggatggatgatctaatctcctatgccaaacatcttttgtggaaataacaaacttattagttttggactgatttacatgagacctggttttaacagcaagaccagtaaagagactacaatttgagacagtagacttaggtagtgaaggattgagataggctgacttgttttaaggaattcaaagttgatatagtccatccttaatcatcccttgaagtagaaccctccttgttaccttgtccttcacaagacaaaaattggagtgaaatttaattatcacattattgtcagtggtaagtttagatacactaaggagatttttagcaatagtaggaacaagtaacatttcatttagctttaaacattgtcctgttttagtgtataattttccatttccaaagtgagaaatgataagtttatcaccatttcctactgtcactttcctcttaccaccactcttgcttctgaggtatcacagatgggtcagctgtgatatggttgctatcaccacttgttgggaatattatatcaggatctagatttactaacaagtatgttgaattaacatcc

SEQ ID NO: 310534 - DNA, 1297 bp, Cannabis indica
gtcaaattattcgttagatggatatatatgataaattttcggaagaaaataaataaaatggtataatctggagaagtaaatgctttggatcctaatcttaattttcacatcaatacttaacgtagaaatcccaagaaaattgataccaggggttagggtcggggtggggagtagggctcaaggtctagactggggtccgaggtctggggttggggtccagaccaagtttgagtctgaggtcaaagccagggtcaagactggagtccaagcaaggttgagtccagtgtctcggtctactctggctaagttattcaaggtcgagtcaaaatatatataaaaataaaaatacaaaatatcaggtcaatacaaaattttagttatctgattctcctcaaaattgaaaaataattcaagtgatcatctctaaacttattcaagtgtgacattaaaaatgagttttcttctaaaacccaaagtgactaaaagtctaaactaattgcgctgtgttcagtaaattaatttatacccaaaatttccaaaatattcaaatatatctcatacaagtggcttgaccattattaagttcacacttctaaaaaattatcacaaatatttaatatcaccataaaaaaaatgaaaatatattactttaattaaacataaggattgcattttatatatgtttcacataattattaattttaatattcataatgtaaaatttttttgctttaacagttttgaaaagaaattaaacgaaaagagaaattttttaagtaaaacattttatatatatatatataaaaattgtggggcattaatattttaggagaatttacatatactataaaattgtgaaaagtgaggcacaataggagaacgactgtgagggagaatgactgtggtgccttttagtcatttctaattagtttattatatagttgattgattttttttttttttcttcggtaaaaagtactcaactgcaccatttaatttatgaatacaatttggataattccaccatcaaaagaattactacaagatgtagttgaagtgtatttagttaagctctatgactagaacattaaaataattttgaacaaatgcaaaaacaaaatatctttaaaattattataaagactaccaattcatttaatacaatacaaaaatgttacacctactgattgaattagtgttaatttacttcattccacgtacacatatatttttattatatatatgtatatatatatatcacttcacttacgaaactttaaaaaattagtacactaac

SEQ ID NO: 310535 - DNA, 1226 bp, Cannabis indica
ttttttttctttttttttattctttattattatttttaaagatatagtgacacacaaaaagtgccactatagtaaatatttttctaaaaatataatattgattttctcaaaataatatttataattttatttaaattaataattttttttaggaaagcaatataatattcttatattcttttaattattctaaaccaaaaataatatactatttattacaaatatcatattttaatcacacactttttctaagctatatctaaaaacctatattattgattcaaaaaaacaaaatctgaaataatactttgttttatagcttaaatgctatattcatacatggatataatacaacatttgaaataaaaaaaataaaattagtcataacagtgagtatcatgaactcaaattttaacccaaattaataacaagaataacacacatcaagaacataaatataatatagacctagtaacaaaaaatattttaaaaaattcagatacacaagaatgccgatacacatgaattcttgcaccaagaacgtcatcggccatgattcccaactcaaaacgtcatcaaccacgaaccaaaacaccataaaatttgcggtccacaacgagtatcaaactccatcaaccacgaactcaaacgatgaacatcgagatcctgcacaaatgagagagagggagagagagagagagaaactgagaaatgaatgagaaaagagatcgaccttaggtttaggggttgagacttgaatcttcagccgttggtgtcttagggcaacgcggagacaccgtgcgacccaaaaatggcgagatacctttgacccaaaaacgaaaaatcgtctagtgacgcatcagagacgtttagcaatcttggttgggaagtcgtgccaaggttcaccggggctgagaagtgcttctgccgtcagccaatattagagaggacaagggagaaacacccaatactttgaaaaattaatgaaatgaaaaaacctagaaaggaggcagctgctttgttttggttttttattttttttaagaggaaggaggcggctgtagtgtttggagaagaagatttaattttagggttaagtatatattgtagggttttagaaagaattttttaatttttttataagaataataagttaacggtgttaaaagaaaatgttttaaaaaaataataataattttttttgggttaaatttaacagaatattc

SEQ ID NO: 310536 - DNA, 851 bp, Cannabis indica
agggtcctatttttactattttagaaaatacagggtccattttgtcatttaataaaacacaggatctaatctgtaacttttgcaaaacacagggtccaaaatggtatttaccatatttttattaacttgaaacatcatttaatataatggaccaaaaaagcatcactcattctactaataggagcttatggcatgtttacttatcaagattgtgaatgtgatgtagggtacttttatttaataataggaataattatgggttaacataaatttaggagaaaattaagggaatacttttcctctcattttgttcaggtatgctattacgggaaatgaggatttttaaaaattattttattttttattaccaaaattataagataatattgacatcatataaaaccatatactgtaaaccctattaatttattttttttaaacttgacaaccgcatccctcttctctatcatttatctgttctcagtttctccttttttttttttcaaaacaaactcaatcaatctctcaagaacatatcaagtaagttttctatcattttttctaatatatatcattactactattatttataatattactcaactttaacttctttgatgtggtgatacaattttgttttaattaagctgtggctaaagtagtttgaaaaatatttatttgtgtgacgatttacatgtgtgtaaaacacaagtagtaataattgagttttttatccattatttctaaatttttgtgattcaagctgctaatttgtacctgtaaaaattgtattgatcaatataaattgggtaaatggcagcaaaaccccccaatactttcgttttggtttc

SEQ ID NO: 310537 - DNA, 1641 bp, Cannabis indica
aattattaaataaatagttttttacatttataggattgaaattggaaaatatagcattattgaaagaagaataagtggttgaaataaagtggcaaaattgtaatcctactcttgcagctacttcattcacctcaaaatacgatgaaatcactagtgaaatccttgagctttaggagtgacaatttcaaaatttggaaggaatgagttcttctccacttattttgcgatgacatggactgtgcaataaggaaggacaaacctgttgctatcactgaaccaacatttctattgagattgcattacgtgaaaagtgggagcaatttaatcgtctttgcatcatgttcatgatcatgtccgaaattcttatgggaatgcataggccagtagagccacttgaaaaggtcaaagacttgatcaatcttatggaagagtagtttgaaaatctcatccaagagttctcatccacaaaattcaccggtgtcaaaggagtttgagaacacatcttaaagataagggatatcagtgctcatctgaagaagctcaatgttaatattccaaaaactttcttggttcattacatccttcacaatcttcctcctcaatatgggcctttcaaaatttcctacaacacacataagaaaaaatagagtatcaatgaaattatgaacatgtgtgctcaagaagaagcaaggctcctataggagtaaggagaaagtgctcacatgatcactcaaggaaagaaacgcaaaccattcaagaacaaggaaaaaaatcgaatggctccccaggctatcatagagaaggattccattaaatgtttcttttgtagacaaaaaggacacgtaaaaaaggaatacaatcagttcaagaaatggatggacgacaaaggtaatccaatttccttagtatgttaagaatctaatatggctaatattaaacttaacacattgtggattgattttggttcaaaaattcacataacaaattctttgcagggtattcaaaacctaaggaagctagtaggaagtgagcaaagaatcttatctggaaacaagatgggctcacgtgtggaagctattggagcatgcaatttagttttaagtagtggttttattttgaagttagaaaagaccttttatataacaagtttctatttcagttttcaagacttgtacctttttgtttttcttttacattttcatcagacaaatctttcaatttatataataaatctgaatgtgttggaatcgatattttgcctgatggtctttactgcatcaatttattaaataataccactaatagtgttatggatgttcacggtggtacaaaaagatgtattatgaatgaggattcctgtacattatggcacatgagagtgagacttatctccattgatagaattgaaaggttagtgaaagatgggttattctcaacaccttagattttactgattttgatacttgtgtgggttgcattaagagaagaaaacctccaagtctatcaaaattggtgtccataggagttctgaaatattaaaaattatacatactaatatatgtagtctagacatgcattcacatggacaaaaaatactccatcttcttcatagatgattattctattgggttttatgcccta

SEQ ID NO: 310538 - DNA, 1122 bp, Cannabis indica
ctctaaagggtgtttttgtagtagtgatgggatattgaattctaaattacatgtcattatcaataaaataccccaaaaacaaattgataatcacactaatttaatgttattaacttttagattttttactctttatcacatattgttgaatatttaaagtaaagataacaatttaatattactaacaaaataatttaaccttcataaagaaaatacagtattatgattctaaaagttcatttgtagcatttttgttgttgaggaaagatctctgcaaaacacagtctagaaaaaataaaataatagtgtttactttaaaaagtgtcaagatgatgtcgtttgataacattcgttcagtagagcgcgaaaaaataggtagtcaacattacaaatatatagtaattcattccctgtttgaattagtaatagagctaagtctaattgaggtttgatactagcgtgactcagaccgtacgttcagtgtgaaattaggaaaaattacttagaattttagatattaagttttctatagaaatctcaaaatatgaaaataaactaaacgagcctcctatttataggaaagtatgattgaatatttaaatttaaaatactaataaaatattcaaataaagagcatattctaggatatttttttttgtgttgatctggatcattgaatgagggtctgccattcaaatgttgactatagatattctacgcttgatctggtctattaatcttgtttcttgatgaatggattaggtttaccatctttacttgaatgatgacctttgatcttcgagattggacgaggtctgtttgatcaaaatttgaggctttgatacctaattcgtactttcccttatgactcaatttttgactaggaggattctaaatttggctttcttcatgaaacatcaattgaaagatattttcaatgaaattagaatcacgtaaatctcagttgtattcagcaagatatgccaaaacactactgcagtggccaacaattgcaccaggcccaaataccttttacggcccaaatcggaattacaatccttcaaaatcaagtcagttaatataactcactcatccaaaatacattgggctttggctaagata

SEQ ID NO: 310539 - DNA, 1335 bp, Cannabis indica
ctttgccatctttgaactcaatgttatgtagcttttgttggcaccatttaaggtgagaggaggaaaccatggacatttgaagaacccttgacacaagactcagatctatcattgtcaacaacatctcttctttttcacactcttccaaaggcttcactaccctctttaccaaacacctcttcttcccttctaaatctttcatccatagtttgttctacacataattaattaaaaaaaaagtcaaaaagaaagcaaaattatcaagagtaaatattattttagactttatattttgtaaaaattatctattaaaactttcattttttaaaatggtataaaatagatcttgaacttaattttttaccaaattaaaatttaaaaataacatgatttggaggtgttatgaaaagagtatttatattttttccatctgttcgtaccataaataggttttaagttagttatattaaaaaataattgaatttaagatctattttgtaccatttaaaaaaagaatagaatttaaattgtcatttaacaaaatgttaaatacaaatgatttaattaataacttttacaatttaaaatagtatttaccaatattatcaaattaattgtattataaataatcatggatttattaccttttggagtctcttgttgagttgggctaaaagctctaaatctcttgggtcttccacaggtggataagcccaaggagagtttttgatttttccaccaaggctttttaatgtcatctgttttgacaaacaatgaaaaagcttgtatgcaatcctctatggctttcaacacttggtttaaatttgtaccttctcctctcatttcttccttgtcatactccttcaagcctttcactaaagataatatataaaatttgcaagacaagaaattaattagatcacatatattttagataatatataatattatagagtttaagatcaattcagtgtacacttgttcttacttactacatattatgtttaaaatctttattgtttttaaggcatccacatgcaaatatttttcttcaagttgatattgatacattaaataattgaaataagtcattagaaccaaaaggaaagttacacaacaacttaagtggtaacaaaaccaatataaatatatggatcacttctcaatatgtattataaatacaaatgtataattgaatagagttgagtaaggtaatatgacaaagtagacgtatactcagggccggccctgaaacaaagtgggccataaggagaaaaattttttttgggcccttatattaaaaaaaatgtgatatttttcaaaatcggtaaaaaa

SEQ ID NO: 310540 - DNA, 831 bp, Cannabis indica
atatatatatatatcatgtgtattgtttaaggatgtttgggtgtgtgtgacaataatcgttttgttttggggtatgagttagatcaacttgtaagttgaaggatatatatgtaacatctttttgagtattattcattgatgaaacaaatttttttttaaaaaaactaaataacaacttcaatcagaacataataaaacaaaaaaaaaaaaaaaaacatcagaaaagtattccactaatgcagagaaacttcttcgtcaaaaaacttccattgatgataacttaccagaccttaaaccttgcacgaaatagcgactgatagtccatcactgcaattacacacaaagaattacaaaaaaatcaacaaaagaagattcagcaacaaggatagacaagaacagaggataagcaaaagttgtgaagaataaaaatttgtaaaaaataaaaaaaacaaatttcaacaaaaaaggtatgtaatatcaaacttttcatcttacacattcatatttaaattataaaacaatgttcatattttattgttgaactaattttgtttttaatttatatttcgatattttaagaattgatttcttctttattttttaattgtaatcgatttaagatattgcgtgttacttatttttattggttatgttatatacctggttctattttagttataatcagtttgaattatttcgtgttatttatttttattcattattataacactgttatagaaccggttctattttaattataattggtttgagttattttgtattatttattatgttacaaaactggttctatttcaattataaccgatttaa

SEQ ID NO: 310541 - DNA, 1694 bp, Cannabis indica
aataataattttagtaaaattagcttaaaaaaataaagaagcattatttatttaaaaatatacttattgatagtataagacaaaatgatcatttttacaaatattcacaaaagataaaatgttaattaaaggggaagcttagtttagaagaaaaagaaataagtagtgtacatgtttcaattgcttagtttaaatttttcataattgaatatatagtgagggctaattgtgtaattcaattagtgaaagcccaaaaagctattctcacttttatataggttatagatgtatttgattgccttgtgatatcctttttaaatggaggactgttcttagtagttgttgcttcatatgttgggtgtttcaaaacataatgtttatgtcaataggaataattttcacattcacaggccaaaatgactcattcacaaccaaaatcttttcctgttttgtttgtgtaattgtttttctgctctagttagtcagtctagggaattcttatccttttattttgttaaattaaaaaggaattgttttactgtttagttgctttggctggattttaaaggccaactatattataaatgatctgcatctatagatgtgatattttctttgatatgctgcaacatttttcattttaaataattattctttgatggaatccggttgattgttcattagatagtaaaattgcttatttgaattttaattaaacaagagaactttgatatgtgcagtcagtcaagatgctgatgcaaatccaaatgaagtatatttcattcacatattggtattgagaataaatttaattacttttcattttgcttagcatagaattctaactgaagtaatattaattgaaaattatttttatttgagtgattttttattattcaaaaactggttgtccaaaatgtcttggcatttaatgagggattttggataagactagcagcaagaacaggtccttgcaaatctgaggatgataaagtatggtttttaactttttaatgatctctatctttgatctgtgttcaatatctgctctgtctaacaatgcttctcttcattgatatgttctttcagaaagattacgaagaattagccgtatctgttatgagcattatagatcgattaagccataagacaaatgttaaaataaaataaaaagtaaaataaagcactttctgtttgtgtccatgacagtattttagctcatctgttctttatttcattcttcacatttcaggaaaagatagaaacatctacactgatcagaaaacttgctcactttataattctattggttccaaaatgaagattgatcttttatttgcagtagtgatgcttttttttgtttttccagtttgagatcatgggtaattggttttgtttaattttgaagaagttagaacattatttattctttagttatttgcaggccaaggaagatggtgacaaatttcaaagttctttcaaaatgtagctatgcaaagaaaggtaataagttaccaaaccaggataaatatcattgtctacctattcctatatttatttaaatgatacaaactgatttaacagactgatcttttgtatgttaaaaaaatagttattttcagatgttgtaaaactggtcatttttaatatttagattggaccaggaccacttttatgtgacatgaggcaacctc

SEQ ID NO: 310542 - DNA, 1442 bp, Cannabis indica
agggtcagaatatccttagagccttcgagtactagtgttccctcttcgacctgctttttaaggtcattctacatacaaaagtcaagattaaattagttacactttgtgaaaaatcattataaatttgaaatttcgaaacaaatatagatagaacttacaattttatccacgactttttgtgtctcgacatcaaactcacccttcttgttcttgtacatgttgatccacaaatcagctcgatcaacgtcatctatctggtgacccaattctttctccatcttctctcggaccttcctaacaccacctcgtccagtgcggtgttgtatttgttttgtttcctgctgctttgtgctgactttcgttttacaagccattcttcacttaatctatagtcaacaaatgctttccactcttcagggtcaatcacattttcataaagctttgggggcttgtctaaaagttgtggattgtcatctttgtgtgtgtagatgaagtttgttaggtaggatttaaattccctccacctatcaccaccaactgacaacacataggatttcgtctttgtgccagttataaacatactctgtagaaattaatgtaacacatcaccggttaaagataaacaaatgtaattaatttaatttattatagttgaataaaaaattaccagcatttcattccacaacttatctttcacttctttcgatataagtcgccaatcatccacaagcaatgtaacgtggtggcgaacatatttaccaatctcactatgaagtttgtttgcaccatcactaatagcttgaccccatgagttgtactcgacttccttcttcttcccgtcgctcctcatctttatcatctctctaccaatatatttaccacgtacaccggggcctgattcattcccctcttcttcttggtgatcttgttgtacatcatcttcgctgtcatcagcaacagattgaccgaagaggtccaaattcaaatttggatcatccataaagaacgtacctacgcaataaaacaaaacaaatattaaataacaatataaaagtatgacaattcagcaaattaaaatgatatacataaaatatacaaagtaccattacatcgcgtatcaatgcgaatatcgattatgggttaatattgatatcaatccatatcaacccataatccttctccatcctcacgtgaagatatgatgtcatccccaacagtcacatcaacaggcggtggattgatttcgaaagtttggtcactaagcatgagatcatccccactagactcttttttttcatagtctttcggttgtgttgtgaggacaacggaccagcggtcatctaatggatcactcatgtaaaacacttgaatggcttgtgatgccattataaacctatcatttttgtgtcctactcgattcaagtccactaatttgaatccta

SEQ ID NO: 310543 - DNA, 768 bp, Cannabis indica
aaaaacactaattggaattaaccaaataatagtaaattaataaaatagtttttcatattaattattaggaatattagctgaactttacattttttaacacttaatcacaaaaattaaaattttaaacctactgaacctagattctattttcctcattacacttccctccaaaattttcggttaagtactacagtggactgctcatatatacataaatgtacacgtgtcacgcttttagtgatccacgtaattttaattattaaaatactacaaaaaataatttaaaaaatgaaaaataaataaattataaacaatatatttttatttttttatttttttctctttcttttcttcatcttctgaactaaacaagactccaacacccacccacttcttcctcatcctttttttattttattattattatttttttttttatatatttcgttaaatttcataatttaatgttgttagtttatgaattcaccttaatatggaaatgaaattgaattaatagattactatttattgtgaattattatatctttcaatcattttataagaaaatgtattcctaattaaaaacaaaggagtgtagagtttgaatccaatcatgaactaatggcacgtttactatacagtaatcagaatcggaataaattaatggagaaatgtaacggaataaatgaaaaataatcggaatcaatatttgtaatatgttgtttactaaaattttttagaaatggaatagttgtaatttatcttgtt

SEQ ID NO: 310544 - DNA, 2518 bp, Cannabis indica
aaaaaccttctaaggcttgcccctagccgctccgtccaaacattctaaatcctgtaaaggctcggatgaagctggtattgcaaatgttgagcggcataatttgcccaaatcgactataaccacagttgttgcttatcctgagaccaagaaggccaaagaagtgatcaacatatattaggattgggtaatgcccaaagtgaaagatcaacttactgggtgcaaaatcttgccacttgaactgctgcattgtgaatgtaatggccacatagttaaatcatgggaattagcagataattaaagatttaattattaatttgtgattgtaggtttcgtagtagaaaattagggctcattgtcagaaataggccatatgaaaataatttcttagttatggagatatatttgaattctaggtgcattatatatgttatatatgaattttacgaatttcatgttttatgtcaagtaatagtggaatgcgactatttggccattagagtcacttagatacggttgagtatcttaaaattagcaagacaagataattagacttttgatacgttgggattattcaatgttgtggtttaagactattttaccgttagacattttaggtttcttcatagtaaagaaagagcgaaattgacattttgccctaagttattgaatttttgtcttcaatgaattctagtatttcctttgagataaatcttattatttaggatatatattaagttagtaaattagaaaattatcaaaaaataaaaaattaactcttctccttctctcttctttgttcgaccctagcaagctaaggaaaaccaaggttttcttcagcatttttagacctaaatttaggggttgtttagaagggaattagatggtttcttttgccaaaggataaggcaggctcctctcccttttatccttgttttttaaaggaaaaagctaggtttagatatgcaagtttggttgtagtttctattcatgtttgggatatttaagggttgaattctcttattgttttgagttatttggagttagtttagctggttttggagaaagtttgttgttggttagctaagtttgagtttaagagctcaaacttagctcattaatggcaaaactcaacttagagtcttgatgagttactttattgttgaactatgtttatttgacccaaaatagggattcttgagagttatagaaagtttgtgttaattttggagttgaaatggggttttcgggaaatctgcaatagaaacgacataccattttctctgacgcggttgcttaacatactcacttttaatattgattcgaaacataagtgcgaaacttgtgtagaagcaaaattaactaggtcatcattcaaacagttgaaagagagattgaaccccttgatttaattcacattgatatttgcaatttaaaattttgttcaaataagaggtggtgacaaatactttattattttcattgctgatagtacaaagtattgtcatgtgtacttactaaaaagcaaagatgaggctagagagaaacttactctctataagcaagaggttgaaaataaacttaataacaaaattaagatgataagaagtgatcgatgtggtgaatatgtagaaccatttagtgaactttgtgcacaaaatagaatcatttattaggtaacaccatcttattctcctaaatccaatggagtggcagaatggaaaaattgcactttaaaagagatgatgaatgccatgttattaagttttagattaccgcagaacatgtggggtgaagctctcctgtcagctaattatctattaaataaaatttcccctgaaagaaagatcaaaagacactatatgagttatggaaaggtagacaaccttcatacaaatacttaaaaatgtatgaagcccagcctgtccaatctgacaccattaaatgccatatggagaaaaggccacctaccaaatcaacagttgaatttttcccaaggatgatcaatccaagccaggacatggaaagaagttggtctataaatacccctgtaaaacacaagataggggcaagactcatttcttaccactatttgcaaacacatttgtaataagctagataatactatactgagaaactccagaatattcctactaagcttcctcttcttcaagaggaacactaagaaaactgagtttctgtccattacatatcaacttgtgtaaacagttaccggccaatgagcctaataaaatggactcgtggacaaaggatagttaaccatagtcacatgttacaaatctcgtatttgttattctattacttcttccttaagctctaaaaatatttgattgccgaaaatcttggtaaacaaagttgatctaaaattaattttcaacttaaatctattttctaagaaaattcaaataattaagtatctataaaaatctaattagttataacttcttcatttaattaaatatgagaaaaatacatatattttatattgaattaatttcat

SEQ ID NO: 310545 - DNA, 2256 bp, Cannabis indica
aatgaggcaacttagatagacattaggaatatcaggaatagtcggggtttgggaaatgaccaaattacccctaggtgtaaagtgcactttttggagtgtgcaagggcaaattggtctttctgccttttttcctcttttgtcctctagtggagttacacatagtgattatctgatttttgttacatttaattagataagcataatttcatttagtggaaattagaatacaaacacaaaaaccatttctctctccaaactctctctctttctcgagctccctagaaaaaagcaagaggataggattttcttcagcaattcagagtaattatagcatcattattgaggtctaatcctagttaagcttcttagctcatccttttgtgatttcttaagtttccagatagctttctttgcatgtttttagatagggttctgtggttttgtataatatttgaatttgttttctgtagttgaattattgttatttgagttgatttggagttgtttgatggcctggttgtgtgtttggacaaggtttgagcttcagagctcaaactttggtctttaattgtcatttgagtttctggagttgtttctagtttttattgcttggagtatgtttgttgggatttaattagaagctttggaaggttttgtagcatttgggttcgaattgaagttgtggtggggtttttaggtgtttcctacactaaacaggtcgactggtttagtgggaccgataggagcaggaaatccagttggtccccaagaaacgccacagaatcggtctaccagtttgggcaattttgggaaccttagcttttcccgtttttgtgatattttgggtatttccatgttatccatcgatagggaaacttttagtttcaagtttatgtctcccaaaagtgatttagcgtatcactcaccaattctccaaataatgtgatttaggggcctgtaaatcgtcgagcagcagttccactcaagttgactggcatgcttaaattcagaagtgaggtaagattagtataatgatatgcatatgtgattacatgtttagcgtgcatgtttatgaatgcctgtaagataacatattataatagcaatattagtgtacatagagatgcactgaatatcgacagtatatgtttggctaagtacttattgatgccatcacattggtacgagaagaagagtatgactagcgtaccgagtataggctaatattatggtcaatagtactattgtacaaatgttctagactcagtaccatgtgggacacggagataggattatgattaggtgtatgggcgcctgattataatctgagttatagttatgttattgattatgctttaattactgagtctgtcgactcacaaatattgtttgattatgtaagtaagggcaaggctaaggttgagcagatgtgagagtgagcggacgaagattgtacatgtcgaggtagttaggtctggagcgtacagtctttgggagaactgggcatattttgtatagtcgctagttgacaaatttgtagtacatactttgtaacggttgtaaatattttgtacatgggatcctagtgatatttatatatgttattttggaatctataagtatctaaaaaaagttttaattaatcacgattttcaataaacttgttaattagcaacgagctacataattagtataaaaccacgataacatgtcttaaatagtagggtgttacaatttggtatctgagacgctagattgtcttctaaagatcttcacgacatgtataatcatcatcagtgatcagctagactcacagttcagtaagcctttatttccttagtagtttattttattagtatgttataagaaaatcctgatagaaatcatgttagtagcttaatagttgaataggtgcatgttttaatttccaaaataagcggtaaataataaattattattgattgcgatctgaccaggctagctcttggtttcacggactgttttaatagaatggacaccaggcgaaacacgaagagccagagtaactcggttagatccagtggcggtcaaggagttcaaattcacccaaatatacatggccgagatagaggccctagagctagggcacgcgcccgggcagattgtaacccgccgcaggctgcccatgagtgggaaaataagtttgcaataatgcaagatagaatcaataatgaaattagatgcctaaggtagaagggtgctcctgcaatgcctgct

SEQ ID NO: 310546 - DNA, 1134 bp, Cannabis indica
ttttctcatattaaaacaacagtaaaataacactacaaaatagtaatttgttgttgatttagtaattttttctctttgccaaattttatggtttttttctggtgtttctatgattccggtgttgatttgtccgtccacaaccatgaaggagaggtgccgtttgtgttttgttactgtttacaatataaaagtaaatatattgggcctgagcagtataagagaaataaaaatgagcttggacagtaaaaatataaagtttgccgtgtcccagtatttttaaaaacatttggtaaaaaaacagtatttttataagtttaccataattatattattattataatactattgaattatttgaggtgggcactcctcttcttctagtatgatgtagctttgtcattgcattgaaagattggtcaaaatgtgactaatcacttttaggcgttcatattaatttaactgacatttatacttttaccctcagtttctaaaaccgacatctatactactcacgcgatgcctctattatgaacctgacaatgctctataaatcaattttttctcacatgcatccctttaaatctaatactaaaagagtaaaaataaatcagatttcatccacaatttcaaatctgaaccaaaatacaacccacgtgtaccattttagatctcacacaccatttcaaattaaaataaaaggataattacgtcaaaaattctcaaaaaatttactttgacacaaataagtattcaattttaaaaaataaaggtaataattcttaaattcccaatttttattgggaaatttgaatttctatgcttacattaaggaataatttttttcctaaacttaaaatagggaatattggtaaaatgggataacattttcttaattcccacaataccccccatttgaaaccatcagccctctctctctttcgcctctctttctttctttctctctttctctcggtgccgcacccacacacccacggcagaccacccacgccgtcgacgctcaaaccatttcaccgcccccacccccaaatgcaccaccacggctcacctccaccacccacccactgtaccgccccctctcactctcttcgtctctctctcgaaccgaacagaaaa

SEQ ID NO: 310547 - DNA, 1324 bp, Cannabis indica
catctaatatactttgactcacagtaaattaatgaatatttttttacttaaaaatacgaatattatattgttgggcataacaatgggtacgttgccctaataattatttttaaataatttgtgaatggacattaataccttgtttgattcattaataaacctcaatatatgtaaaagtttatttgttataaacttataactttattacaaggaaagttttgttttgtttgttttgtttgtttttttttaattttttttgcaatggacatggaaaatttttgcaagaaaaaagagtaggaaaaatgttaagaagcattttagggtccattctaaagctatttggcctaattaggcgattttttttcttgggttcttttataaatatttttagtaaattaatattaaataaaatgatttgttgtagcaatatagatttttttttttttggaatttttacaaaaatactggattttggttaaaagtttacaattttactgtcacacggaatttttttttaaaaaaaaactttctttttattaaacaaccgtaaaataataaaacagaataattaaaacaacagctaaacaactggaaaataactgtagaataaccgtgaaaacttaacacaatacacagtataaaacttacacaacatttttaaaaaaaaaaatgactgtcctaacaagtaaaaaagaaaaaaaaagaaaaaaatttcagtttgtggtagtaaaaatctcaatagttattcatagaaaaaaaagagaaaaagtttagatattttcagaatttaaaagaattttatctttaattaagcagctaaattaagtatagcaactttaattttttttaatattattaattattacattatgatacataatggtttaatattgaaatttttacaccaaaaatacaaattacacactttattacatataaacctacacacggttaaagcaacttttttactttttctttatattttattacacaaataccacatgcacatcacatccatgcactagacacgtcaactcccctatcaaccatcaatcaatcatcaatcactttcatctctctttttcttttgttttcctttaattttttatttcatttcagtttttttttttaaaataacaagtaacatccattgttgaaccttaactccctacgattcctcaaccattttccctctcatttttgttcttcaaaattttttcaactcccactaaaccatcccataaccgttttctaaaacaatagtaaaacaacaaaacagaacaattaaaacaataatagaacaactgaaaaacaatcgttgaac

SEQ ID NO: 310548 - DNA, 1949 bp, Cannabis indica
tttttttaaagttttttaactttacttaaacttaaagtttgttctcttttttcgttttttttttttgttttttttttttttttgcatttttataaagttccacacagaaaccctataacaactaacatcacaattaaaatccatataacaaaccatataaaaattaccggagaaactaccgaagcaactcaaactgtaaatttgaaaaaaaaaagttaaaaaatagtatataatgtaatttcttaaaaataaataattttacattttaaatttcaaaattaaataattaattttacctaatattagatacaaccatttataacaatctcgttacccgattatgttcctcaaaaccctgctatcgtatggtttcaacaatatcaaattaaacccccactctcaacaaagaatgaagcactacttcaatacgcttatattatttgttgagggcgttttaccaatagtacaaatactcgtaaaacataaaaaaaaaatactaacaaaatagtcatgaacataaaattaattttgatgaaacaatattacatttttttagtattttttctgaatattttatatagaaaataaaaaaaaatacaaatatatattatttttacttagcaataaaattgtcattgaagtgtgttcaataaatatttgttaaagaaaaaattagactactttaacttttattgtttaaaatatattgaaatcaaaataaaagtaaaagaataatattatatatacggagaataattagtatttttatctcttaaatatttattactaaacctattttcaatgagagacataaaaattaagatatatttgatacaaaaagttgttttgtgacatttttacatcaatttttactattatgtttaatgcataattgtaaatcttgatgtaaaatttactatatcatttaatgcccacttaataatttattaaaaaaatataaaataatactaataatacaaagataaatataaaatttaataataataatgcaagtcatttaatgtaaaagagtttgttaactaaaattaataataaaatattaaaaatgacatattagtaaatataaaagtatagcatttattataatacaaattttgcatcatgctatgttgtaatccaaatttaaattacttcttgttacatgacatatttgcatcataatttaacacactattggagtagaattttaacaaagtgaattatattttgtatttgtattactcatttgcatttctatgagagatgctctaagttgtgccccttattgtgtacaacttgttaatagtaatatagtcattttgtgatattttatttaattttattgtgaaatgaattaagtggtgaattgattgttgatatataaaaaattatgatagaataaaaaaatattttccttttttttttaataataatttatactttactttaaattttttaattattaaaataaaaaatgtgaaaaatatttaatttgtatttatattatttatcacgttatttattttacaataaaattaaatagaatatgataaaaaaatattttattgtaaaggttatattttgataattatcattaacaaaatgtatattataagaaacataatttgatagtgtaaaaaatttagagaaagtaaaaaatactaattatatataaaaatattgaaaatttttagtgtgggtacacccattttgtcactatattatgtgggcaatttcttcgcccttgatgagcatcacttttgaatgtataaattttcattataaggttgtgtgtagtagattaaaaacctttgaaagctgaaatagtctgaagtatatctgacactgacactaaaaaatataaaatattgaactaattgagaagagttttaagcctccatgggtccattaggggtgtgcagaaagtcatcttatccaatcccaaccga

SEQ ID NO: 310549 - DNA, 1143 bp, Cannabis indica
gataactaatcagattgtaaagagttttatttagggcataaaacccaacacctccagaggtgaaatgcaaagttacaatagaagaaaagatgttccattgtttcctcaccctccccacaaatagggcaagacacgtcatcaatatgaatccttttagcaagagcaactctgataggtagggcatttgagagaatactccgccaaaggactttttgatgctccaagattctagagctcaaaagtttattccaaagagcgggagcaacattggtggaaggagcgcccaccaaggcctgaaccagataagcagatttagtagagaatttaccatttagctctttagtccatatccatttgtcacaggcttcacccccgggcctaccccctttgatgatgttattggtagtctccaagtcaaacaggcagtttagtttgggaacatcccgatccccattgttagtaagtaagtcagctactttttttttatttcgcgggacgcccatttatagggtgaggatagaagtcctggccatggatcacccatggttcatccaaaatgtccgcgtccttcccatcggatatcagtttacaagctcctttaatttcataagaatttccttagacttcacaacattcttccagaaccacgagtctgaattcacgtcttaggaaaacttcccaggaggtcacccatcctaaaattaccccatgtcaagcacgcttaatcgtggagttccttcttgatgggctaccgaaaaataagatgcaacttgttaatattggtaataccaatcaatccattaaagccctcttcaactgtgcagtcccatacctacacactcttagaatcgttccacttgaccttcccgaggcggtgtgggagtgcacagcttacccgatatttcctattatggatcacaggactactggctgtcacaattactttgtaatttcccccgcatcaagcctcaattgagcccatcacacacgggactactgactgtcataatcacccccttacgaggtctgacattcttatctacctcacttccggctaggtcaaggcactaataccattttgtaatgtcctcgcttcaagcctctattggacccttacacccactaaatgatgactcatataca

SEQ ID NO: 310550 - DNA, 1989 bp, Cannabis indica
aattctctctctttttctatatctatatctatatctatattaatatataagtacatgtgggtcagtccaacctcttagctcaccttccactatcctatatttattaaaactttctttcgtcctagtaaactcgacccctagctagcttatataaacttccatactcaaaccattttcatttcctcttctcattattaattcaacttattctagtttgaaattaataattaataaacaaataaatcatcctacataatcttccatggaaggcaaattagatcaacatccatctccaacaaccctactgcctccaccaccaccaccaccacttacatctaataatttatcatcaacatcgttattaccaccccaaattggtactcctaataataatttcctcttctcaacgccaccactgccgtcacagcaatcgcatccatccatcctcgtcgtcctcaacgttactaatgaataataacactaaccctaatcaggaaatcgattggatcagccttttctcgggtagtggtgctcatcaagcagctgcaggtgggtttgcatccaatgagatgatgacgatgatcaataataataataataataaaaaggaaaaatgctacgatcatgacgatcataataatattaacgaggaagataatcagagtaacaagaggagagcccctgggaagagtaggaagacagctcggccaaggtttgcgtttcagacgaggagtgctgatgatattcttgacgatggttacaggtggagaaaatatggacagaaagctgtcaagaacagtgcatatcccaggtatatatatacatatacatatacatatatattcatatttttgttgcatgcttaattataagatgacgtctatacatatataatattaaaaaatttaatagttctagacaaattatattgatatatttgtttagaaaaaacttgttttcattcaatagttatgttataaaaaattttcttagcgataatatcaagaagacttctaaaatattaatggtttaatgaggtgtatacatccatatatatctgaatacatagtactatctacatgtaataataaggaaaaacaaatattacagtttgcctggtaaaacacaacaagagaatctaatttgtcattaagggaaaggctaaacattcggaaatcttatctatagatgtttgttaatttatagccaggagaagacaatatatataaatacttatatgctactgtttatatttgtacgtatatatatatgcatgtaaattatcgaattgtaattctaatcaatagcatattttattttgacatgcatgatctctcacaactgtacataaaacaggtggtatatatgaaattgatcatgattaatcaagcatgcatatggacaagtataactaaaccctcttatttaagccatctcctttgtagagtaaaagtaattataggagttaaaacaggattatattaattagttaattatatatatttatgtttaaggtaaataatcatctatatattatacatatacagatatatttatataaacaatcggccgatcataattttattgtctatttaggatttttgtccccatgaactataacataatatgtattattgtgcctctaaacttttgagtctattacaaatagtttctaaactattcagagtatcgtaaattggtcattctattaaatttttatcacacgtgataaaataataacatgattacttaacaaatttttatatcaagtatataatttaacattacaaaataattatgtatttctaaaaaattattatactaaaattaattaataataaagaaaattaatgtaaaactaaattaaaaagaattatttatcatataattacacatgtggtgttgatacataacactgacgtggtaactgatattaagcagttatgtcattattttgtttgtccatgtcatcattttatttgttcatta

SEQ ID NO: 310551 - DNA, 1551 bp, Cannabis indica
ccatcccagttcttaagggtcgctctcctgttcaatgttacgctgatttcatgcgttcatttagggacaacttcaaacaccttcttggtgacaccattgtggtaagtagtgtagttgatgctcttgttcttcttcctattattttttagtcaatttggctaaaaaaaagttttgcatgtttggttttgatcaggaaattcaagtgggaatgggtccagctggtgagcttcgttacccttcatacccagaagagaatggaacttggcgtttccctggaattggagctttccagtgttttgacaaggtactgtttttaccgttcggaaattcatttatagagtttgtattaggactagttcacatattttggtatttttaaaacaataaaataaattagctatataattgtgaatatccatttagctgaatgtacataaatggtgctgcatatgcagaagaactgtagaaaaaatgtgtaattgaagcattttgtagagagtagtgttatggtcacatgttttgtaaagaatgatagtcataagtatttttatgtgccaatgaattgacttgaatcttgattattgaatacagtacatgatcagcagtttgaaagcagcagcggaagcaaatggtaagccggaatggggtagcacaggtcccactgatgctggtcactacaataactggcctgaagatgcccccttttttaaaaaggaaggtggaggttggaacgctacttatggtgaattcttcctcacttggtattcccagttgctgatcgaccatggggagagaattgtctccgcagccaagtctatttttgaggacactggtgcgaagatctcagtgaagattgctggaattcactggcactatggcaccagatcccatgcccctgagctcacagcaggttactacaacacccgtttcagagatggttacctccccattgcccagatgttagctcgacacggtgccatattcaacttcacttgcattgagatgcgggatcacgagcagcctcaggacgccctttgcgcaccagagaagcttgtgaagcaagttgccctggccacacagaaggcacaggttcctcttgctggcgaaaacgcactgccccgttacgatgattatgctcacgagcagatcttacaggcagcgtcgtttaactttgaaggtagcaacggagaaggagagatgtgtgcattcacttacttgaggatgaatcctcaactttttcaggccgataactggagaagttttgtgtcattcgtgaagaagatgaaggaaggaaaaggttccaataagtgttgggagcaattggaacgggaagcagagcattttgtacatgttactgagcctttggtgcaagaagctgctgttgctcttatgcactgagaacatataacaaaacctatacatttaggagtataagccttgtttgaatagacaaacaaggacttgtataataattgcaaaccaaaaagtttactggttttcattccacgctcctttttcttatgctgtggattgaaatgggttttggatatg

SEQ ID NO: 310552 - DNA, 3886 bp, Cannabis indica
ttgaaattgggacttggacccaatcccgaacatgcaccaagaccaggacctaagactcgaaccttgatgggggagttggacttgggcctcggaacctagacccagttcagaactcgagactcgaacccgacatagacttgaacccagatcgatatcaaaatctgaaccgagactcaaatcaggacttgaaccccgatcgggtccttgacccggaccttgacctaggacccagattcggacttgggacccgaagtgcaactagattgggacctgagaccatgaaccagattttgaattggggcttggacctaacccatagtgagtgtttggatttgggacccatacccagactctcaaacccaggcctggactcagacatagaccctgacccagacacagacccgtaccccaaacttgggtccgagttcgagtcttggtttgagtctgggaactcaaatcttaccaagacccagacccagaccctgactgggatgcggacctaaatcaaaactcggatcacgactcgagacacgaactcgaaccgagacacggacttggactaggacccagacccaagacccggaccgggattggacactcagacctggacccaggacccagacctagattgggcactcaaactcaaaattagaactagaatcgggacctaagaatgggaatgggacccaagacccgaccccagtctcggtccaacacccggacctagacacgaacacggaccaggacccaatatccgaattagaacgaaactgggacccaagattgagatatggatattgacccacgactcggggcttggacccaactcgtagtcgtcgtctagatcttggaatcattccaagacccaaacctggaacaatttcgaaaccaagacccaaacccagactcccagacccagacatagactgaaacacaaacctagacccagtcctaaaccaagactcggacccagaactggactcgtagcagaactttgactcgaacacgggacttagacacggaccgtgattaggactaggacccaatcccgaacgaggaccgagatgtgaatctggacttggactaggaccaggactgggacctaggactcaatactcggacctgggacctgagaatcaaactgtgacccaaacccagactaggccaagacctgacacaatgacaagtttcgaagacagaccgagacctacactcgaactggtaccctaacactgactgggacctaggaccttgacctaaattggggacgcggaccgaagacccaaacatagacccaaacctagacctgagacccgaaccaagacccaagacaagagctagaacttgacaacgatctggatttggacctagaacccaggacccaagacccatggcttggacccgacctatagtcagtgtctaaatctgggaattggacatggacttgaactcagcatgtggttggtgtatggatttggcaccaagactcgcacctgaagccaaacacggacctagacccagaccaagactcagacccagacccacactcaaaccttaaatcgtaccctgtgacttgaaattgaaaccggaactggaagcggacccttaaacactaaaccctaaaccttaaaccctaaatcctaaactctttacacttacccgtaaaccctaagccctaaatctataaacacttaacccaataccctaaacctcaaaccctaagctggacacgggcccaaacccatacccataccgagatcagaacctaggaccaagacccagacacaaatctagacccgaacctagacctagactcaagacctaaactcggaccctaacccagaccaagacctggtccgggacctagaccttgtctcggacctagattgggattccgtcccgaactcgaacagggatctggactcagaccgcgactcgaacccagactcaaacctaaacccgtactgggacctagacttagacccaaacttgaaatccaaacccgaatgtgaacttggacctaggctgggacctaagatcctgacttagatgggggacttgggccctaaacccgaacttggaactagacctgcaccaaggatccagacccagataggagacttggacatgaaattgagccccaaaaccgggaccgagacccaaaaatttaccccatacttgagacacggaacgtgaccctagacccggaacccaaacccaaacttaggacgcggcccaagccctgggacccaaacttgaacaagatcaaaatctgaatctggacctaaggcttcgagttgactcgtagtcagtgtttgaatccaagactgagacccagatccgtacatagacttatacccggacccagatcaggattaagaccttatccttgatccggaatcagaataaaactaggcctaagagtagaagaaagagttgggagaataacagagcccaaacctaaacctaaaccaaaactcagactagaacccataccgagaattcgacctagaccgggacctgtgacttgggacctaaaccaagacctggactttgacccaaatctggacccggacccagaccaaaacccagacccaaaaactggcccagacccaggacctaagaactagactcagacttgggacccaaaactcggacccatactaggattgggacctgaactcggactcgaacccaaaccgtgacctggactcatactgggactcgagacccaaactcgaacaagaacacaaaattggacccggaccgggacctaggacttgaacatagatgggggacccagaccagggaattcggccctcaaaccgggagcagaacttgggcctcagaacatggatcggaatccagaacccaaccccagacccaaacctcgaccaaggacccatctcgggacctgggatcctggactctatgcttggacctgacccgtagtcgatgtctagatctgggacttagacctgaacccaaactcatactcgaactaaaaccaggactcggatacagacccacactcggtaaccaaaactgaaacttgaattggaaccagatcgggatcttggaatgcgatcgagacctagacccgaactttaacccataactggacccaaccttagaccctaactaagacaaaaacccatacctgaaccaggaccttgaccaaaatcaggacctgaatctagactcggccacaaacttgacctgaacctgtaccccgtgacttgaaactagaactgaaaccagaagccaatcggaacccatgaacaggaccaggaccaggacctagacctagacccaaaactgtaatcggaccaggacccagacttgaacacaaacccaccctgatattgggtcccaaacctaaatccaaatctgaaccgcgactcgggacccgaacccagacctgaacgcagacccgaacatggaacaagactcgtgacccataattgggattgagacccataactgcaccaaattctcagtcccagagctggatcgagacctagaccgggacctggtacatgaacctaaaccagactaggacctgtgattggaattcagatattgtcccaggatcttagaactaaggcctggaccggaaccattgtcggtttcttgatctgggactcggagaacgaccaaaagttgaaccccaaccctaacctaggacccgaaaccaaaacctgaaccagaacatgaccaggaccctagaacaagattggggttgtgaccaggacctggacttggaccaggacccggaactagaccagaaccctgttaggttttgtgccgtaaataaaaccctttacaatctgattagttatcaatataagaaatttgaagtgatttatgtttgcatgagttttac

SEQ ID NO: 310553 - DNA, 608 bp, Cannabis indica
aaacaattacattgaaactagcaaatgaatactaaaaaaacatacggcacacataaaacaaaacaaatataatcattctaacaacaaaatgttagtatgacaactcacaaataacaagcaccaacaatgaacataatagatcaaacaacaaaccacacaatatgaaaatatactaaagtatctaaataatacaaagtaaaataaaaaaattcctccactttattgatcattgtgatgaagtgacttagcatgtccatggttgctagcaactctccaaaaattattcaggtgttttggggttaattttttatgattggatatttaactactattgaggcgattattatgtgaattaaacttgggaaaagagtgtgtttacagagtgagagaagaataaaggttactagaaggctctttggttttaccgtttaaaaattgtttttagaactcgtttgataaaaaattttaaaaattgtttttaaaaaattgagtgttaaaaaattagaaaacagaaaacaccaaaatgctattttcaattttaaaaaacaatattgattttttttcgtaagaaaaatttaaaaaaagttttcaaaaatttgtgccaaaga

SEQ ID NO: 310554 - DNA, 1472 bp, Cannabis indica
ctgattactcatatgacattccaggcttccagctataagcactactataaaattggactttagagacgagttttaaggtctttcagcatcaattttaacgaaatttgctaccgacacttttttcgacgacgttgtaggggttaaaaataaagactttataacgtcggttattatgaaataaccgactccatatggacttcttatatttttttttaactttaaaattttgtgttttaacataatttttattaaaaatctaattttacttttttcatatatattattttattattaatataattaaattatatataataagcatagaaataaattaaaaagttaaataaatatacatttacagtaagtgtttgtatattagctatcttttcattaacattttatattttataatatgtatttgtatttttatttttataattttttcagttatgttttgtataataattaacatattgaatattaaataatgtgtaatattttaatttttgtgtaatttaacatttttatacatttaaattttatgccacaactcatactcattgacagatttattacaatttacacagacagaaaaaacatggttctgatgaagagatgcaatagctatgttggtacatggttgactagtgaaattggatgtgctgtagggggttggggaggtagacaactagagttggctagaatcaaaagtatatagcccattgtgatgtttcccagtagcagtgtggaattactcacctgatccttgacataacacacatcagggtagaaaacaaagtaaacatcattatctgtagcaaacttagagacactaagaaggttctttgtgactttaggtacataaagtaagttattgagaattgaaggtttatgacaagtattaggatgcatatatgtgttaccaatttgggagatgggtgaagcagctccattgccaacatacagttgtttagggccttcataatcagcttgtgtcatgatgttcagtccatttggaatgtagtgatttgtagctcaagaatcggggtaccaattgtcatcttgatcctgggttgtgtgagcaatattggcctatgattgagattgatctgttgtagagaaaacactagtgaagctcttgtcaaatctataaaaatagtcgataatagcatgaccaagtttatgacatagttgacactgaattctgtttggtgcaatagggaatcgatcttctcgtcctcttgccatagatgtggcatgtggattagtgttgcttcttcgagaggagctaccttaaaagtttcctctcgtgttgggaaaagaggaaaaattcaaagaattgaagctatttggccaatactaacctctggaataagcaggagatttgtaggttcaatttgtttgagcaaagaatgctttcatagctagatcttgatcagtagtggtcatattcacactaggttcaacttctt

SEQ ID NO: 310555 - DNA, 2267 bp, Cannabis indica
cttaaacatagatattttccagcactttattggattgttagggcccgattcgcagtctaactcgcagtccacatgtaaaactgtgtagaggatcttgtcggctcctttcttgaccagccaggcacttgcaagaagcaggctggttagccttgtgctgtccaaaggctgaccagctataggatcggccaagggtggccgaccagctcctttgaggcagttggtttgtcacttgttgtcccatttgagtgctagggtccctattggctgaggtggtacttgaccttcttattggtgagttgtatttccacataacactgattgtgtccacgtaagcaatgtcacgtcaggtgggaaaaatttgggataacatttacccctaaagtctctgtgcgtacgtttgtacggatagggacttactagttaggttagagtagttggaactgatgtagcctttgttgaatggaagttgctgcatttttagcctttcaaaatactttaacttgactgtcctgatctcatttgctgctgtaaactaactgcttttctatgtctctttgttgtgtatgtggaacaagtgaagtattggtcccatagatactatttaagtgcttttagcgggaaacccttttcattttttacttttcactttctcactagaaattaactttttaagaagctcctccttctctctagagggccgaatccacatagcatcattctcccaggatttttgaatccaagcttcccatcttcttcatcaacagtttcttattatgggcaaactttctattctcgctatttcacttgattttgccatgaatgcatgaatatttttctttgctttgaatgtcttttgattcccacattagattgttgtccttttggtattttgatctgcatgatagccttaggatacataatgtgtgatttctagcaaaaaagatttgaatctgaccttcgttgtgattcttggatctttgagtcacaaagaacacaaataacgtgtttgagttcttgaaaaaacacatattcagatctgtacagatcttgcccagccaagcagatcttttttaagacctagtcggccaaggatggccaccatggggtctggccggccaagggagtataccccataggctggctggcgtatgcctaaaaattgggtttctggctggccctaggctaggtcatgggacctggccgacctctaaggcttgggaaccctggctaaccaaggccaaggttccaagcatgcaaccattttttatcctctattgacctcgcctagggtcttgtgatggccttggaggcatatacaactgtggtcttatgcgtggttccccttaggaactctgtatgagacttggtagaaaatccattatagtcaactatataatttaggactcattatatgtctaagtaagtgtacttaagatggtacttggttgatattcaaccttgctcattgtgatttacctagaaggtaccctcgagtattgttgactagaatatgtttgtagctttctcaggttgctcacctcctcttgtctcttctatgcacgtgattctgagtattggattgggggaggtgacagccgcgtaggtcccttagttattctgcgatcatgtccaaaacaaagtagacatgtcattgggcgccaccatgtgatccctaagttgctaggatggaaacaaggggtcgagtcagaattgtagagggggttactcaaccccatattgatgtagatccaggggttgaccacgcaaaggtgcctgaggttgaccagggggctgagagtcctgatattgaatctgaagttgaggaggctacacctgtcaggagaaggagataaagaacttttattgtcctctctaatttccctttgggtacttacgatgacaacgataacccgctgaacaagcttggtgaactttcagtgttaggcttggaccacatcttgattcagtcttctgagcctgagattctggatgctaaaccatagggagatagttgggtctctcctgcttatgccctttctgttgatgcttttagcaaaataatagctagtggtctagtgaggggcgttcactgtgagatacccacaagagttcagagggcacaccggctagctctgttgggaatattttaccaagatctagatttactaacaagtatgttgaattaacaaccttttctatgaattctctaaaacaatgaaagtatacacataagggtttaagaaaatcttacattgattgcagcggaa

SEQ ID NO: 310556 - DNA, 518 bp, Cannabis indica
ttggttgggaaggttgacaaaggtctctataggttcgaccaacctcttcaatccatttctcagtccaactgtaactcctccactacagcagctgagtcttcaccaaaagctgcatttcagtctcaaataaatacctccagtgtacccttttccaactttaatctttggcacaatcgtttaggccatccatctaagataattgtgcaatctgttatggccaaatgtaatatcactcctatcaataaaaatgcttttgatttgtgtactgcctgttgtcttggaaagcatcacaaattatcgtatcctaattctgaaactgtgtacactgctccattacagctattacacacgaatctatggggtcctgcccctatggtctcttcaaatggatatcgatattacattagttttgttgatgcctattctaggtacacttggttctatcttcttagaaccaaggatgaggctctcccaacatttatcaaatttaaaacacagattgagttacaactcaatca

SEQ ID NO: 310557 - DNA, 730 bp, Cannabis indica
acaattattacaaaaataaagtaataataacaattgtaattaaagtcattaatataataaaatataataagattgatatatagttgaatcataacctgaggagaggattaatacgtttaccttggaactcagcacaatcaatgactctgtctacttccttttggcaaatgaaatggtaggaactgagaaagagaattggggtgcagaagagacagaaacaggtaagcaagtttggttactaatacctcatattaaaaaggttactacttactaaatatataatttatataatataggattgaaatttgaagaatatggttatgttgagttgtgagtgtttgtttgtgtgtgaaccacacattaaaattgttcactatgttcttctcactagcacaccacacacaacacaagacaaacactatttggatcataagaaaaaaaaatgaaattataacaaatgactttaaatcatagcactgtgtaagtaaatatcttcatttcaaaacttgtaagaaaatgatatgtttacactatttattatttatattgtcttttgtcatagaaaaaaaaaattacatatttttttagaattagaagtaaattacttgaagatcctgatatatctatattagttttattaaaatcttttttattttaaaattgtgtcaattttttataggttgttggtatatatattttgttgtatattaatagtggtatataattttgt

SEQ ID NO: 310558 - DNA, 1187 bp, Cannabis indica
acttttcttgtgactcttgaacttaactcacctgcacctcaaatcaacatatataatacatcaatatataattaacaatcatattattcatattaacttagtgtagcctaattattctttaagtatatatataattacgttaatgttacgtattaagccacttaaaatgttagttttatttaaagttttaatttttattttattttagtaatataattatttaaacgatttatttaataaaaaaaaaaaaaagtgtgtgttatttgttaattaaatattcgaaatattaggaattttattttcggcattgtaaattatttgaaattttttgaaaatttaaaggatactactgtaactataacgaataccgttataaaaaaaaaaaaaatattccgacacgtgatttcggacttgaaaattaactaagatattataatagaaagttgtaaggttatgatatatattattaattaattaccatccggggcaaaatggaactcgataagagtgccaacaccaccatcgccttcgacaacttcaatcttctggattgaacctttgaggttgttcacaacaagtttccccagctcttgggcatttccatagatctcccaaactttgtttgcagctgctttcacttccaactcatggaaaacttgcccactcaccattttgtttttctttggttttgattttgtaggttgatgtttttctttgaagttggatatatggcttggtaggtattgttaatttgttaccattatatatagagatagaaattctgtatgtactcaattttgactggtgactggtaaggcttaattttgttagaatattgtgtgatggcggtcaagataatcaaactaaaataataaagaaaaaagtttgaataatcaaaggtggcgcgcggtggtactatataataatatattaataatcttacaacctagaagagtacataaatgccaaattaagggtagtatgctctggtagtctattgtataggtcacacttagaatatatttaaagaattattaaattaaaatgataattttaaaaaatacaaaaaaataataaaaaaattacaaaaatacggtttgtatagaatttttaatatatttttttttttacagttttttagattttatttacataaaatacagttttttagtgtatttttatattgt

SEQ ID NO: 310559 - DNA, 2063 bp, Cannabis indica
caagtaaactatgttgtagattatcatatcagttaaaccctgtaaactggtaaatctaggaatacatttaatcacataatcttgattactttccactgtgctaacgacacaataaacaagaatatcaatgtgataaggatttggatgagtttataaatcaaataaacatataaataattacatgaacaaaatgacacactaaataagtgatgaaaatacttctatttctttattgataattgaatggtaaatattacattgatatatagttttatttagggcacaaagcccaacacgctccttcgactctattaattcatcctcgaaggtgacattaggattcaggggagtctttgattttcgaggcttcgaagtcatgatttcaaagtctaggtcacctggttcaaaagtaatcgtgactctgggtaaaaataaaggcctagctagaggaattgatgataaattgggggattcaagccaagtaccatctcgcaagaaacaacgtttgccttgtttaatttcttgcaagaagcgtctgcggaaattggtaatgtcatcttgatgggtttttactaagtgttcgctaatttttgcatcatttatctctaatttggatttgggttctaaaattctgggtttatatgagatggctagttcactaggacactttgtttctaagtattctagacgataaacttttgaactagattgagacattgttgctaaaagaaaccaatcccaattccaggataaaatttatcaaagaagaagttggtaaatttgagaaacccagaaacctacgttttggctaaaccctaaaatttacccaggtacaattcaaccctaaaattgctaaaaccagataaggagataaaggtgctaattaagaaacaagtgatcaaacccagaaatgtgaaataaaaagcttgtaagaaaaaaaagtaaaaagaggaatcactttcggtttgaagttagttttgggagcaatggatggtcctacaatcgatggtataacaaaaaatgtggtgatccctctgaatgcttgaggttgaaaattaaatcggacaaaaatcacaagaagaatttcagcgacagagagggcattcaaagctttaagaaatctaggtatggtttttagcagagaagcttgaaaaatttccaaagtttttgaaatggctaaggtaatgaaaatgaggttcctttttaaatttatactcttgggtttatctctatcggattaaggaggcaattgatcgaacgtgtaaagtttaaaaaaggtagtggaaaagatggttattaaatgctaatgtgccttgaaaccacaaaaccgtcaaaatcaaaggacattcattttttcaaaatggattaaaaagaccctctataatcatttaaaaagcacttttcactgaaaagaattttttaagggtcaattgctatacccgaaattcggctggcacttcagaggaggacacgtgtcaaccttagagaatacgaatcaacgaatataatgacaattttattaaaggatattagaatggaataactcattaaatgcagagttgataaagtatatctatcaactcgcttactgtatagtcttatgcgagacacggatgtacaaactattaattaacgtattgacgagaaaccattttgtatttaaagacacaatcataaggataacatcaataatgcatagcgaggcatcaacctcgttacatataaagaggcattgacgagacaagttgaatgttagaacacttagcgtataatatacattatactaactaagtataatagctggaagagtctgagtaacagatagcgaggcatccatctcgctttaggaagacatattcttggtacattcattaatcagcttcaaccatcatttaatgtgatccactactccgtcaagttagctctcttagatagaagctgacattcaaaagttgttaactgttgaagttcaccttgtcaccgagaactacgattgtcagatggagcattttgtctttaatagcagaaatgatgggcttcacattatcaaccttgaaaagaca

SEQ ID NO: 310560 - DNA, 1068 bp, Cannabis indica
tagaaataccttatttctttgccgaaaacttaggacattggggtttcactagcccttttcattgcaatacaagaattttcctttttcatttgattttggattagcagcctttttagccttattagatgtactattgacagctgtaagaggcttcttgctattcttctttttgggtttcgaagtagaggaaatgtttgactctggttttgttgtactaaccgtagcattactagagcttggagctttgtttcctcgtttttgcggtcctccaattaaattttcaaatggctgaaggttgttgatcaaatcgtgaaagtcaaatgtcaacttgttcatgacataatttgaagtaaaggacagaaaagctagagttaaactatttacgatcaaactcacttcagtttcctgatgtataatagctccatgattttcagctttatggaaataactagccatttggagtaggtgatcacgcacattttgatgaggtttcattcgtgcattgattaaattctcggtcgcctcaaaacgagcttgatctgacaccatcccaaacagttaagttaactggttcatgatttctgcagctgtgagagtgttcggaaaccttgtcttcaaggtataaaccatgctagacagcagaaaatgtcgagctttattgttagcattctaccaaagctcgaacttttccttgactgcctcagttgcattcacacatggttgctcaagatcttctttagttaacacaaacaaggagttctcacctataagagaaatattaatgttctctttctatttgataaatttagctccagagagctcgttgtcagtgaacagtgacagaattgggttgttcatagtcatattgggtactacaaatatcaataaatagaaattaaattaggttgaatacaaaattatattcggaaattattaagcatttaacaaataggaatgacatgtgaaaatacaaaaataaaaatatcctaaataatttctaaggttttcaactcaatgatataagtgtctcgtttaggcgatagtgaaatatatcactagttaatagag

SEQ ID NO: 310561 - DNA, 1353 bp, Cannabis indica
ggattaatagtctcgatatcattttgtgtaacttcatgaaagtcctctcttggaactattgtggactttgtcgtgctttgatttttcaacatctcaagacggatttaaagactcatagcctaatatggtcttcctctttgacacaagacataaaagtgacaaagttaaaactcttattattaaactccagtttggtagcatggaaattgttgatcctcatggcttatctagaggtcttgctttgtgttggaggaagggtgttgatgctaagataatttctgcggactcaaaccttattgtagttgagatctcttcggaccccctaggggcagaggtggctatttttggccatttatggattttcgtctttaagtggtagagaacaattatggtctaaagggatactatgattgattctacaagggatcctatttttattgttggagatctcaatggaactctctcggatgctaaaacttttaactatttaaaatcgggtaacacttctctctattcctttgatctccaacagatggttaggggctcgggtttggttgaccttgggactaaaggccctctgtctacttgaaggaagacgtcttattattcctaaggtactccttgttgaaagaaagacaaacttgacagggccttgacttcgatagaatggtagatgttatttctcaaggttgtggtttctactcttctagctagcacttttgatcacaatcaaatcctcttggattcaaacagtgagggtgaccctatgaagatctttcaaatatgacaatatgagggctagagatcaccactccttttgggttgttaaaagagcttggccttccatctctaaggggaatccaatggtaagactccacaagaagctcgttgaagttagaaaagccttatctagctagaaaaaatctcagttcagccacttaaagaaacaaattctttatgctcaagttaagttgttcatgattgaggctaatccttcaccgcctagggtcattggtgggctcagcaagacaagaacttaatgatgctctttagaaggaagagattatgtggagacaaaaatccagaattacttggcttcaagatggggatcttagcacaaagttttttcatgctattactatcgtgagaagacagagaaattttattagttagctgaaagatgccaatgatcagtctcttccgactcgcaaaccagattggaaatgctttcttaaccaaatttcgagatactttcaaggtaatcccactaatttttctcatgatttcagaggttgcatgtaacgccctaatctatagggacaccatgtgagtgattttataaaatagtttaat

SEQ ID NO: 310562 - DNA, 1400 bp, Cannabis indica
aaacagataaataattagcatcaaatatcagttcaaatataaatgagatttgttttatttttattttattatatataaataatattttattattttattaaatataaataaaaagtcacccatgaatttctcataaaccaagaattcagttatatagacacactttatatagaatagatataaaatattttgtactaaataaaaatattgcaaaaaattaattaagtatactcgaatcgagattaaaatataattaaaaaatatgaatattttttttaaaaaaaaattacttatatatatatttatatatatattgaagagtacaattgcccacccccaaaggaccatatagacagacatggaccacaatatttttcatcacttccaattatttccatcgatcaactatgattttttatttttattatcacttgaattgtattaaactattaatgcacgcttcaatttataataccaactctctttgttgcattttgttttaataatttttattgaacactaaaaactaaaagaaaacttccaaatcattttttgtcatttggcctatgaaaaaagaaatgaagtactaatactaaacacaaaacaaacaatcacgtaggaaaatatgcatgaagacataagaaaaattctatatataaaaaaaaacttaattatatattttattattgtagaaatattaaggattcatttggtatgacgtattagaccatattatatggtatagtattatataaattatgatttatattatatttttatataatactattttaaaatttgatttatatgaaaagataatatatttatatgtcatatacaaatcaatattaaatataaatatagtatattatgtaaagatataatataaaatataatttaataaatactatataatacaagaggacgcaatagcaaacttgttattttttcttttattttttgatgaaaaaaaaacttgcaagaacacccacgtaatttaacctcactatctaattttttttatttattaaaaataagtgtgtttgcatttatatttatatgtgtaacgcttttgtcttgataaatatttaaacagcactaacaaataatatattattattagtataattaaatataaagtattatatattttaaattagtaattattataaaagaatgataaattgttagcaaaatatcaccattgtttggcgtgtctaataacaataattttttattacatcatttaattttactcaattatataagtttgtccctacaaaacaaaaaaaaatttagaaacgccccgatattttgccttattttacaaaaatactattttcatgcataatttgaaaagataaaaaaaataaatttaaatacaacagtggattttaaaa

SEQ ID NO: 310563 - DNA, 4733 bp, Cannabis indica
ggtaaaataattccaacagcattctctctaacaatcaggggaaattggatgtaccccatgggttcaataccttagccaaagaagtcataccttacttgagtgcagggtgccaaatcagttagctggagccccatcttttcatatgttgatttgaaaagaatattggaggaggctccgttgtccaccatacatcttgcccagtcatattcctgatttgtgcactaatgactaggggtcattgtgcgggaagctgacttgagtagcatctccttcagtgaacgagaaaattggctccctaagttttggttgcttggaacccctttctttgatggctaggatatcgcttttaggctcatgacaaagttttcgagcataacactccctagccttgcttgtctcgcctacgatgtggggtttgccgataatgacccttaggtgacccaccactggaggtggcatagggcctccattctgggcaccttgtgcccgagtttggtcattctgtacagaacaatgcaggtgaggattgttcttccttataatgaatttaatctcccttttcaaattttgaaactcgttggtgtcatgcccaaagtcattgtgaaattggtagaactttaagatgtccctcttgctcatctccttttcatgggagggggcttcttgtatgggacagttccctgagtggccatgaagatggcctcaggtttttccgtcaagagggtgtagcatgtatacttctcctccttatctttcttgttttcatgggagggtgcttcttgtatgggaaagttccttgagtggccgtgaagatggcctcaggtatttccgccgggagggtgaagcatgtatacttctcctccttatctttcttgtttcgtggcatgggagaagtattgcacttcctccttttgccactatttcttccactactattgttgctaccccctaatgtttttgccactagaggttcgcgtagaagtgtcggttcctgcatgcacctctaaaaagtcgcgggactgcagggtgccctgagactgcctattatcgacttaccctatttaggcttgttagacagcttcctccagctctgttaaagaactccttcatgttgctggttgagatcctccggatatctttctagaagtcacttaatggaagaatgcccccgtatattggccttctattgttggtggcctcagccatgaaccttttgatgtaattcttttgaggttctccttgtcgttgtttgacctcgacaaggtcttccaactgtgacagtatcagtgttgaggatgagaactttgcgtaaaattcttgagaaaacacattccaagaattaaatattcttagagctagcgtaaagtaccattattcagttgttttccagtgggtcttctctcccggtatacatcttccataccaacatcttaaacttgggcaagggcaaggaattaatatatgccgagaatggtgatccccttgacttatctagttcaagatttgaaggtttttgggtcagctatccctttgatcatgtcccttattttttctaactgtgcgtgcactgaaggatccgttagtgtagggacttggctaattggcccttgttgaacaggctgcagccctggctgtgccaaggtcaagccggccatattttgggagagagtatggtggaggccggcctgccctaagctttgttgatggctttcggccggccacttctagataaggtgactggtcttggtcagctagccctatgctaggtagggcctggccgcccgttatcccccgattggctggtacagccagtatattgatagggggtagatcgcaccagttgctagagttatgtggatttagatatctgaagtgacttgactcacttctcaagttgttattttgggtgtttctacccattcctagacccacccgattaaagattggcctctagcttacttgctcttagaggccttgggatgggaatccaccgtgctggtcggctaggggtgtaccttcaaggggctaactggccaggggctgcccaagtgggggtgttataaagcttgaaatccctggccagcctctcagaccgttgtttactgggaactaattattcttgcgacaagacctttgtcctcttttgggtagggaaaggtttatcctagtttctaaggaacatggttggatagttttccggttgccggtagaccctccccgatttgtcgactagtctccctttgagagaatctctgatgagatcctaacctcttccagcagttgtcttattgaactgccttatttggtcgatagcttctctgttacgcgggttcagctcatcctggtgagatcagaggatgtactcttggtcatccatctatcgtagaaatttgcgtctctattgttcaaatacatcgcaattaacagcgtgtggttctttagtttagccgacttgacaaacgacctctctatgtctggctaacttgaaatcttctcccaagtctaattccgaggaccaaatctggcataattctgaggaacaaatctggttgtggtgtttgggggatgctccacgtgggcccttccttcaatgggagaggccaatggaaggtcctcccttagaggcatgggttgattgttcagatccatagggatggttgtgtcgacctggccagctgtggtggccagattcatggtgcctacagaggttgcaggtgtggccacatccgtcaggttcgtggagattccaattgtgactagaacatgaacattaggatccatagtcatagagtcttgtggagacaagataaggcagaagttgtagccggagttctccttgtgttattctcctagtgttaatcatgatatttgattagataaattaataactcgctcttaataaaagtaccaaactattgacctcaaatttagataaccgataacagagtaaaatttaatgctgatacttgccacgtgttacacaatttgaatagaaatgtaaatagatacatgattttataaaggttcagcccccttagttatcgggtaatgacctactcctcttttagttataatgagaccaaagataataccacttagatcactatggtaatgggatctgaagtggctctcttaagattacaatgtagacaccatagttggtaaatctcaagtgagaatagatgagatgagtaatcagacttagagctttaggcttagggtttaagacttaggattttagggcttaattaattaatgccctttatataggagcgcttacatccctaatatcccttagaaatagataaataaaactattatttacataataaactaataatatacaaataactaaattgatcctcaaaaatagggaatttgctgatattttctctctatttacgtgggtagttaaggcccaatttgtggtttgacttgctgtccacaaatgaaagctgcacaacaaaacctgccaggccaaaagtttgtcggccatgcacctgcagagtgcatgctggccggccatatgatgcccaaaagtttgtcggtctattctggccatagggctgggtaggggtggccggccaacccccttgaagtggctgattcatcattttaccgtccttcctaagtaatcggacctcttgttagctgtagtgctgagtagatggcttggccttcttattggtgagatatactcccacgttgcattgatactggccatgcggagatgccacgtcaggtaagcaaaaattgggataacacccagatttcctaatttattcattgtaattatagaaaaatattaatttactattttatttcttatagattgaaggaaactattactatgtaattagcccctataaatagtggtctcatctcactattaagggacagaaaatttttcagagagaaagcacccaagagtgaaatcacgatctaagagtaatttgctcagagatccttgtaagagctttcaagagggaatacttcattctttatctcacaagttaatacaacaaaaaagggagtaggctattaccataatcacggggttgaacatctataaattctagtgttttctttatttattactctttgttttctattgtctatttattcttattgcttaaattaagactcattgtcatcggctaaaaacgagatcaataaagttcacataaaaaaaaattgttattaagcattattctctttagcaccactatgaggtgacatatagttattagttttttataatcattatcagtattcaaagtaaaataagtgagatccaatattaaattgcaccaatagcatatgacatttcacaaagggtgttaggaaccatacatagtctttagcatttcacgatataaaaaacgataattgtcccacctaaattttacttttgaattagcccctgcacatattaatcaccaaaaatacatgttggaattaaatccaactaattctttcctaactataagtctgttagaaacaaaagacaacttgcactactacaacaacctgaatacagatactatcaaatatcctaacagaaattaacacacaaattaaaatctacctgccagctcatctatccaagaccagtttctctgatccttttcccagcagtataaaagactgcttctggtctcttttttgggcagatctgaatactagagagaaagagagaacctgtaattgctctgagttcaaagataagaact

SEQ ID NO: 310564 - DNA, 890 bp, Cannabis indica
cggatatcacttatgcagtcaattacctcattcagttcttatcatgtccctgagttcctcacctccaaactgctcatagaattttacaatatctgaaaaagacaccaggacagggcattttttccctgcgaattcatgccccaacatcactgcatttgcagaaactagcctctcttctgcaatgttcaactctccttttttgccgatgctgattgggatagttgtcaagacacaaggagatccgtttcaggatattgcatctttcttggcaagtctctcatatcatggaaatcaaaaaaacaacaaatcttatctcgttcttctgttgaatctgaatatcgtgccatggcaaatgccacatccgaactcacttggatccttgccattctcaaagactttggtgttcatcactctacacctccaaggctatattgtgacaacattgctgctatccacatcagtgagaatcccgtctaccatgaacgcaccaaacatgtggaaattgattgtcacttcattcgagaaaaggtccaacaaggtttactccagttactacatgtttcttccaacaacaacctagccgacatcttcaccaaagctcttcttccatctcaattcaataaaattgtatccaagttgggtgtccttaatatttacactccaacttgaggggggctattaagagttagatattttctgttaggaaggttgttatatttttctatttagctggtttatttttctgttagaatcttaaccgactcacctagtctatgaatagaccttgctcttgtattttcaacttcaattcaataaagataaacaaatacaaaatctctacaatactctgtttctcatactaaacaaataaaaacattaaatatataaaa

SEQ ID NO: 310565 - DNA, 952 bp, Cannabis indica
ttacaaaaaatggtgccttatgtaattattcctaaattaaaaagtactttttttttatgtctattaattaaaaatactttcatattatattttattaaaatatacctacttttacgagtaatttgcctaataataccccctactctctacttaaatttagtatataatttacattaacttaagaggtctaacgtggacatcatctacaaaaatgagtaccttaaaaaatatgaaaaatgaaggtaaaaattaaaacaaataaaataaaataggtatacaatgtaatttcttcaaaagcaagccaaagagttttgaaatttatttccattatgatttgtttttgtagtatttggtatcaataatcagagtagcattgaagtggagagctctaacaaagagttattctggccttgaaaaaaaatgaggcactattgagtgagttttgtaagattttacaagacatttttactcttaaagttaatgttaagtgagtatttttaactattgtaatcgctttgttgcttatagtttagctaaacttactcatttggctaaggtttggtaggcgagattaccgaatgttgtttgagtcttttagacttgtttctttggtagacactttttaatgagaatttcattttcgtaaataataataataatgaatttttttaatactatatttttatttgattttaaatagagaaaattacagtttttaaacttaataaaaccaacctccacatactcaggattaaaactctaatgacacgtttactatagagtacttaaaatcgaaataaagtaatgtagaaatgtcatgcaataaatgaaaaataatcgaaattaatatttgtaatatgttgtttactaaaattgcttggaaatagaatgatagtgatttatattgtttactttatcaaataagtaaccggaatgcttaaattgactaaat

SEQ ID NO: 310566 - DNA, 1796 bp, Cannabis indica
actcttagatttattaatcctagtttagcgggatcaggttatgtttagtcacttttcgtggcgttccaattattagggtgttacatgctttaatcttgtattttaggttttggaggtagctagagagaacacttgtcgttggtgggatttacttataataatagctaccaagcaagtataggcatggctccttatgatgcattatatgggaggccatgcagattgccattgcgttgggaaaaactagatcagcatgtcactattggtcccaagattattacaagtactgatgagaagattaagggaatccaagagcaacttaaggttattcagagtcgtcagaaaacctatgttgaactccatcaacgagaagttgagcttgatgttagtgattatgtcttcttgaaagttactcctattcgtgttgtaacgagatttgaagtgaaaggtaacctagccctggggtatgtttgacctttcgaggttttcgagatggttgggaggtcgcttaccgattgaagttaccactgcggttaacgcatgtttataatgtgttccatgtgtctttgttgggaagtaaactctaaattcgtcacatgtcattgagtatgatgcaatcgatatctctttaagaagatgtgacatatgaagaacaacctgtcaggatctcggcgagaaatctaaaatcgttaaggaacagagagattccaatagtcaagatcttatggcagaaccacagagaagacaatgctacttaggaattagatttagagatgtacatgaagtatcctcacttgtttaatttttaacataaggttgcactttaaaatttttggacgaaatttctataaggaaggaagaatgtgaagactcggtcaaattgagtctaaaaaaaagaagattaacaaaagaagtgggtgggacccacttttttaatttatttaactcccaccagccatctctctttatcttttctctttctttctctatcttcaaaacacaaaagataaaccaccataaccacaacctatggagcacccacgacccacctccggtcactgtccaatcacacgtgtcgcatatgcacgaccaccgatcgatggtaatcttacacctcaagtttagtggcaatcagagcagggacacaacaatacgaaagatttgaagttttttcatcaaaaaattaaggtaacattacgataagcttcggccaccatttgaaaaatagttggtaccgttgaaatcagcgtcacgagaggaagatcccccactaagttatttttctcaactcgttaatttttttcgatgggatttgggtatctctaaccctatcgaagcattttccagtgattttggtgtttgtttgggctaacgggtttgacatctgttatctactcttcaagggggttgttttgatatatactacccttatttctggaaacatttctggtacactaatttctactgccaccaatagttaatgtgcactgcttaggtgacctttcaagacttcaaatttcaaatatgatcatgctatatgtcgtttgacttggtttaaagagtagattacaatgatgtatttatttgattggagaatataagacaaagtgacttttggagtgactaagctatttgaacttacacatcaaggacttaggagcgtctcttttggggaaagcttgatgatcataaggaggtatggactcaactatatattggacttaattttatatgtgtcgaatgatattaggcatattctaatttttatgatttataaaatatttaaaaaattaaaa

SEQ ID NO: 310567 - DNA, 856 bp, Cannabis indica
tccaatcggtaacttttgtaaaacagagggtccaaattggtatttacccttagttttgagtagtttattttatttcgtggaatcgcaatacttgtaattttttaaaaaaatatttttatgatttttcatgtgaataatttgattagagagcacttaaagtaagattattatttgataatgggagaaaaatctcgaagagggaccaacgaattttttattttgtttgtaacatgtaagtaagtctgtcttttgttgttttgtggatgctgatttgtgtaatatttgttctgttttgattaataaaattttctcttttaataataatataattaaaattatgtggataaatcaaaacataacaagtgtataattgtatacaaagacttattatcttagcacttaactttagaaatttaacacaatggtaaaaccacaacaaaatataagttagaaagattttatcacaaaaaaaattagtttgtgagattaaatgttacaaattgtataattcaagtaattttaccgctaatatttattttttatatataaaatgttgatattaaataggcttaatgtacaaatctccattttaaaaaaaaactaaataaataaataataataataataataataataccacaaatcagtggcctaaacaatccattaaaaacaaaaccaatgaattgtggctagttggttgaatttatttatttattgataaaacagttgtttgaaatttgaagttagctaaccaatgttctagtcatttttttgttttgtttttattatgttatttatttgtttaattattagtttgactgaaaaaaaaaatcaaatgaaaatcatgcattcaaaa

SEQ ID NO: 310568 - DNA, 717 bp, Cannabis indica
ttacttttttttttttttttggaagtttaggagagcatattgtatgtgaatggacttaattattcatggttttataaaaacgaaaagaaagaaatatataataatatttatgaaataaatgtggttgaaaataagaggtattgtgtattattggtccctacttcttttattcatatatttatcacttttgttatgccgtttacataaatgcatactattcaaccacgtgagcttccataattataccacactattttcaacacttcaactttaacccaaattataataaaaataaaaaacaacggctgaaattattaaaacctttttattaattatatatcactcccatcataaatttatgtctccctccctcttgtaataataatatatatgtatatgtttcacaaaatagtagtggtgtcaaccaaaaatagagaggggtaactatatgtatactataaattcacaaaacagatagtgatttcttgtcaatatttattcaccttggatcgatgtgaaaggggtattattatttattactattacatttatatcactatatagaacaacttgatttaaatttgatttgatatgtttatttcaacatatacatttttgcatttcttttgttacacatcattatgggggattaaattttttttttttttgaaagaaagtatgtcattaaatcaaagcaaatcagctgttacaagagga

SEQ ID NO: 310569 - DNA, 1834 bp, Cannabis indica
atttaattaaaattatcaatttagaataaaattctaaatataaattttaatttaatatttataaaattatacttagatggatctgaaaataaataacattataatttaatattttaacataattaaacatcttatctataaaaatagaacttaaaacttacgtaatatgtaaaataatattgtatgtaaatatatacaataaaacttagaataatatttatattattatatcaaatattttaaatacaaaaatacatttaaaattaagatgaatccatttagtgctagaatatatggtcatataaatgacaacactaccaacttttataatttatttctaaaaataaactaaatatattggaagtatttttaatgaattgttaacaaagtgttggatactataaacttataataatcaagagaaaataaacactcaaatatacaagaatttcttttaatgtatactctattgaagaaacaaaataagaaaaaattactaaatcttcatctaagattataattacatattagtaataatttaaaaactataataaaataacttaacctatttaatttttttatatagtaataaaaaaattttaaaaaacactaaaaataaatattaaccataagtctagtttgtggaaaaatcaaatttttaaattcaaaggctactaatatctaaaagtaattttgattaatttataatttaattttattctgataattagatttttatttgacaatttggattctacaaaaaattctaccaaaatttcaattttgtttcaaagaaaattatttttggaacaaaagttatcacaaaaataaaattgggcacaggggtatgcaacctctgtgggccaagggagctcggcgtgaccagggacttcagatagcccttgtctaagaaacgtcaaacagggcttttttgaagctcggtctcgactgagtgacatcctttcatccgcggtcgcacacgcgtgctacaattttgggatattttcatccaacttcaaaaatcataactaattcataaaaatcaaaattaagttctgtaaaagtaattttttattaactttccataaaaaatactttctgaacgaaactaaaaatatttactattgttgttatacctgaagttcggtaagcacatcagaataggacacgtgtcgagctagaaaaagctcaaacacacaaatgacaagtatgcttagcatggaacaactcattggaaatataattcgcagagtatgtttacaactcgactggctgaatagtcttttgcgagacagaaacatacgaactgctaacttatttattaacgagaaaccatgtcggtgcacacgttcaggacgaggcctcaaccttcctgcatgagacagaaagcgacaacactaaaaatactaagcgtatattatacaatgtacaaactaagtgtaggtagtttgacgagccacgattgtcgacagcgaggtgtttatctcgcaagaagatggtatacgtgcgaggaagatcctctagacaccagagaagtatagttatcaaaattaagataatattattctcgagaagctaaaatgacaagtaactgctcgctatcaaagagattttggttcccttcttggcgaggcatccctatgagataaggcttaccatatatctttaattacgcgttcatctcggcccaataaaagtagaatattcatagctgtgtaaacacctcatttatttggcttgattttttaacagaccccacaattttaaggataatggctataaacatatttttggtcagttatgtaattaactgccactatgcaattataaatag

SEQ ID NO: 310570 - DNA, 1047 bp, Cannabis indica
gaatatatgtatatatattttatcatgaagattatagaaaaaattgcttcattcactcacatggtgcaagtttatgtttttttttctccatattaaaagggtaacaaaacaaaatagctatgaaagttataaaaagaagcattatataattttgtgtaatacacacatatatcataactaataactacctacatataaacatagaagaagtatataacatatcttttgcttggtaaccaagttatatatatatatttatataaaaacatctttttccatagttattataatcacgtaatacttaccctaaaattcacacctccatatccaaaatgccccatctgaccaaccccattgttagcacctgaaatttttttaaaaaaaaaattcaacaaaactgtgtcgttttatgcatatagaatattgttttgttatagtactcaccattaccatgagcgtagttattgaaagattggtattgatgatcttgatgatgatgatgatgatgatgtggaggtttccaagccgttggattaatcagaccaggtctttgcatggtagtagtagtagtatgatcagacgttgttgtaacaaacctcttcttctgtctttctctagctttatggttttgaaaccagtaaaagacatttttaccctcgatcttaccatactgtcgtaacctcgctgagattttctgaatctgttctgctgatggggatcgaactccatcgttgtaataaaggcttttcagtattcgaatctgatctgttgttggtgtccaacgactactgctttgtctaaccaaaaacccaccaccaccacccccacatttagatgacccatttccatcttcatgattttgttgctgagaaatctccatagttaacacacacaaagaaaaaaatgaaattaaaagtgataattatagtaattgggaaaaggagaaaggagaatcagagaagtatctgatggagaaggactggatttgacaaagtgagtgagtgagtgagtgagagagagaatggaagctatatacatatatatata

SEQ ID NO: 310571 - DNA, 1014 bp, Cannabis indica
tatattattttataacaatgtataaattattattattaaagatgctcttactatacctatcaaataataataataaaaaaaagttattaatatttgattgcagtttttattagaaatgcttttaatattacacataattataatttattagaaatgctttttattataatttattattattaggactgaaaagcatttatttatttatttatttattgaggaagagaaaaaggcatcaatgagcattgtggtcaacaacttgaataaaatccatgaaaaaccgcatcgcaggaggagaaataaaagaaaaacaataaaacgtagtcaaggccgaacatcctaactttgacgccagcaatgcagtgggtcccacatatatcataatatcatgcaccccaccgacactccttctaaaccgtcggcacctcttcaattcaaatcactaccactgtcaccatctttcgcattctcataaacctcttaattaataaatataatttatgttagcctaattatttataccatatatttatagggtatatagatagtttttaagttttttttttttttcaaaaaatagttttggctagtttggaattcataattaaattagattaaactgaatttaacaagattgacttatactaaaagtaattttgtgtttaatttaaaaataaactgaactattatatatattttttttttcaaaaacttaagctagaataaaaaatatataataataaataaataaaaatgaataattctcaacaaagaaaataaaaaaataataataaagatgattaaattataaaataatataatcatatataattaactatataccattaaatatataatttaataatttattatatttatatttaataaataattacaatattaaaataaaaatatttgaataatataaaattatttatggtaaataataatttaactactaatttaatacaaatattaattttctaaattaataatataaatttttaataattt

SEQ ID NO: 310572 - DNA, 1329 bp, Cannabis indica
agactttggaagacatgctttgctcttgtgttttgaattttagaggtagctggggggaacacatgtcactggtaaaattcacatataacaatagctaccaagccagtataggcatgactccttatgacgccttatatgggagaccatgcatatcgctattgtgttgggcagaactagaagagcatgtcagtatcggaccccagattattactagtaccaccgaaaagatcaagggaatccaagaaaggcttaagtttgttctaagtcgttagaaaagctatgtcttcttaaaagttactcctatgcatggtgtaacgaggttcggagtgaagggtaagctacccccgaggtatgttggaccttttgaggttattgagagggttggggagggcacttaccgactagacttactagcctgattggggcacgttcataatgtgttctatgtgtctatgctgaggaagtatactcaagacccatcacatgtcattgagtaagaagccatccctcttcaggtcgatgtgacttataaggaacaacctgtagaaatcttagcaagaagctaaaagtgttaagaaaaagagagttctaatagtcaaggtcttatgacaaaaccacaaagaagacgacactacttgggagttagagtccgagatgtatatgaagcatcctcacttgtttaatttttaatctgaggttgtactttaaaattccaggacgaaacttcttttaggagaaaataatgtaaagacccagccaaaccgagtaggaaaataatataataaataataagataaaggatgtgagacccacaatttattttattatttattcaatttattttttctcccacacccaccagaaaaactccctcgctctctttcccatttctctttctctttctctctcatcaaacactcaagaaaccacaaccaccaccgtcgttggagaccctacttcgaccaccacctgacccatgcactgcaccactcgaaccgccgaccgtcagcgatctcaaccccccaagaagcgcctcttcatgcaccaccattagcgaaagatcacgagtcaaagtttgaaggttcatattttcaaatttttcgatcacctccaatgtctgtttgacgatctatcttgaccactagaattagctcattgaggagaacaatctgcactaagtcatttcgcccaactcgatacttttttttggtgacgtctttgtagctttgcccctttttgacaaatttccagtgatagtgtgtgccattttgacaaatagttaacatgagtttgatctactcgtcgaggtggttgttttgatatatacta

SEQ ID NO: 310573 - DNA, 812 bp, Cannabis indica
ttggttattcttgtttccttttattttttttttaaaaaaataatgttggaaaaagagtgggacgatttcattatgatcatgggctggtagttttttaaattttgagttggttttcttttttgttccactttcacatatttatttaaaccaactttctttgtcatttattttcaccatctaaccaattcctcttccttgttcgttcatttctctattttttttcaatctctctttcagatattcatggctaagataaagaatttagggcattcaaaaagggtggtggaacccgaacctaccccctaaaatgcttctcttgtggctccaatcttgctcctttctcctgcaactgctcctcttcaaggagattcatcgcttcctcagtgtgaatctcaaaatgtgaaggtcaagcctgccccctcactggcaccatctttcaaccctcaaagtactttgatggagattttcccaagtaccctaaagcttctgttggtgctactgctgctactggtgcaagttccagttctgctcctgcagatgtccaggaggtcaagcagtaagttcttcaggagaacaatctcttgctgccatgtattatacccaaaatttggctagcaaatgagaggaagacacatgtcaagcgaggaagaataagaactcagacacataatcataattacacttgcaatggaataactcgttaaaagcataattaacagagtatgtttacaactcggctgactgattagtcttatgcgagaataaaaaatatacaaaatgttgccttgagcctcgatgagaaaccatgtaac

SEQ ID NO: 310574 - DNA, 1020 bp, Cannabis indica
agatcctggtaaaataatatccaacagtggagtagccgaaaggatttcgattcaaacttaacaaagttagtttgaagagatttcagattttaaatttgttgaagtgctttcaatatatatacaaggggatcttttatattagcaagtgatttagtttaggttaaaagtttcactattgtaaaaattgtattgtttttctttgttgtattctggattagttaccacaaaaactatatagtggaggttattaccctgattcggagaacccaagccctagtcagctggaatgagttttcagtgcagacaaatcttgtaatttcatgtgttaagtgttatgttttggatcttgagtttcatgcttaaatcaagatgttatccttgttcccggatagattctacgtggaggtagcaaaagggtgccacgttagatcgtatgagaatattagggactccccttccttttaagataggatcaaggaaggcatcgaagtatctgggagagcgcatccgttgcaaaggaagaatcgatccttgaagttgtaacctaatgctttcggtattcggaggcatacgcaaagcatagaccttctgagggtccttaggaattagctatttgagggggtcccgagctacacttcctggaagccccttgcaacctaacttggagatacacttgacggttacaccttttttgacaccaagtcagatcttgtcccctacgtcagaccgtggttgtgcgggtacgtgcctctatagtgctaattgtctaacgactttgtctgggatattgcttttaaaggaaaaacctttgaaagacacatgtccatatccttatgtgacaacctacattgattacgcaccgtgcaattgaagagatacctaccaaatcaatggttagatggtcttgtatgttttacatgtgtgcctataaatacctccattttttatgtaaagagggtgaacaatttttacttacaaaaactctactaaaattcctagagagctttcttcttagagaga

SEQ ID NO: 310575 - DNA, 2830 bp, Cannabis indica
ctttgtggcaaccaggtaaaggaatgtatgtaaaagaattggaacctaatccttatctgtttcaattctaccatgaacttgatctgaaacgggtcattgatggaagcccatggactttcaatagagttcaatttgtgtttgaaaggatgaaacctagagttgaacctagactggtagagattaataatttggacatttgggtccaagtacatggtcttcaatatggttcgaaaactgaacatgttgttaggagggtaggaggttatgttggtacatttgtagaatcggacccaaagaatttttgaggaatatggcgtgactacttacgagtacgggtgaccttggatattactaaacatttgaaacgtcatatgaggcttcgtcgtgttggggaagaagctttctgggcaactttcaaatacgagtatatcctgactttttgcttcatctgcggagtcattcgtcattctgaaaggttctgcccaaaacattttgatatgcctcctgatcaaatcgtgaaaccatatggcataggcatgaaggcccaaccacggaggagaaaccatttgattggtgctcaatggctcaaaaacagagaagaggaagacaactaatctttagaccaaccagctgccacacagaacatgccggcgacaactgtatctcagcaagcggtttttgggggaattaatagcgaggatcgtgggaagctgatattaggaaagttgtcaaataaaactatgcagaagtcaaaggcagttatggagaaagaggtaaatgtgggcattatggacactgattccccaatccacgttgatcatgttcatgatgggctggatacggaggaattaattgaagttagtattattgactccaaacgacgccatacaacagagggattatttggtcggccttatgaggggattcttttgataaaggaccattcagctagtaatgggctgactttagaagggatgcatgaggaagataacaaatgtgatcttgaagtagaggagtcagatttaatttaaaaaatggagtttcggtgggccttggtttccaggcccacccctcatcatgagtattctaagctggaattaccgtgggcttgggaacccatgggtctttcaattcctggtggacattgtggtccaaaagaagcccaattatatttttctttgtgaaacttttagtcgtggtgatactctggaaagacttcgggtggtgataggctttgaaggtatgtactctgtcgatgcaaggggtcatagtgggggtattgcgatgttgtggcgcaacagtgaggaagcccagcttatcaattactccttcaatcatattgatcttcaaatctcttagttagcttcccctccatggagattaacaggcttgtatggggagcctaaccgaaatttgagatataaaacatgggattttcatcgctctcttaaggatgaatcgggtttgccttggtgtataattggagatgtcaacaatgtcacaagccattcggataaacgtggtggtaatcggtacccgcagtcgctggtggatggttttaatcaggctctccaggactgtaatttgattgatctagagctatctaggtacccgtttacttgggaacggggtaggggaactgatgcttggattgaagtgcggctagatcgtgcattggtaagtactcactggtttaattgctttaattcagccacgttaactaaacttgaaatatcagcctctgatcattgccctctgttacttgagcctactgtccgtaatgttatcattccctttcgtcaatttctttttgaaaatgcttggttgagggagccgttatgctcaaaaattgttatggatagttggaacatgtgtgatgggcagagcatcatggagaagataaagcattgtagtgaggtactttctcgttggggccgtgattacactggcaattttaaaaaccgtattgctaagtgtaaaaaagagattagattttggaaaaaagggcgtgatgctttggctattcagaaacaccgtgaggcagagaagcagcttagtgaaattttcaatcaaagagaggtgttttggcgtcaacgattgaaacaactatggttacgggaaggcaatcaaaacagtaaattcttccatgcaaaggcaactgctaggaagaaacataataccatccatgctttgaaagatgatttgggagtttgggttggatgggacaatggccttcctacagtcattcttgattatttcaacaatctatttaaagcaggaaattcgagttggcaggaggttgttatgggtgttactccttcaatttcagcagcccaaaatgatgaactgttaggcccgattactcaagaagaggttaagaaggccctattccagatgcaccccgataaatccccgggatcggatggcatgactctgggattttatcagaaatattggtcggtggtgggtcgagatgttgttgatcaagttcgacatttctttgattttggtactctccctcctagcttaaaccatacaaatatcgttctcataccgaaaaagaagcaacctactgttatgagtgagttacgacctatctctctttgtaatgtgctttataaagtgatttctaaggtgctagcgaatcggttgaaaactgctttgccccaagttatttctgaaacacaatccgcttttattcctaggcatctaattacggataacatcatggttgcatttgaggtaatgcactatctgaagcgtaagcggaaaggaagggaaggttatatggctttaaagcttgatcttagtaaatgttgggttttatgcc

SEQ ID NO: 310576 - DNA, 1892 bp, Cannabis indica
aatgacttctaatcttttattgataataaatcagattagaattaaatgggttttatttagggcataaaatccaatcagtgtcaccagtatgccttgccacgtcatagtgcaaaaaataggataacatccaccaaccacatagattgttttattaattgtcatgattgtccttgttttcaatttacgggtttctatggtcatccttcttctagcaaacgtcatcatacttggactttgcttaaaagatgttatgatgtggctcctcaagaaccttagtctgttatgggtgactttaataaagttctttcaaatgaagataaagttagaggacctctaagaaatcagtctcaaattgaggccttccaatatgctattcactcttgtttactatctcaagtttctttgaaaggtgctcacaccacattgtctaataaaaatcaagggggaggaaatgtgaaggaaaaacttgattattgttttgtcaatgactattggcttgatttttttcaatctccaaccttgcatcacttggatttttatcattctgaccatagagctttgaagttgcacgttttggctgctggtgatatagcttctacacctattttcagatcaagatttcgatttgagaagctttggcttaaagaagatgagtgtactaacactattcataacctttggatcaatgattcaaacaatgcaatttctccaatctcatccaatttatcctcatgttctactcacttatagtcttggcatcaccacgaatttggtaacataaaacggtgcattaaaaattcccatgatcttgtctcagctttgcagaactcgaataagactgattcttctcacttctcgactcttaaaaaatctgaagcaattttagattactccttgcacaagaagaggattgttggcatcaaagatcaagaatttcatggcttaaatctagagattccaatatgaagttattccatcagggaactaatgctagaaaggccaataattatatcaaaagtttcgttatacggcgagtatcactcacactagtaatcaggaaatacatagattaatagaatttttctggtattttctcctccgaaggtgtcgatcatcaggctttggatacggttctagctactattcttacaaatattttagaagcttcgagagccgatatttctttgtcatacaaggcagatgaggttttcgaaaacttacattcaatgtcaagtgatagcagtccaggtgtggatggaatttcaggaacgttttacttaaattattggaatatttttggtcctcttgtctctactacaattctcaatgtgcttaacaatggttgtgatccttctcttcttaataaaactttaatcactctaatctcaaaagtgaaaaaaccgctacagctcactcagttttgaccaataagtctttataatttttgtacaaacttgtttctaagacaattgtgcttcgtctccatccttatcttcctatggtgatattggaattccaaagttcttttctctctcaatgacttatcatggataatggtcttattgcatttgaagttctacattaactcaaaaataggaaaagaggttccaaaggatatgcagctatgaaattagacatgagtaaggcattcgatcgtgtagaatggcactttcttgagcatgttatgctaaaaatggggtttggaaacaccttggtgcagctgatacttttctgtcctaagactatttcttattctttccttgttaatggtgttattgttgcgatattttgcacacgcaagtgtacgtatcgttacaagtagtaaactcaccaggagtgaggtcgatcccacagggattgtagttaagtacgttaaaattaaacttttactt

SEQ ID NO: 310577 - DNA, 985 bp, Cannabis indica
tttttaagaaaaaaatgaaactacttttgcaagatatcttataggattacgtgtttttggcaggaattaaacaatatcagcaactactttgctaatatatatatatagattatgttatgattgaataacacatatattgatgatgaaataatttaaaggatttgtataatgggatagagggtaggaagaggaagcatgcacattattgaaggttttatggagtagtcttctcttctggcaataaactattcataaggagatctgctgtagatagtgctgttggtaatacaatatatgtttttctttgatattgttcttcggttctgatccttttaccaactacagttagctggagcccacttataacgtatccccataagcagctggtgacttaaactttaatgcctgatcatcctcccataactttcctacatgaccattcttgcatgcctttatttatataaaatattatttaattaactgaattattatcacttgagatgaacttttatttttatttggttgtcttgttataattcaactaagggttaaaagttaatgaaaacttgtgactttttctattattacttgttgtaatttcagcggaaataactttgaggattcaatcataaacctgcaataatctcaacacttgaacagtaataatgaacataaaccaattaatcaacacaatgaatcaaaccagaaatcaatcaaagaacaacacaagattttatcctggttccggtcctagagatcaacatgatccctggccatactccagctgagaaacatcaccaattcttcattaatatgtgaataagagagcagcaatacaattacaataaccagagccatcacagctcaaatgacactcaacacacaccagagaaaacagtcacagttttctctctatcaacccgagtacaccctttgttcttgaccctcttcaagaacaaaaaaactctcagcttagaatcctaag

SEQ ID NO: 310578 - DNA, 2616 bp, Cannabis indica
tttttaatattatcacagttttttaataattaattaatcctttagtattaaaataatttataaaatcacacacgtggcatccctatagtttagggcgttacaagccaaatgttgtagacaaggcttgctacagcagctgtgtaaaccagcttcctgaatttgcttgctttggctctccctagccatttgataatattggagagagatatgtgcattgtcctccaacctaaccagctttttattttttgtaagctacttttagtctttgagcattcaaagaacaaatgctcaatattttcagtgttgtcacagctggaaaaggaattccagttcagctgctatattcattttgtacaatcgatctctggtttttagcttttggtgcattgctagccaaagaatgaagctgtgttttggtgcatttaactgactccttacatgcctactccattgcacttttggtggagtttgaacaagcaatttgtacccctgtgctacagtatattgctgttgtagaattaagccttgttgtgtagccttgaactgatctttgagcctaactaagcatttccaatactagctggattggcttgaagcgttgtaggcccaccagtcatcaccatgtaggtacacactattgatccacttcatccataaactgtcttccttgtttgcaatagcccatatgtatttccccatagcagctttatttcatacagctatattcctgaaaccaatgccaccagcagcctttggttgacaaataaagtcccaagctattgctccaagtccatggtactcagctttaatattccataaaaaattcatgcatatagcttctatgttattcacaactttcttagttaaaatcaagacttggcaccaatatgcatgtatagccatcaaaactgaattgattagcaccactctacccgcaaaagaaaaatttctagagctccacgttttgattctagctgtcattttctttgccaaaatctcacagtctttcccgagatcttctttgcaccaattggaactcccaaatcagtaaaaggcagggactggtgttggaaaccagaaacagccagaattcttctcaaatgttcctcaggcatattacttgtgtagatggctgactttgcagcattaggctgtaaaccaaatgtcttagagaacattttaagcccttgcaataagtagtacacacttctgaagtctccatcatagaaaattaacacatcatctgcaaaggccaaatgatttagtttggttgttgcacatctatcatgaaagtagaaatctgttttgtctccaattctccccattatttgagatggatattccatacccaacacaaataatagaggagacattggatctccctgtctgagacctctttttgactcaaagtatccatgcaaagatccattaagcattagtgaaaatcttggggttctcacacaagtcatcacaagcttaatgaatgcagatgggaatgagagaccatgcatcatctcttttaggaaatctcattctatagtatcataagccttttgcaaatccaatttgataatgcaagaaggcttattgattttcctcccataatgtctaagtagatcttgaaaaatcatgatgttgtgccctataaaccttcccctaataaagcccccttggttcatggagactaaattaggaagaatgtttttgattctagaacacaaaagcttggttgcaattttataaataacattgcagcaagctattggcgtaaaatctttgactgtatttggattaatgtcaatacagaagcattgatctctttaagaaggttacctgtttccagaaaagatgtcacagcctcaaaaatgtcctttccaactaactcccagttgtcttgaaagaagaaactcgagaagccatctggaccaggtgccttgtttccaggtatgtcaaataaagccggattcacctcctccttggtgaattttatcattagtgtctcacctcacaatcttgttcaatactgctctcctgttgttcatccttgaacccagtagctctttataataatctacaaaagctgacgaaatctggttggggtctattattctggtgccatcttacttttctatagagaaaatttggttgtgtcttgctctttgtttgatacttgcatgaaagataacagtgtttaaattaccattttgcacccaaataactttggccttttgttgtaggaaagaagtgtagtctttctgcacttgtatgagctttgttctagccttcaattcttcatcaatcatatcctcatttaaaggattctgctataaacttttctgcacttcttcaagttctccctgtgccctcataactgctgtatgtatatcagaatatccagccttgtttatctctttaagaacaggtttgagagcctttaacttggatacaatttgaaacatcttggtgcctttgatctgcttgctccaaacagtctgaactttatttccaaactcagcatagcttttccacattctaaagtaacgaaaggtttcataccatcagccctcctaggatacaaaaaacgtataccaggagagtgatcgaataaaccttcat

SEQ ID NO: 310579 - DNA, 3305 bp, Cannabis indica
aaaaaatttagactaaaaaattcttatagatactgaatagttaggggttgcatcagtacacctattttaatagggtgtattgtaaaagcaccctatctttttacacccataatttgttaatataattttttgtaaaagaataatacatctccatattttaaaagaaaaataaatgaattaaacacaaaaagttttttgtggctaaaccctcataattgtcattttacttacatttaactatctaaattcaaattttggtggctaaatctatcaaactttaattctgctagtaaatttatttttccatttattttcattagttaaatactaagttggaatatacacgtacactcatatatacatgacatatttatattggcccaaatcatttaattatcataaaaaaagtcttttaatatttaaaataaatatttttttaaaaaaaaaatccacatattctttctctctcttctctcacgtactctgactcatctttgcttatttatttattttaacttttttttctttctatctttttgttccctttatcttcctcatcagtagacataccaccaccaccataagcatgaatctatatacataaaaataattaaaattaaacgcaaatgtcattacacatccatataacatgcaaaaacaaaaattaaaagccaaaaaaaaagtttagcaactttgggagtaccaaatcggagctttgtcgatctcaacgtcggtgagatggcaactctttctccaagggcttttgacatattctatcaattggaggatgtttccatggaggccagaaactcaacacgacccaaaccaatccaagaaaatagccttaacaccgcagatggaagtcgtctttcttatctcggtgtaccaccattaatggtatcaaaaacaaaaattaaatttcttttaataatgaaaaattattatttttgaattttaaaataaatgtttaaatgatatttttataaattttaaataataaaattaagtgtaccaatataaatgtgccatgtgtacaagagtgtacacataaccaatttatgttggcatttaaccgtgataaatggacggcaccttaaatttgctaacactttatagttcggaggattttaccaccaaaatttgagctagtacctattgctttttagcatggcctcccatcactctttagtgatggtcattgcgcggtaagccgcacaagggtagccactacgtgattccaaaagcagatattaagctgtaaacttttattacacgtaagaccaactgtgtctaaaccaatattaacaagattaactacttaaagttattctttcaattccacatgcgtacaacaggcatcaccctaagaaaagtctcaggcaaggtctatgagacttggtgaatagcaagtgaccaagagatataagcctgcatggttacttggggagcacacacaccgtacaatgcatcaaactaacacaaaaaaatacagagaaattttaacgcttagaataagctactaaacctgtctctaagtcgtgtaagcatactttgacttgacaaagtaaatccagactttcacatgtcatggccataagaagatagtcaggatgatcatatgtctgccgtaaaaggctttaaggctaaataatagtaatgttcgaaaataagcaagaacatgagagccttgagaccggatatgaaccggatagagatcctataagggccacgtaccgggctacgactaaggcagagttccttacaggttctaagccatgttgagtcttaagttgaacatccgactataatagactcaccattaagtttcgtacagagtttccaagggaaccatgtatgagactaaggttgtatatgcctacaaaaccataatcttgccgaagtcaaaagaggatagaaaattggctacccacctggaaccatgactcagtcaggaaccggccatggtcaccaaacttagacatgatcagcctagctttataggataaaaccctagagatggccaactcccatgattaacccctagggccgaccaagtctcaagcaagacctctcaagccagccaaggttagttttgaatctcaatatgtgtttttctttcaaaactcgaatatgtgcctcgtattctttatgactcaatgagtcaagaatcacaacaaaggctaaattaaatcttttccatcaaaaagtcacacattatacattctaaaactgttataaggatcaatatacaaaggagattacaaactaacatgagaataaaaaagtttctcagagcttgaaaagcttgaaacttgttaatggtaggtacaaagaagagatatctaagaagagaagataaaacgtagatagaaagagaagatcaaagatccaaaagcatgtcatacagaaagccaacactcggctagacaaggctggacaacagaaattactacaaataagatgagagctagaaagttcctatccgaccagacgttcgaacagtgacttgggaggaaaatgttatctcaaattttgtccacctaacgtggcatgtccacataagccaaagatagagtacaggtggaatacaaccttatcagtagcaagacagggtctccatacaagatatggtaaaaccgtcaagcagaaaccgaaaggagtgaagcgagccatcaagaggttgtaccaacatgtatggatagctagagtaagcctataggcagaccagagtaagcttgtatggccagctaggatttgggcacaaactggctggccaaaaggtgacttctggaccaagagagcttccattcgaccaagggaacttggcctctacaaggaaacaatgtacaaatatgtcctccacttgcaaaagggtggccttctcttggtaaagctatagtgaccgacaaaatcctagcagacacatgacctgccaggtcttggcaggagcatggccgaccagacctcctctgcaggtacatgggtgaccagacctcctctacatgtgtatgggcagccaggattaatctagcaggactctatgtacagaaagatacctacgaatcgggcccttaacatcccaacaaattgatagaaaatatctactttcaaggggcaatttaattttttcgtatttaatcaatttaatatataaatatctaagggtttcagttgtaaattagggtttaggctttgctacataaaggccttacctccaacctagaaaacctatgtcactaagcctaattctagcctccaaaccactctaagtctaaaaccctaatctcttttctctctctctctct

SEQ ID NO: 310580 - DNA, 1436 bp, Cannabis indica
aatataaattatatatttttttaatataaaaacctttaggcgcgacattgttccccctaaaagtcaaatataacaactctgacaacaccttttaggagcgacattctaggtattactaaaagtaaaacacgaaattcgtgtttaacttttaggggcaacagtgtcgccccaattgtcaggcgactttcttgtcgcccctaatggtacttttaggcgcgaacttttagaggcgacctattaggggcgacatgtcacctctaaaatacattaggggcgatttttagttgtttaaggggcgacttttgtcgctcctaataaattaatttgtcgtagtgtataaacaaaatcatacacttataatttacactatcaaccatacacatatatataaattcatataccaattacaaaatttttcacaacacaaaaaataaaataccaacagaaaactaaaaacacgaacctcttaatttctggtagaaattttgattcctcctccgacgctcgaaatcttcgttatatattcggccggtcgtacccaatacttaaaccaaagacaataaaaaaataattacaaaacaattttaaaaacaaagataaataataacaaaaaaaataatattataaaagaaacattacctatgcaatggtggttcacgacgatgtaattctggcaaaaaatggagaaatggctggagatagaggaggagaagagaaagggtggtggaatcgggtgggaaaatttgggggagaaatgaaaaatatttttagagtgaaggaggggtcttttataaagtttcattaccggcgggacccaccggtattaataggggttccacgggtaataaaaaaaggtcagattcacttactaataccggcggaacccgcctctaataatccgttggtaatagtcattttaaatgtcaaattcccgcccaagtaattataggcagattttctgccggtaatactcttattttgccggtattgctattttttgttaaatattattatttttttatttttaaaaagtaataccggcggattaccttttctgccggtaataacctaattaatactggcagtttggctccgccgatattaatttcgtcactattgctatattttcttgtagtgtatggattcgatcgcatgccctagagacaagagagagggagaatggtggtggacaccagtgtgggttcgtgggtgtgagttggtgtgattggactgagtttgtggtttggggctaagtttgtgtggtttgggtttgggaaggtttggggaggaggtcattgggctgccctttagacacgacattttaaaattgtcgagtataggattatatatagggaaaaaaacaaaaaaatacaaaaaaggaaaaaaaattacaaaaatactttgggtcggcccattaaacatttatacagtccaca

SEQ ID NO: 310581 - DNA, 2782 bp, Cannabis indica
ttacagctaatatacatctaatatctaacaggcaccttccaaagtttggtttcagatcagcctgtgaaagaggaaaggtgggctaagatggtgtggaaaagctgtgctctatctaaagtcaaggtgtttggatggttgctaccagtgcaaaagctgaacattcatgaggtgttgcaaaagagaaggccatattaggcgctttccccggcttggtgtgtttgttgcaagagcagtgaggaaactctcacgtttatttcttgagtgtcattcaagtcaacatttgcggagtagattgtcgagagagtttggtatactgtacaaaattgtagtcagccattgtcttgcaagaggagggaagaggagttctagactttggacagcagcagttttagctattttgtgggctgtttgattagaaaggaatggcagaattttcgaaaataatagaaaataagggagaagatttgtgggataagattaaattttggattgcaacatgggtttatagaacaatagcttttgataacctgttgtctcaagatctccttaccttagagagtggggttgtattctatcccaggacacctcctttctggtttagacatgttgtgctataatgttctagtattttctagctgtatgttttaatgttacaatttttgttaccacggttttcctccgccgtaagtgaggctccctacataaagttgggaggaggtcagtccatgacttgaccttcgtctctaatcaaaaagaaaaaccatagaagaatttatccaatgcagatttttatttaaattttctgaaaacgagacaagttctaggactgaccacctcccaagtttattgagaacccttgcttatggcgaaggaaaaccttggtgacaagaaaacttgggaatagtctagtagaaacaatcaaaactctagtaaacacagatgaaaacatggtctcctaaattacaaactaccaaacagaaactagtacagtaggtttcccgtctctacacatctttaaaagaaaaatctacaaaatcttttgttttataaatccaagtagcagaaaaacgattatgctaccatgcttcatgtttagtgtctagtacaagaaaagaagagttagagtgagtgaagtgagaggtagatagttgagctatgtaaccacttaaaggatttggactatgtaagttttaatccaaaattcttcataggacgctcatgtggcatccaatggagataattttattacaaggtaggttatattgaaaccagtataaaagatagcatttttacatgcttgatttctaagtgaaaggaaacaagaagatattttgtcttggtcccgtatgaggtccgataattaaacttggtcttggagcctttgcatgttcttgtgaaatttataacctattatgagtgctgctttccagtataaaagttatttagttggagtctgaattcaagggttcttacatatcaatacagatctcacaagcaatttaactcccaaaggcaatttcccattttcaagcaacgatgttgtcaattttaatgatggaatttaatttctgtttgtcctttcacctagtcccttgcctctctcttttcacgttttttttatttattttccttttcttttccatataattttcaatcctgataacttttataacctaattttctcaaagccctttgttagaaaaaaaaaattacacacaacaatcatggtattccaatagatcaagttcacttctgattcttcacagaggggaaagaattcaaatgaacctcttaagaaaacagggggagggaaagaaacataccgatatgctacaggatcaaaagggtgaaatatgttgaacattctctgacaagctggaaactcctcattaatattttcctctccccaataatcttgcccccttcctggagaagaaagcataagaaaactcatattggttaatggttcatttttaaaataggtaaagaaataaggaatcgtgaaaagtttaaatgcaaaagatgcacctcaacacatccactagcctacccaattctctaacgttaataagaaagaaaaaaaaagagtaatctaggatcaacaagagaagatacacaagcacatggatgttagaaggtacatatctcataatttcaaatttagttgaggtaagccagggagagaattgagaagggtaaagaggaagatgataagaacatatagaaagaggaagatgagaagtacatataaagaagaggaatttagagaaaaacagggaaatagatacaaaatagaattacatagattgaaaaaacataccaaaggaaagagttagaggagcattaagagatgcaaaattaattttggtcataatctgaagtatttttttcattttttgttctttcaaattttcttgagaatactatgaatagagccccactttgagaaaatacatagaaaatgagcattaaaaaatttctgcacaaaaagcgagactacattattatgtaagattacatacaaatagtcattaactattaccaattccaatacgaatgttacgaagagcaagaaagacaccaagaggagatccgacagcaaaaaaagtgtcaaaagaaagaaaagaaaagtaaaataactaaatgagataggattattgcaatacaacagtcattttaattccttcaggatccttcaggaaacttgaaattttgactttcaaagcaaaatgaagagacaaatgtcataaaattaaattagagagagagaggcatatagagt

SEQ ID NO: 310582 - DNA, 1004 bp, Cannabis indica
taaaagtaactagctacccttaaagttatcaaataagtaaccaattacattatactgttttctcctttctctgtattttttaactttcttctaaaattttcttacaaagtatttttttttttttgaagaaaatacatatttataccttgaaaactataaacataagcataccaatagagaaaaatcaaaattcaatatagttaggaactcaatcatacaatacaataatcttcaatttcattatatacaataaaacacaaaatattaaaaataaaataaaattaaatggagcaacaataaccagagtgtttggtggcagatacttcatgatcactatcaatatgaataatttgtttggctgagttgagactacttgttgttgttgttgtttggtattgaccattaaccactaatggtttagcttgtaaattcttttgaattattgtaatttcatgtattttggtaatcatattcagaaaagcttcctcaacattaacattttccaaagctgaagtttccatgaaacacaaaccttccgcctcggccaaactctttccttcttcttcgttaacttctctcgacgattgacctaaatcagatttgttaccaaccagaacaacaaccatatccgcgtttccaaactcccttagttctttcaaccatttctttacattttcgaatgttttgtgtcgtgttatgtcgtacactagtagtgcacctagtgctccacggtagtatgaactcgtaattgctctaaatctgcaaaaaattaatgtaaacatgaatatatgaactcatgttatattctcattgaatattaaaattgttagatttaagtacttttgtccaatttcattcaattttactaattcattattcatgtactaaatcatactttctaaacgtttacctatcaaattatgcatcatcaaactttgacatgtattaaaattgaacaaaaatttttaaattcaacaatctcaataattcaaaaagaattttta

SEQ ID NO: 310583 - DNA, 1912 bp, Cannabis indica
gcttccttgtggcgtacaaagactcatcaaatatttacaagttatctgatccacgtgtccctattcgactggtccacgtattttgggcaaattcaggggcaacactatgtaattttcttaatgaaaggtttaaacaaattttgcacgaacatttataattttttcttagattagttgtcacacacaaaaatttagtaaaattacaattacaaatttgttctaatcaataatttttacaagtaataatttattttatttcccaacaagataaattacaattcaggagctagcaaagagtttgatgtttggttgggagtaatgaaaatataagaattggaatgtgaataggaataagaatggaatggaataaaatttaaaatgcataaaaaaaattgataaaaaaatcattaaattttttttcttgttacattggaattgtcattcctttctttttaaaatggaaagccattccaccaaaatggtggaaagagcattccattggaatgctattccaatactttaaaatacaaccaaacaaacgaatggaataaaaattgtttcctttccattctattccatttcattacctccaaccaaacgccacctaattatagataatttgctcaaactaattacaatctctacgacttgttttctcattcttaaagtgagaaaatctattacaaatgcttctttcaattttttgtacaagagtataaatagtacacattactatttcacaaagtattatttctagctttttaaatattatatacaaggctattcacaattgaaagataaaccactctctgaaactttgaatgcttgctcctcttgatattcttaatgcacattgaaacctgcccaagaaaaaaccagcaaaatcacagaagagctatactgacaactgaaaaaaagatgtagataggtctccaaatgatctccacagaaaagacaattagcttcagcaatgtgaccaatttttgatttgttctaatcttacataggctaaaaacacttcaaaagataaacacaaaaataaactcaaaagttcatatctaactagagagttctgcatcatttagaaataatataccaacaaaaataagggaaagaaaatatcatatcgactatatatatgtaattacaaattaattaatgacttttggtttgttactctctatatatatggaattttgtgtgtttcatcagaactagatcataattaggaccaattaaataaaacaaagaaaagaacgataatgaaaggaacattatacatgtatagatatgtcccttttaagcttcatgctcttgatgatttctgcaatcagatgccaaggacaccttttccaagtaatgaattcatactgtgacaactagtattaaaaaatcgaaaagactcaaaataaccaactacaccatacattgtccgaaaaaaaggatagagttttcatgatatcaaattattcaaagtaattaactgcttattgtaacaactacacaaatgacataactaactaactctctgtatcaaaatctatttggtctgtattctatgctaattatatttactacatacaagaattatccaaaagtaaattacatgtcaataacactactctaataaagttaaaaagaatgatataatagagagatcatgcatattgcacactacaaaaatttcttaatacttcagaggggaaagtaatgctaaaattttactctttggctcttaggaaatttatagaagcaacgttgcaatgtgtcattctcaaatttgacaacaaacacaactaatcttaaacacctgaatgatccttgtgagttgtccaattcaattaaagtcacatgcttaaacatatgtaaatatatacatatacgcatgtatatacatatatacatgtatatg

SEQ ID NO: 310584 - DNA, 1618 bp, Cannabis indica
tctctaccttcccttcagtatttttcttcttcttgaaaatccacttacacccaatgggattaatattctcaggtggagtttcatatacccagactttgttggtgcgcatggagtccatctctaaatccatggcattgttccacttatctgagttagggtcatccattgcttctttgtaatgcaatagattatccttgtttgtgtcagaaacaagaacacgtacttcatgctcttggtgggtaggttgtctcacaaccctcatactacgacgatgtattgggatttccttttcaggaactatagtaatcgttgtcgatcgttcaactaatggtgctaaaattattggtttagaaatctcatttacgatttcctcgataaccacttgacttcgtggcttgtgacttttcatataatcatgttcaagaaaagtagcatttgtagaaataaatactttgttatcttaatgactattagtatctgaattaatttggttttaaaattcacatatttttattttgtagttttctcttttcatacaataatatttttttattattacaaaaaaaatccatatatatctttttcgattaatgtattcttactatttttattcttttttaaattctgttagaaattaggataagatgaatgaagtttcatcttaaaactaattggcaatgggaggagtaccccattcatcttatatatgataatttatttccacacattagcaatgtgtgactaactctaataaaccctcctcacatttgggcctggaaagtgtgggtataacgaacgacctttaagagaccacagggccgaacgtgacatttgaaagaatcccacaaggccaaatatcgagaaacttgtgggtgtacacatcgaaaaatttatagattttgaaataggtcagagaccccaacactggaaattagcatacattgaccgaaaggtcccaaatggaggttaaaggggagacagcggaagtatctttttggaccggtggcactttcactcacaacggatcacaaacaactttttggaccggtagcactttgggctcacaacggatcacaagtgactgtgatgccatgttaaatttggggataagatgaatgagattccatctcaaaaccaattggcaatgggaggagtagctcattcatcttatatatgacaattaattttcacacattagcaatgtaggactaactctaataaagtgattataagttttattttttaataattaatattaatttatactaattttgaccattagatatttctaatcaaatggagtaaaattaatgtgaaaaattgtgttaagatatgtgttcatgaaacgtatctcatatatgaaatatgttaatattctcaattttatatagagtaatttgcgacataaatacttaagttttatgccgagtagcaaataaatacctaagtcgtatttttggcggtaaaaatacattccgttacactcttggaacttccgtaggtacctctccgttatgtgccaggttagtatctacgtgtcactcgttcattggtccatgtcattaattttttttatttattatttaaatgtttaaaattaattttaaaaatataaaaa

SEQ ID NO: 310585 - DNA, 920 bp, Cannabis indica
ataccataatgcgagccagcaattgcttgaataatttgtgttgcatcttattcccgacttctttaactggagcagcgagtagctggtttgacaaattcactcatcactgaataacatcttgggaacaactgtccaaagactttaagaaccaatttcaggatgctagagataggcaacctgaagcatcatctttaactaacataaagcaacaaccaggcgagtcgcttaaagcttacttgattcgctttagcacagccgctgccaaggttagaaacctgaatgaaattatttagcttaccgctcttcaggtggggatcacaaccaacctttctacggctgaagacgagttgtgggatgacctacagggtcgcccagttagaaatattaatgagttcaatgaaagagcacaggtatttgtgtgcaaagaagaagttagaaacaagatgaagttactgaagactaactcaggaagtaaacctagcacaagtattgcaacggcaagtaccgtctcaactaaaatagataacccaagtggttcaaagaccaagagaaaagatgactcaaaggaatcacctaaaagtaaaaagaaacaaaagaagcacgacaaatatgtctcaatatactcagtatataccgagttgaatgaaactcgtaaaaacatatttctcgcaaacgaaaacaagattgcatttcgcaagcctgagctcatgaggcatgcgagacataagaaagattcaacgaaatattaccaatttcataaaaacatagggcacactatagaaaaatatcgacaactaaaagacgagatagagagtttaatcttgcatggatatttcagacaatatgtaagacatcgaggcaacgagccaaaccaggccaacaaccctattaacccaaataaccagagattgcaacctccc

SEQ ID NO: 310586 - DNA, 1568 bp, Cannabis indica
tccaacttaacgcctctttaactaaagcttcagccatgtctagtgccattgcactcctgtgatagattgttttggcctccactaaatacgtgttgtgatcccttaccaccaacccgaaaccatatgatgaactgtggttaaatgttgctgcatcaactgaaattttgagtacactctcaataggcttaacccaagaaaccgccattgataaccttccaccaaagaaccaaaagaagaaaaaacatagcactgaaacccaaaacaggggctagcagatcacttaaaaccaagacgaactttgcatgtcaaaagacaagacaccatgacttacaatttatacttttactgaattttactcttaattgaagatcaaagcaacacaaacagactaataaacctaaaaacgtggttgttttttaatttttggcataaaagttaaaagtggcattatcgaagtgacaatttataattttctcaaaaaaaaaaatagtgccaatttacaaaaaataaaaaataaataaaattttaactggagaacttatttacttgtgagtactctactcgtatagataaagtattacatgttgaattaaaatttaaggtagggtgaggctataaaaatatgtacctgatgcgcgtatagaatatagtgagtatagttataacctatcctattaccctaacgattatgtgtattaatatttatatgaatatttgaataatatgcatttatttcatacgtaaaaaaatatataaaaaactactttattaattattataaaaatattaaattttaaaaataattatttagtatctctaatactttattattattttaattgttaccaattatattttttgattaattttacaagtaatagaattaatacttactatttaatatctttatatattaaaaatgtctatctaacgacatttcttggtttaacagaatatactttaaaaataaaaaaatattctgttaaatttaacgatgttaataggtttgatcaaataacccaataattaaccaaaaaattaaacaatctttttaaattaaaaaaaaaacttaatcttagacacatatctctctaacaaacctatattgggagaatattaataatttttttatttattttttaaaaaagaaaaatatagataaaatatctagaaaagataatataaaagaagattgattgtgttggcttagagatttttgggcttgagcttaaaaaaataataaaaaaaaaagatgaaataggctgtaattagtatttaccttatatgtttgtgcttatttttagttttatttttaattttaccaccaagaggagaaggttgaaaaatattagaatatgaaaatactattggtgcttattagtaatttgcaaagaatgtgaaagtctataaatatatagttgtgtagctattattagatatgaaatgagataatagaactttttttcaatttagaagattaatgttacattttactattaataacatacattattataacacaactatgttttacttactaaatatactgacacatattttatttttat

SEQ ID NO: 310587 - DNA, 2320 bp, Cannabis indica
gtgatggtcaaagaaaaagatgatgcaactcattccttcagtaaaattttgagccaccttcaccctcctatttgaaaccttctctctctcttcctctcttcaaaactggagccctatagtgaaaagagtgagtgcccacaaacatcaagtggtactcaatcatagtgtgtaaggctgtgaagaatccagtttcaagagaaggagattcaaactcagatcttggtgataacctgctacagaaaggatacaagggttagagatcttagtgggacgagacattatattccgggtgaaaccactgtaaggtttctcaaactttatatgtgtttatttcatatcgttttagaagttcatgtttaggatgttaataacatacttgttagtaaatcttgatcctggtaaaataattccaatagtattgagtgccaactgagaaggccttgatcagattgccaaagtcatcccaccaggaatgtacaatttggcacacatggatgacacaatagtaccaagggcatggaacctatgtcacctcaagaagtattatcgttgtagactaaagacaaaactatcttttgtttacttgaattcataggaatcaagaaggcaacctgttgggtaaccccattactttcattcaatttctctttctcttatagaatataattgtagttactaaaatgacagctgcaaggcaattaaattcttaattaaaacaaatgagtgttgtattgaagttgtattatcatgattcttcacatattttgaaaataatattctttcacttgttataaagagaagagaaactcaagtgtacaatgttatgaataatgttatacacttgggtgggggggcaaggagaagaaaagagaaaaaaaattctaagtaaacaaggactagctacccttggctgacaaaagaaatacacttcccctcgtaaaagtcacttggccaaaggaggtcttgaaagacactcatggccttatgttaaaaggagagggatgcccctcaagagtaaacaaacattcacaagcatatacaatagtgaaaatataaattaagaggttgtagcacgttcaaggaacaataagctcccttacatccgaataaaaggataagtaaataaaaagaggttaagacctctcaaagagtcaatgctccctcaaacaaaaaacctacctaccttggtagagaccttatgaggtcttaaaaaaagagagagattagcaatcattcagccttgggtaacttaaagtaactaagccgtgagtgattgcgaaagcccatcgatcaaagagtaaccctaagtgttactcagccaaggtcaattccaaaggtcacttcgccaaaattgacaaaagtcactcaacatttagtaatccaaagtcacttgaccatgagttatggcaaatgtcactcggctcaaaaataaataaaaatgaaatgagagctagctgtcaagtgatgctggaaggagggaagtttcccacatatactaagtgtttttttaaagtacgtgaaaaggggaaaagttgacaattcaactaaaggatactaggttaactagtccacaagaacacttaaaagaattcttacagactatgggacaagtattaaccccaaaagtaagcgctgctaactctcgatgttcgattacagtgaattaagatattagcgaaggcttgctcaacaagatcaatttacatagactttaaggaagtcactttatggggaactcaagcatgtcactcaacatgcaccatgccaaagccactcgacatgcacatttccaagtcactcgacacgcatctctcaaatgtcactcggctagcatgcatgcacctgactcaacatgcatcacactctccatgcaccttacttggctagcatgcatgcacctcactcgacatgcacctcactcaccatgcatctcacttagcatgcacattgttgggtcactcgacatgcatctcactcagcttgtatgcatgcatctcactcggcatgcatgcatcattcttcatgtacttcattcgccatgcttctcacttgacatgcatctcattcagcatgcacattgccaagtcactcgacatgcatctctcaagggtcactccgcatgcacctcactcaactagcacgcatgcatctcactcaacaagcatgctgatgagaacactaaggctaaagatacaagtaaagttccagttggcccggtgacaagggcgcaagccaagagattcaaataagaactcaacaacttagtcaacagaattttaaaacaagagcagagcgcagtcaacactgaaggagagcaaaa

SEQ ID NO: 310588 - DNA, 688 bp, Cannabis indica
aaaaattacattgaaatggagttttttttagggcacaaagcccaacattacctacttagggtttcttcctccacacgttattaagggctgtactacaaaaaggatgatctaacaatccactagggggaaccttcttcatcatgcggtgtagtgactgacaaggacctttatatgacctttgacacgtgtcaggcaaaggtctctcctttatgaaatactctctacattggtcgttgggaaaaaatcgtgcttgagggtgcgtacgcgcactaccatgggctagcacaggggacaatatctgatcttgtgtcaaaaaaaggtgtaccaatctttggagtgccattttgttaggagccgacgtgtcgaaggtctccagaacttgtatcactctttgggttccttaccgaaggaagctactcttagaagccattacttgccacctttttggttcgagagtcatttcatttaattctctcagatgccttatgtggaaactattcccttactttgatcgtgccacgtgtctaattaaggaaaatttggatatcacattcacatggagtaacaaaaggttttctactacaatgactagaaaggaaattttcaaaataagtatattcaatggacttaacaaaacttcttgatcctagtattataggtttgagattatctaaatctatggcttgtg

SEQ ID NO: 310589 - DNA, 1208 bp, Cannabis indica
atgggttttatttagagcacaaaacccaacaatatatactgtcaacgagaattcaaataaatacatgaacaacaatgtcatcataagtgtgtgatgtgtcctcatgtgagacactaagaaatttatcaaggcatctcactcatctctctaaaaaatgactaattgagtattttgagcacatgtcttttttaagattacttcacacaatgacttttccaactagttgtggctttcacgcttccatagagatgtgaatatttctcaaagagtgacaagaaaaatgagcaaacttctcaagtcacacaatggtacaagggtagttcttcccattacatccatgaaaggtagccttttcaaccgggacaacacactattcatgatcaaaataggaaatccaatgataaagttatatgagatctatcaaccaaaaagaccaacaaccattgacaaacaaaccactaactcgagcacagttgtgaagatgtccagaggcaactttcacaaggtcagatggtacacataccaatagaattttttagatgagcaaaagtgtgagcatctaatgccttcgtgaacagatcagtaagttgagcacatgtggacacatgagtaatatttaaaagcttagattccaccatttgcctaataaaatgatactgtatgtcaatgtatcttgtgcgagagtgttgtactggatttttcgaaatgttaatatcacttgtgctatcacaaaacaatgccgaagagtcttgtggaaaaccataattagttaccattttgttttgccaaaggagttgagtacaataactcctagttgctatatactcaacttcagtagtgaaaagggatatggaattttatttcttactcaaccacgagacaagattagtctcgagataacagcctcctgtggtacttttacgattatccaaactcccagcccaatcaaagtcaataaaaccaacaatagacatgttagtatctcttgagtaccataagccaaattcaaaagtcctagaaaggtatttgaatatacgttttacagcaaacaaattcaaagagttggaaaattggaataggagctgttattagaaactggaaaggtaatattgtggttggcatgtctattcccattgcaggttaggaccggccctgaaatttagtgggccaatggaaaaaaaaatatttttgggccctcatttagaaaa

SEQ ID NO: 310590 - DNA, 2270 bp, Cannabis indica
tgcagtataaattataaaaatacacagtaaaaaagtacatcttgccgtgttgcagtaattttgtaaaaatagcaaaaatcagtataccatgtaaatttccatatctattcatttaatggggcaaaattagtcccttaaacttaaactattcaatatttttaaaataggtaaattttttggataagttgaaaaataccacttttttatatctattaatcaaaaataccctcatattatattttattaaaatatacccagttttttagttagttgcccaatatatcctcactaattttaaatctagcatataatttacattaacctaaaggatctaatgggaaaatcatctataaaagtgagtatatcttaaataatataaaaataggagtaaaaattaaaacaagtaaagtaaagtgggtatacaatgtaatttcctctaaatttttattaaatcccattttacctgtctcatttaaaaaatttgctctctctcttcctcccctctctctttctctcgaactttatcgaccccaccaccaccacgcaaatgtcgaccgaacccaccatctaagcaccgctcgactgaacccaccatctgagcatgaagacccactcaacccaccacccccgtctccctcgctcttagaccacaaagacgaccacaaaactcaacccaccaccacgcaatgttggcaaaggtaagatttctttcctgtggtatttttgaatgtttttcttattgatttagggtcaaaatattatttattgatagatttaaggtttgatttgtgagatttggattaaatttagggttagattttgtatttgtgattcttgggcaaggaaaagcatgtttaggtaggaccaatgcaggcccaatgcatcctgatgcaaagatggatctggggttgaagacaaagatctgatatagggcccgatggtcggcccgattgtctacccattttttccaaaattttgagttggcgtgatgggtccgatatacggtacgatggttggcccgattgatgttctctttcgttattttttatatgaggatctgataggcctggtatagggaccaatagtaaacccgatggtaatgttgagtttttattttttgttatgacttaatatgggcccgatataaggtacgatattaggccccatggattttgttatagttttctttattatatttttactaaattttataaaaacaatataaaaataacctttaataataatagggaaattttattccttatatatttaataaaaatctctattacaaaaaatacattattaattttttttttataatactttcttaataattcattattttactcaagatacccttaccatttaattgtttttcaaaacttaaaaagcttaaaagtaatccaatctctctctctctaactccatcaacctagaaccactttacaaaaagaaaaaaaccctacatccgtctaaaccgtcgcctaccacctttgggatactcgaccaactgctgtgaaagacatttgcccagccttctctcatcactccaatcgccacccgtcacccagccttatcaataacctatcgacaacccgtcgataatcaatcgatattcaaacaagaatcaataaaaaaaacaaaactataatttttttttcaatgtttcaactatcaagaacaagccaataacccatcaataatatttaaacttaatgatcctcaccaaaacttgtcgatgacttattgagaattcgtcaataaataatcgagaacatacatccttttacaattttctcaaccaacaccatcgaatcagaaataccataaccaccattcaacatagacattgacaaattattctaaattaaccacaacaaaagaaaattaaaaattaactaacaaactttttttagaaaaataccttcgtgggggcggaggaatgggctgcacgggcgtgttgagaatattttaccaggacctagatttactatcatgtattttgaattaatatccaaaatttgaatatctctaatacgattaaattaaacacataagagtttagaaaaccttacattagttgcagcggaataatatgactccttccgctcatatctctaaccattgttcctttctgtcgcagagtattatcaagatctgagcctggatctctttctctccttcgggttggttaccaccgtcttccgcactatgattgagcttgacttactatgtgtgggcatggtactgtactgttgggttttatgccc

SEQ ID NO: 310591 - DNA, 5582 bp, Cannabis indica
gatgttaaaaaacatacatgttagtaaatctagatcctggtaaaatatattccaacaggaatatcaccgcatgtcatgtgtcatcgattgaacattgacccagaaatgcaaggtgtctgacagaagctcagcaaaattgactcggcgatgtaccaagcgcttaaagaggatgttgatcgcctattggcatgtggctttagaatcaagttattctaccctaactggttagcaaatctcgttcttgtgccaaagcccaacgactcatggcgcacatacgtcgatttcacagatttaaataaagcatgtcccaaggacatctttcctttaccaagcattgacaaacttgttgatgctactacaggttatgaacttcgtagttttatggatgcatactagggatacaaccggattccgatgtatgaaccagaccaggagcatacttctttcattacagatcgaggtttgtactgttataaggtaattccctttggtttgataaatgcaagagcaacgtatcacactcttgttaacatgatgttcgcagatctgataggtgagacgatcgaagtgtatgttgacgatatgctcgtaaaatctcaacatgtgaaagaccatgtcacccaccttgaagccatgtttagaatcctacgaaaatataaaatgcgacataatcctctcaaatgtgtctttggagtgggttcaccaaaattcctcaactttatgatgaatcaatgaggaatcgaagctaatcctgcaaaaataaaagtattggtggagatgtgagctcccaccaaaccaaaagaagtccaaaccaatacaggtaaagtcggtgcactaaatttctttatatcacgttcctctaagaagcgtaaagaatttttttctgattttaaaaggaatttttttttcagtggactgataagtgtgaagaggcttttcagaccctaaaaatgcacttggggaaacccccaatactatccaagctgaatcctagagaagtcttgtcaatctacctcgcagtgtccgaatacgcaattagttcggtacaaatccgcgaagaccaaggtaggcaacatctagtatactatgtgaacaaatgccttcaggatgctaaatcctgttatccacaaatggaatggcttgcattcacacttgtgattgctataaggaagttgtgaccttactttcaagcacacaacattgaggtcttaacgaactatccttggaacaagtttttgccaaaccagaagcgtttgagagactacttaatttgtcaatagcactgagccagttcgacattaggtacaagccgagatcagcaatcaagggacaagcccttgctgatttcatactagagtttccaaacaatgaggtggccataatcacagaagagcgagttgaccccgatgtacgaacaagcaaggggtggactttgtaggttgatgggacatccaataatgaaggattaggtggtggaataatcctcatatgtcccaaaaaattcaaggtacaagctgccctatgatttgaatttcctgcatcttacaacgaagccgaatatgaggctttaattgcaggattaaaactccctctcaagatgaaagtcgaataccttcaagcattcagcgactcacaactcgtaatttgccaagaaaacgaagaatatctagccagaggacgacgtttggaaaaatatctttcttacacttgtgagttattacaaaaatttaaaaagaaaattgttagtagaataccccgtgcttacaattctcatgcatatgccttggctcgattggcctcgacgtaattcttgttgattttttaactcatccaattattcatcgacttgaaatgatggaggtggctataatcaaaaaggtcacctggatgaccccaataattgattacttaaaaaaaggagtgctccctggcgataagactaaagccaaaaaactgtgatatcgagtcgcctgatgtgtcatttatgacgacaagctctatcacagaagtttcattcagtcgttgcttaaaggcatccatgggagtaaatgcgaaacatactccaagaagtacattgtgggatctgcggcaatcatcctggtggtaattcccttgctctaaagattatgaggcaacaatattactggcctacgttttgggtagatgcagctaacttcgccaaaagatgcgacaactgtcagtgaattgcaacttatgtaaataggccaccgagccaattgtattctagcactagtccttgcctatttgcactatagggaatagatttaattggtgaactgcctaagggaaaaggaggagtaaaatatgctgcagtcgccgtcgactacttcacaaaatgggctgaagccaaacctcttgcgaccataacatcctccaaactacgcgagtttttctatagtgctttcatctgcaggtttcgcattccatacaacaaatttttgacaatggtaagcaatttaattgtaaggagatgcatcgactatgcgatcatctggggattctgaaagctttttcggtggtcgcatatcctcaaagttatggaaaaatagaggtagtcaacaaaattatcaagcataccataaaaggtaagctcaaagaatggaaaggggcagggccagaagaacttccacaagttctattgtcatataacacaagtcctcgctcaacgactggtgaaacccccttctttctttcttatggatgcgaagccatggtacctgtcgaggttggagcaggttctttgagaagagatgtcttcaacatcaacaacaatacagaaagtcagttgttacaactcgatcttttggaagaaaaacgtgattaggctcatttgaaaaatgcagcctatgggcagcgaacaactcattatttcaactcaaatgtcaaagaacaaaacatgtgagtaggagatctggtgctacgcaaagttatgcctaacatgtgtaactcagcacatggagtattcggcgataactgtgaaggaccgtacctaatcgctgaaaaaatcgataatgcgacttactgtttaaatctgatctcgacgggacaacaatcaaaagagcttggaatggagaaatattgaagtattactatcaatattactcgcatgtatttatactaagtcaatttatttcaataaatgtactaagtatagggtgtataacctaatattgtactattgattatattaatgaaatattcaaagttttcagagttttttaatctttttcgcaagttttttatattctaagttttcacaccaagctgtgataatattgctaaagatttttgcgaagaaaaaacaaaagcaatagttaaaagtgcaggttaaaaaatgcgagtacctgtgtaatgctaaacaagtacgcaaaagtaatatatcctcaaaaggatatattgttcaataacaaaataaagataatttgttcaaagtacaaagcgcgagtacccgtgtaccgctaacaaaagagataaaagttcgacaatgataaaaacaaacttagaaaaattaggaggttggagcattgggatcgtctgcgaccttacttgcagcaccatctgcaacctcctccgcattcgcgttctcggcatcctcaagaaaaagatttcccccgtgtcctcgagtctgagtaggcgacatagcacgaaatgcatcgaccaattcaaatgcctccgctctaagaagtgcaaagtcaaagtcagggagcttggacaaagtcgtataaatgtaatcagagacggcctagtaatattgcttcttcccgatctccttttcattctcaaggtaacaactgagttcgtcaactcgtgactctagaagttttacttttccctccgcatcccccttagccttctcaagatcttagatgtctttgtccttagcagtcacctccagtttcagcttctttacgctgtcttggagaagtgtgttctacttcatcaaaaggtcgagttccttagaacatgtgacaaaaggcctcgagaacatagtcataaattgcgaggccaattctatagagcgtggcaacaagtcctcgacaggaaccctctcgtccttggaaacgaactccttggtcacgaatttgtcttgaagagttatgatgttgcgggccctaacagcaggatcattcatgaccttcttccccttgtcttgggcatatttgagttgcttctttgatgagtcagccactggcgaagggacagcatcgcttttcctcttctacgggatgacaagagaagttgtcgcggttacaaccttaggcttttggttgaggatgggagcttgctttaggaatgtcatttctgcgagaagaccataagagaaatttttttttaataattttttttaaaaaaatgaatatgttaagcacattacctgatgttggtcttgatgtttatttagatagacgcttgtctattcttttgttttttatgttctcgcaattttgtagcagtgcacagcagtcgccaatgcgatcttgaacaggcaagctacctagaacttcattaatttcccggcgagcagaatcaagtacaggtcgagctggcctatctacgattgacaaaagacaaaaattagcgactatacaaggtaataaaagtatatactaagtattgggatacgcaacatactaggtcgacgattgaagtcagtcctaactcctagtactttaaactcgtagaaccatttcgatttccaatctcccatattggaaaccatacctttactactacaaaaagtacaagatccgtcggtttctaagtgtcatttaaagaatttacgtcggttttgaaaaccgacgtatatgccataatcgcaaatagttttttattatcgtcgttttttaaatgacgcaaaaaaaaatatcttcatttaaaaaccatcacaaaatatacattcttctttttaatattttgcgtcatttttgaaatgacgaaaaatcatttgtggcatttcaaaaacgtcactaaaaagttataccgtcgattacaaaatgacacataaattactaaaatagttttttttttcacctattgcttcgattataaaaggaagcataatgtccacggtaaaacctttgtacatattaaaaattcacaaataagctatattattatattcatagaaaagataagcgacccaaaatccatcagcaaagcatttaaaaaaaatataatatttatacataataatactaataatactaataaaaagtattacaaatgtaaatacaatatgatcatagtaaagttaacaatatatataaatatatatggtcattatttaaatatatacatatatggtcataccaggattttcattgtacaagagcctatcattcaaaataaacaagtctaacctttgtaagtttgattcaaaaaatgattaggaatgactctcctagttttaaccttcataactcttaatatcatttaaattaataatacttctattcttcataatcttctctgtaaaattgttgcctcaagctttataattaattttatgttttcaaatttacttatgaaggtataaaacgatgtaataataacaaatgtga

SEQ ID NO: 310592 - DNA, 1035 bp, Cannabis indica
tttttttgggggggggggacaatttttcatctttctcatcactattttgaagaaaaaagtattataaatgagtgctctaatactacaacagaatatattctagcaattacaaaattagaagtagtactatttagtcaactactttttattaaattagttaataaaaagtatggcatgggatcggagttctcaattatgtatgtatatatttataatgctactttttttggacgcacatatagcctatgaacaaaaaagtttcaagtacagtaattaacaataggatgaaaagtcaaagtggattaagatttgacataaatctaagcttttttgggttcttaatgacattttatatattttccaaataaaggaatatattatacataaaaatattttataattacacaactgcatatagtactttgtcaccattttttttaattaaatccttatgtgtctcaggttttaacttttaattgcactatatggatttatattaaggaaatgggtaagtgcaatctgttttttacaaaaaaaatattaaattttaagtaaaaatttataattttattgatagaattttttttataaaaatcctttcattttatgaagtaatcgtaaaacactaaacagaacaaataaaaataatagttaaacaactaaaaaataacagtaaaacaacaaataaaacttaacacagtacaccgtataaaaaaatatacaatatttttgaaaaaatacagtactttaaaaacattccacccaaacacagtattttaaagagatattggcggctaaaccacctaaactttacggtttgtaacacttaactaataaaaccgaaatttcggcggctaaactacctaaactctggttccgttttgctctgcacacctccatccaaaaattacagttaagtgccgcggtggactgtccacgtgtacacactatacacgtggcaaatttttaggcgtccacgtaatattaattttaaaaaataattataaatattaaaaaaattaaaaatcagaaaaa

SEQ ID NO: 310593 - DNA, 1214 bp, Cannabis indica
gtaaatttagatcctggtaaaacatattccaacaaatggcctcagagccatggtaatgatttactttcataaaatatggatttaaaacgatgtttgtgttgatttggatggtttcatgatggtttatacttatttgatgattgtacggaaatcgcaatgtatattgtaaaatatttttggtttcattctggacatagttttactagaaagtagacgaaaaattaatgaattaaggcttttacagaattcaatttgaattttttatgaattagttacgattttttgaatttggataaaaatatctaaatttgggttgcacacacgcgcgcgcacgaggtgcaacactcggcatgagtgttgtacaccctctatatcgtaagccgtgtaatagtcctttgaaatgagtgttgtaaaccctctatatcgtaatccgtgtaatagtcctctaaatctagatcttggtaaaatatattccaacagggattagcaagttgaatgtggaagtcctctgaaatgagtgttgtacaccctctatatcataagccgtgtaatagtcctggatgtagcccccaatttttgtcaccttgggctcattggttgtgcccaaccacatatagcccagttggttgatgtagaagtatcctgtccaaatctgaccaaagttagacttcagatcaaagtaccaactgatctcgaatggggaaggtgcggccagtctatcttgaaatataacacgaaaagggcaaataagtacttgatccccgtcggagtcaactccactagatagatcccaaagtagttgcctatgttttggatgtaaggatgaaaaggcagcatcgccccttgttctacgtggggtctagagcacgccatccaacactcgggaggagcatgggaaagatacaacactgaggtcaagtcagtgtggacgtccccaattagccccctactttggaggtttctaaaccttatcggattaagctcagatggaggagattcccaggtagctccatgttctcaaaattcgtaaactatacgctagtgtatgtgtaacacccgtattttataataataaactcgtaaattaattttaataatttatatattaataatcatatggatcgggatcccgagtgtcaaaatacaagttaaaagtaatttacttctatatacatatatatatttttttaagtttagtggacatgcatcctcaa

SEQ ID NO: 310594 - DNA, 549 bp, Cannabis indica
aaaataatcaacttttaaatttaaacctcataatatcataaaattaataataatctattaaaaattatatattattaatttaaaattgacatttaagtttaaatattttaaaaataatttttttattttgaaattggggtttgaaaattttaaaaattttaaataaggagaaaaaatcccacaaaaatcagatttctgggttgctagcagcaaggctgcacgtgcagccatgagaggctgcaaacagccgaggacacacgcgcaaagtgggatcaggaggcttattggcgcgcgtaggaccctgcaagcagggtgtgggcgcccaagtgtagcctccatcgtgttcaaatgcgcctaccgtgtctgaagacacgggttttgtccacagcaatctgcgcgcatctcaccttgtccaaaggtctggtgtgcatgtgattgatcaccatgtacacccgatttcaaacctttataacttttccaattttcatcggaatcgagttccgtaaaaactaaattacttaatttcttacaaggaatccaaataaaata

SEQ ID NO: 310595 - DNA, 752 bp, Cannabis indica
ctctctctctagcttcggttcagccaaaaaccaaggagaaacccaactgattttcatcaatcttgaagtttctagcaagatttcatctagtgaaaacctaggtaaggactccaatacctttctcttttatttttcttagttttgaagggttcgagcatgaattgtagaatttgttgctgttagaattaggatttgttcttgatttctttctgctatttagtcaagttgttttacgttgggttcttgtggatttgaagagtttatcttgtgttggaaaagtttgagtttaaaaactcaatgaactcatacttggtctattaatgacggattgtgtattttgtgtaatacttgattttaccacttgaaaatgattcatatggatgattacagatattctgaagagttttggaaagtttggggtagtttgtgttgatttggaggttctttgttcttctgcagtaaaaaaacagcagaacatttctatagaaattgcctactgttcttactgggaaagacctagaaaaatagcttgttgtttttatagaaacgacatgccttttttttaggcagatttcatgtttcgttgcttttctcattttcctcaatatttaggactttgccatgccatttatcgatagggaaactcagaactggccctgagttaaaattggtcgtaggcaaaaaaaaaaaatgggagaagttaaggagtggtatgagcttcctcgagaatctcatttctaagttccacgctg

SEQ ID NO: 310596 - DNA, 1368 bp, Cannabis indica
cctatatacttttgattctagccaactccacttgtctgccacctcttcccagctataccatctgctcatatggtcactactgatcctcctcaacccgagccaaatcatgttcactcatctctttgttttcagtgtagtagtagcaataataattttgaactttggcataatcggcttggccatccctctgaaagggttgtgaagtctgttctttctcaatgtaaccttcctcatattaataaaatttcaaattccatttgcaaagcttgttgtttgggcaaaatacacaaattcccttttcccaaagtgtctgacacatgctataatactccattacaacttgtgcattcggatttatggggcccctcattcactacttcacacaatggttacaaatactatatacactttatagatgcctactctagattcacttggctctatcttcttaaaaataaacatgatgtcatcaaagtgtttcattatttttcaagctaaggttgagttacaattaggcaccaaaattaaagtgtttcaatctgattgggggtgaatatcggtcctttactgacttccttcagtaatctggtgtagtgcatagaaaaccttgtcccaccactcatgagcaaaatggaattgctgaaagaaaacataggcacattgttgaacatgttcttgccctcttagctcatgctaatcgacctctaaaatattgggatgaagcctttaggacagctgtgtatctccataacagacttcccactcctgtcctctctcaaaaatctcccattgaagtcttgttcaacctcaaacccgattatagcattcttaaaacttttggttgcacatgttttcccaacattcgaccatataacaaacataagttagagtttagatcttccccttgtaatttcattggctatagtttaaatcataagggctataagtgtattgacaaaaatggcaggttatatatttctcgtgatgttatttttgatgaaaatacatttcttcacaattccactagcattgaaactgatccatcttctcatatcatgcctgccacttctgctacaatacctattgcttctaaactctacactgttggctctcttttccctgatgatattgctattttatcacctgacacatctgtttttccaattacttgttctcatccctctgatgagggtccaagtaatatgttgcaggaatctagttctccaatacttccaaccaactgtgtttcagtccctcatcagctgccctctgtccctgagcactaggttatctgtaataccctggaattaaggaaatggattagcaaagccctaactagttaattgagtattattgtagaattatatt

SEQ ID NO: 310597 - DNA, 1043 bp, Cannabis indica
tagccatgtaatcttagattcagattagaatgccactaattaataatgtttcgaaaaatcattgtctcttgttttgctgttaggagaaattcaaatactaaggtcatcatcaattttaagctatagtttcacacactaaaattaaagtactattattatatatgtgacgaattgtgtatgcgcttttactatttttccacattataaaatgagtgaaaatgattctttaatagcactaggctccttttaaatatgaatattggtgtttcatatcattattgaagacttctaagttgtcactatcttttatgtggacttttataagctttcataatgttttatatttaataattatcacgatgcacattagtgtttttaattaagttaacattaatttgagtttatttatttattaagtatgatgtaactgccgataataataatgtatattattttgttcttatctctaaatattatctatatattaatggtaggttttcatctttcatgagtagtataaactagtatattattgtttctctcttgtattatgattctgtatactaattaagattctcatatattggtggccggcactatataataagatccaataaaagcatagatacatgctatggtaatatttactaatatatacataatgcatcgtaggtttaaagagaatcaattatcatgactcatgtgcataattatttaagggtggttaatctataatatatattatatatgggtactatttaatggttatattttttattataactatcatagttatatttttctttgacctgtaatagaaggttagtaataggtaaatatttttttagaattaattaattataattaactattttcttagaataattaattaaatattaaacaagacctcttttagaaattgatatttataaataattttttatttatatttaaattcctactctaattgttctaacaattaagcaatttaattataatatttacaatagaattttatttttttataaaaattaaacttcttt

SEQ ID NO: 310598 - DNA, 504 bp, Cannabis indica
aaaaatattatttttccatgtaattactaaccattttgccaaacaaaatattaggaattcatatgtaattaccacctcatatccaaacacaccttgtattttaaaatatagtgtaattactagactgtgtaattaccaccctagtaattaccctacctagtaaatacacaattttttgaggtttgagacttatctacataaagtaaacttttcgaggacttgtgctgcaatctcaagtttgagtactattactgcaaattttcaaaattggaacttatttgcatcaaagtgaactttttagaaacttccatagtttaatatcaacacatagcaattttatgagcaaccgacatatctattaaaatgagaaccaacgaacttacaagaatctcaagcttgagaattattactgcaattttttgaagttgaagacttatctacattaacataatgtttggtaggaggaagagatgggtggatggagaggagaggagggagagagat

SEQ ID NO: 310599 - DNA, 1206 bp, Cannabis indica
aaaattgtatacgcaagtgcacacaatcgccaacaagtaataaagtgataagttgagtatcgtccccacaggaattgaaaattagaaattaatttacaaaactaattacttacaaatcaatttcaacaaaaataaagtgatgagaatatgtaaaaattaacaaacacaaacatagaagaaaacaagctagaattattaattggcctaaatatataaagttgatataatggtgtaaattaatattattgtaaattgataatgtcaattaggaatttaacatgtcataatcctttttccaaagtgtttatggttggaatatctaattaattaacatattcctatgcccaattattttaagaatatcaatttaagcacaattccttcaagtcatacaaggtaaataacatattcttatgacaccatggatttattcacccccatgttgcagcggtaatggggctacgtctacttttatttttattgattagatctgacacactagagttatgttctcaagagtgtgtggataaaagtacgacaaaggatttctaggtgaaatcttaatcgagatttacaaatataacactaatgggagacttgatattcaaaaatctaaattggctgattgtatagttcttgagaacaataaaccaataaagtacacaaaagggatgtgtaggtgtttagatcttagtgtcgattgagaatggtggacttaatgaaaaagatgaaggagtaagtgtggtgttcttggttgtcatcaagtgagtctcaaagagaaggtttccaagaagaagatcccaaaaagagagaagtccctatcttagcatcttacttatccttatataggttgtaggctttgttagtgatcccccacatgttggggaatctcactaacaaatcccgtatatcaccttttttaatcaataaaaaattacaagaaaataaatatctataaaaatctccttgtttctaggcaaaaattccacaaacattgggcaagttgttattttaggttaaggaggctccaatttgaaatggagtgacaagggatgtcacctttaggcttggaattcataatattagtgataagtactaaaattatgtgttttgcaatgtcaatgctcgcatataataccacatgggctgtagtagtatcctccaacacccctcacttaaccacattactcaattcccgagtaaaat

SEQ ID NO: 310600 - DNA, 773 bp, Cannabis indica
cctacacagtctcagaatcatcccacttgaccttccccaggcgatgtgggattgcacagcttacccggtatttccccttacggatcacgggactaccgactgtcacaaatgatctgggttgcttgttatgcaatgttcaagaaaaatctcgtgaacatctaattttttatatgcacattcttgtttcaatgcttataggaaataaaagtttggcttcaatggaaggcgtgtactgcatccattactagacttacaagatggatcgacagagctaaaaccagtaagttcaaaaagcaaattttatctgttgtattggctggtttagtttatcaaatttggaagacgaggaataaaaagctttgaaattcgaaaattgaagatgtaaatagtgtaacttgtatagttaaagaattggtaaaacagtgtttaaccaaaaaaaattagcttgaaagatacggaataatttttatcgttgtaataaaaaaatattgtatagaatactttgaggtcttcagatgaagatgcttgtagtatgtaaatcagtgtttttgaagtaatgaaactactttattcatataaaaaaatatttacccttataaagactaggctaattagtaattttttctcctgaactttgacatgtagtaaagcgtgccccctgaacttttttggcagttaaaaattccccctgaactattgagattgttaaatttaaggacttttgtttaattttagtaaaaaaattctaacatggatgaaagttcaagggacat

SEQ ID NO: 310601 - DNA, 3341 bp, Cannabis indica
attactaattagtccttttttttaattgtaatcggtttgaattattgtgtgttacttgtctgtattcattatgttatataactagttctattttagttacaaccagttataatttaattataataactttgagttattttattttatttgtttttattctgtgttacagaacaggttatatttcaattataaccggttctatttttgtttatatttgagacatctacttctgatgactttttcagtaactttttccggtgggtgacttttccggtactttttccaacgacgatgacttttccagtgacttttctgacaacggtgattttttcggcgacttctctagcgccggtgactttttcggcaaaacttataactgtttacaaatatgagattttcatcttttgttacaaaaatatggcataaaaaacccatataaatgtaaaaaaaataaaaaaaactcataacctctgaactttatttatttatgccatgcaaaagtaaactcttaaagttttcccatatatagtataatttctactatttaaaatgacgaatatatatagaaagaaataaaaattaaatcataatccatatatatagaaaacaacttttaataagaagtacttataaatataaatattaaaaattttaaaatattaaactattaaaataaataatacaatttggttttttttttttttttcaaaaataataataataatatacttcatgtctaatccataaataatttatattcccaaaaaaaaaatatgatctttcatatataaacttattacaggctaaaaaaataaaataattatatataatatatttaataaaaatatggttcttatactcaacgtatacaaaaatatagatgttcattttttttttatagttttttaatttagaagttgctatgtaatgaatttttattgagagaaaaataaaatttttgtctcttacaagcaattgttttcccataaattttccttctattttttctttttttttctttcctttttttattttattttttataattcaattttgttttatttttatattttttcctttcatcaattttttcactacaaaaaatcttacttttagtcacaacgaaacttgtgactaaaagtaaaaaagttgtgattaattattaattattattattcttatgtagtgactaaaaagtctgtggctaaaggtattaatcacaaaaattataatttgttgtaactaaatgatgttttagtcacaatacttgttgtgactaaaaataaattagttacaacctctgtctaaatactatgttttagttacaagtagtttttggttgtgaccaaaagtcacatttagtcacaaaaaatatatgttgtgactaaaaaattgtcactaaaagtaactgttttttgtagtgttttttttattattatttttctcatatttttctatctcctttgttttttttttctattgacgcggtatttcatcaacgtatctacaaagatcataaatgagcaagatgaacacaaatactagttaatcaaagtaaacgagtttgtgaaaggaaattcgacaaagatgaacatgagggttatatagtggttaagcccttttagtggtaataggccattccacttaaagtgttattgatctcaatgcttgaggagagttctccaagagttccctgctcaagtgagtttagaatgagagaatgggagctcaagagagtgatttcatgagaataaaaatttgtgtccctttacaagtgacttcactccccttatatagcttttcatctaggactaatttagagtttaaaacctgttatgaccgtatatggttaaatctttggattattaaataattagggtttatgtatgagatttaattattatttataaaatgcatattgtggaaatttatttaagttatctatatctatttattatgctatttatgtaaatttctcaatttttgtggttgtgttcagaagctatggaaagcgacattgggcctttagagagtcgcattttatatgttttagaatattattagcgggatatcattgttcagtattgaaggtgttggaatttttggggtttgaaaatgactaatttacccttggagtttgtaaccatttatgttagttagaagggcaaaagggtctttaggaaaagactttatttgtcttatttaggtttgtttctagtgctgaatataagtttattgatttaaagaaattcatttatttaggttagaaggaatcaaagaaaacttagagaaaaagcatgttaccctttcttcaactctttctctctctttcaattctctagggcaacagctggggttggtgtaattggagttaaatcaaggaattttagtgataatatagagttttggtcaaggtaatcctttctacttccttccttctagagtttttgtaatttaggttagatttttgatgtgagattatgattgtagatggttgtatgtattgggttaatatgttgtttaattctggagttaggagttaattatacatgctattttgagttgagattgaggtttatgttgagaattgttcaagttaaagttaagagaacctaagttgggtttctaatggtgttttcataaattgagttgtttgttgtggtttgatgcttgatatgtgttatttggcgtataagcaggtatactaaaagtttttacaaagtttggagttgatttgaatcaaggaggttgattttcggcttcccagcagagaaccagtttactggttctaggggaccattagaaccggtcgaccggttggtacccagaaaccaagcttccagttaggaacaggtctgccagttggggctttttctagaatcctagtttttcctatttttgtgttatttagggtattagcatcctatttatcgatagggttatccttaatttcaattttaaatccccgataggtgttttagcgtgtctctcatcaagttttgaacgttatggtttagggccctgtaaaacgtcgagctgcacttccactcaggctgaccggcacacttgagcacgaaacgaggtaagatagcataaatattacatatatgtgaatgtatgcttgtgttaaatgtttacactactaacactaaatgtttgtatggttttaagggtgttagtatagtgtaggctttagaatagttacagtgttaccaacacgagtatcatggagtacgtcgtgcatgtggtacaacacttagtgactttcgggggtacattaatggctctaccaacacgagtaagggttggtactttagtgcatttggtacagtagtcgtact

SEQ ID NO: 310602 - DNA, 976 bp, Cannabis indica
cactagttttttaaaaaacataggtaacaagtaaaaaagaaaaaaaagaaaaaaaaatagtgaatagtaaaaaatgtaaaagattaacaaaaaaaaaaaaaatcaatatgtctatctcatgttacaaggtttgaagttattctcttgcactttaggtttgcaccctaatcctacaaaatctgctatgtattttagcgtatgaaaaattgagaaattcaaagaatactggatatgtgtgggtttagtaggaagaatgttcctttcaaatacttgggtgcgccgatttgtgctaaaagaatctcagggcatgattgcaaattgcttgctgagaagaggacttcccgaatcaaggcttggagcctttcttttactggtaggacagcccttctgaattcggtgttgatgactcttcactaatattggagccaaataatgattttacccaagaaggtagttaatgagagtgaagctatttgcagagcctttttgtggaagggacagaatactttgaatggttctggtctaattgcctgggaatctgtttgtcaagcaaaatcagatgatggcattagattcaagagggtagctaaatggaatagagcagcaatgttcaagtatgttcgggcaattgctaataaagaagacaatatatgaattaaatgggtccatagtgtatacatatgggatgaagattggtggggctacaaggccccctcacaagggagttggtacttgaacaaggtagtggaggccaagaaccaagttaaagatttggtagatgtacaacagtttcccaatccaagtactatatctccctcgggtacaaattacttgctcctccccaacatagagtgcattggagtaagaaattttgggggaggttaaacactcctgaaaccagtttcctcatgtggattgcaattcaaggaagattgaggacaaaagagagatttcacaggttcagaattattgatga

SEQ ID NO: 310603 - DNA, 2268 bp, Cannabis indica
ttagataaaagtccttaaatttaacaaccttaatagttcagggggatttttttaactgccaaaaaagttcagggggcatgatttagtatatgtcaaagttcgggagggaaaattgctaattagcctaagttttttttatttagactcctgataggagtgggccctagatgctggcctagcccgccttagtctaagaccgaccctgttgggataccaaagcgtatagtattatttgtaatggagaatatttaagctatacttaaatgccaaatgagtaaaaaaattttctactaaaaatatttcttatgatatttaatttagctataaatcttgcagctaaaatactactacaaaattactaaatttatcctattaaatatcagttaacctctatacattacaaaacaatattttaattttttaaacctatagcttgaagcttgaaactttaagaatgctaagtttagtgggccatagggaaaaaaatatttttaggccctcatttagaaaaaaatgtggtattttttaaaattaataaaaaaatgtgtaattttaaaacgggataaattttttttgagcccctgagctaggtgggccctaggcacaagcctagctcgcctatacttagggccgaccctgaccttacatcaagttcttctttctttgagtttgcctacacctacaactgctactaagactgtttttagattgaaatttgaagaaaaataagtggtggtggtggtgtttccactaagactgtttttagattgaaatttgaagaaaaagaagtggtggtggtggtgtttcttgtcgcacgaagaggaaggaagagagagcttagtttaagtttttacttttcaaagtattaacacacacatatatctttatatattaaaagtgcctatctaacgacatttcttggtttaacagaatatactttacaaataaaaggatattctgttaaatttaaccccaaaaaagttttcttttaacgccgttaacttattattcttataaaaaattttaaaaaaattctcagtcctaatctcagtcgtttcattctcacgacaatctcttcactcttcccttccattctcactctgaatcgcagatcatcaaaaccaacagcccgacgaaccaaagcttcctttcaccgactcctccatttcactctcccaatcgattgatcctctctatttttgaagaaatcttaatcgatgtcgctacattttattggaagaagaaatccaaatcgatgccgtccaaaaagttaatcgatcaaatattgcagcagatccaattctcacatacaacgattctgatgtagctccttcattccccaatagtgtccctcgtagcttggatatcagctcagagggagaaaaatgtcgttcgtttcccttttccctctcttgatttttgatattttgtaaagggcaacaattctaattttattgggttcactattgactatcttctctctcatacagactgtactcactcttattttcttccatgatagtgaatctcatttgcaagcatgaaggagtcagaagaagagtggcatgattataagatagatgacaaaaagtacccctgtcagcgagtaccaacaatttatgatattaatagccatagtctctgattttgagaattaaatataaggaaagtttaatttcgatatattattatacattatttctgtgtacatagaaaccaagtttatgcattatcaaccctgggttatggtaatttttgttacaaagcaaggaccattcacataaaaatgggctactaagtgcttgttttaatataactttaggtatatctgggaatatttcacattttggtatgttttagaatgagactcagacagctcattgcatagctacagtttctgcaaacaattctgaacaattattttctatgacaatttggttggtttttttatatctggattatctgtttacatcgttttacatgaactattacatgagaatgttattttattagttttcagagcatttgcttgtctcttattttttacttttcttaaattgttagtataaatcaatatttagttaaattatggcgcaagagtttcatatatgttttgttccatttgaatgttagatacttttgcaaatttgaaatcgaccgtagctttaaatttgtttattataataagcttgcttgaaagtttatatcgttacatgaactattacatgatgatgttattttattagttttcagagcatttgcttgtct

SEQ ID NO: 310604 - DNA, 1715 bp, Cannabis indica
aaacaagaatcccttgatctgaccgagcaacttcaagaccaagaaatacttcaaatttcccaagtctttaagctgatatctgtcattcaatcttatcttcaaggcttgaagttcctcaatgttgttgcttgcaagaataatatcatcaacatacaccaatagaaatataaaatttccattaaagtgtttgatgaacaatgagtgatccgtggctgaatgataaaatccttcatcaactaaagcactagaaaacttggcaaaccattgcctagaagcttgctttagaccatataaggatttctgcaacttgcaaaccgggttaggtggtagctttccctttggtttgtatccttgaggcaaggacatgtaaacatcttctttgagatctccatgtaggaaagcattatttacatccaattgatgtaaataccaacctttcatggctgccaaagctaagacaagtttgactgtaaccaacttcgatactggtgcaaacgtgtcagtgtaatcgatcccctcctgttggttgtacccctttgcaaccaaccgagctttgaaacgttcaacacttccatcagcattcaattttatcttgtaaacccatcttgaaccaataacatgttgatcatcgggcaaagaaacaacaatccaagtatggttcttctcaagagcgtcaatttcagtatccatagcattatcccactccggaataccatgagcttggctgaaaaattcaggttcaaagtgacttgaaatggccaatgctaatgctcgaaaagttggtgacaacctgctataattgacaacttgagacaaaggataaggagtgattaaagagccatgagaagacaaagcagaaggattagaggctagataacaatgataatcattcaaatatgagggtttcttaacctgtctacctgatttactttgaatggcagtaggagaagaaacaaaatcatgaacataagatggtgaaatcggatcagcagtaagagatgtggcagtgtgcatatgctcaggatatgatgtatttgagtgcatatgttcatgattggaagaatgactatgagataaatcaacatgtgaatgtttattatgcatcatatcagtattatgctgctggtttatagaagtacaatgcatattggagaagaaattttcatgagcagtaggaattcctcctgttttgacataaggaaaaatttgctcataaaaataaacatctcttgaaacaaacacattattggtattaagatcaagtagtttataagccttcataccaatgggatagccaagaaaaacacaaggggctgatctaggtgtaaaattagaccttgattgacttaaggttgaggcataagccaaacaaccaaaagctttcaaatgagtataggcagatggcttattaaaaagaatatgaaaaggagacttgtcctttaaattgggtgttggtgttctattaataagataggcagcagtagaaacacactctccccaataaactaaaggaatataggattgaaaaaggagagctctagccacattaagtaaatgttggtgttttctctcaacaaccgagttttgttggggtctttgaacacaagaatggtagtgtaaaatcccaagctcactaaaaaaagaaggaaactgtaactgttggaaattattttaccaggatcttagatctactcacatgtatgttgattaacacc

SEQ ID NO: 310605 - DNA, 1496 bp, Cannabis indica
gagagagagagagacactgtaaacaacaatggattaccaatcttacctttgtgatttgggatccagctttgtatatctctgatcttgaagatccaatagtggaaacgaggcaagctcgaagaggacgtacccagatttcattggggaacctctataaaatttctggtgcacactttccatttttctttctacatttaatcatgtgtttgattgttgtgtctgttttctggggtttaaactgatttgggaagggttgatttgttttctgggtttggtgcagccttcgtgttctttagagaagaaacacgaagcctgctctgctagggtttcgttgtgccgtatgtgtgtatgaacgaataaaagaatttaagaaagttttggggggttattagggttaagagttaaacgatttggagtccaggttaaacggactgtcgtttggggttttgattcttgggagtcaactgagctttgactcagtgggaaaggtgtaatttgacgttggaatattgattagtttctttgatgggtgtagggcaaaataggtaaaatccctacagtggcatcagagccaaacaaggcagggaatctgcagcaaagaataatcaagaaaggatcaagaaaccaattcagaacaacaagaattcaatacacataactcagttcacaaagatcaacatcaagatcattctaaactcatttttctctacagtttcttgaaataattacatatatataattatgagttcaatgaaggttaatattgacaggtttgatggttcaagtgattatcgaatctagaggaagaagattatggctctattagctcaaaataaattattgagggttcttaatgaccccgtggaatgaccagctgatacacttaaggctcaacagaaagagttgctagaaacagcaactagaatgatcattttcaacctatctgattctataatcaaattggttgacaaagaagacacacctgccaaaatttggaacaagttagaggagcaatttcaaaagaaatcactgatcaacaagatttacttgaaggagaggatctatagatttaaaatgagttaatctaaatctctagaacaaaacttggatgagttcttgagatttcacattgagttcaggggaaaatgaggccttaagtgatgagaatcaagtaattatcattctcatttcactgcctgaatcctacagggaagtcaaaacaaccattaagtatgagaaaactgagatcactcttgaagaagtaatctcagctttgaaatcaaaagatttggagttagaggttgaaagacctgggcatactaatggggatgcaaacctaagcaggggaaggcctacacaaaagaaaccatggcaaaacaggggaagaagcactaataggggttcacaaaaggaaaataatcaccacaacaaagggagatcaaaatcaaaaggcactaaagatcctaatgggtgttatcatgttgggttttgtgccc

SEQ ID NO: 310606 - DNA, 3883 bp, Cannabis indica
taatcattttagtcatttttattcttgaaaaactagagcaaagaaatttttctctctcagattcttcgaagaatttccaggaaactcttgccagcaccatccgagcagatcaaaagcttcaaattagtgactaagttctttatttctctcttttatacattttcatgcttaattttctggatttctgtctgcgaatcttgattgttcttgaacttgttctatgataaccatagaaaatctaagtttaagatttagaaatctcgattatgcttaaccacgacgtttgattctactgagctttgattttaaccccacgatatttattttcacttatccatttggggtttagtgagaatcagattccaattcaaagttttgaacttctaagtcgaaaatttcgtttcttagtgaaatttatatttttgattcctcaatcaaacctggtctgtataatcaacctattgtttattcattgccccgaccaattctcatcttcttgtctcctaccttttgcagatgaaatccaaggagttttaggaaggtaaacaccttatcaaccaggatttgcttcaactgttgtacgaggatcatccttgcctccgtgccagttcgtcctcatccagtgataacctttctaactctagctttgaagactggaaagtaagtagtgaactcacgacttccctagaacccgaggtgcaacaccatttttatcgtggccagatccaaggtcaagggtacgatcgcttcacttaggaacttaagaaggggtaaagacgctatcttatgtccgactggacatacatagtctgtccagacatcattgacactttgcccaagggccatccaaaccctaccgttgtaggtaaacttattgcaacttttattgtgactgtcactaggcacacaaacaaagtttcatccaagcatagaatgatggcgcgaaccaagcaaactgtacggaaatcttcattatctgacccacatatcacccatattgccaccctgctaaggactgaagaggcccagcgtgctactgaagaggaggacacagctgaggacattgaagtctaagagacggaggactagggcgaggtttatcctgctgctcctcttgagggtgaaggagatgaggaatagggagtagctcaggtgctaccattcggtggcttcaatgtagaaggaaaacccatgactgattcctgggaggttctagaggccagtgaagactacgttactgaagagtacactgaggctattcccctgaggaggcaaggtccactaggagatcggtgggtctctccaccatccgtggtgaccatggaaaagatgaagaatttgctcaactgtggctacctggggaatgtcgaatgctaccttgcctcccctgatcaattggcaactagcccaagggaaggttactatgcctggtcgggagtccataccaagcagggtgcgatgttgccctgctctcatacttcaaaaggattgcggactattaccatataagtctgacccaattcagccccaagggcctcaagtatttatctgtcatgttcgtcctctacgttacacaaggatagggtgagccgtcctcgcatgataccaacctgctcttttatctgaagtcaagtcccaagcagaataggtagggatacttctatttttcccagatcgaaaagaagtggttgacgggcaccatggccaccaaggtgaccaagataggggcctttgtggacgaatactactttgtcaaaggaatgggcactgttcacagcagtttctagcaggtgctatcctattgttgccctccattacactggagctcaagaagagggcccaaaagattctacaactacctcctgatgcatggaacatctccttttgacagctgaggccaatttcatcatatgcaaattttttcggccgattttgtaccaaaggctgtgaagaaagtgaaagagactcggcccaaataggagtctacacccaaacaggagactccgagcaaaaggaggaagaaggcccctccaagtagccaagtacctgttgagcggtctatcaagatcagggaagagcctgaaagacctgctcagcaatccgcctaagtggcaggaaaagggaaagccatcctgatggagcaggagctagaacactcctcatatgatgagcctccatctttgcttgtttgggagaatgctcctgtctacgtgtagggtattttaacttatatttaagttttatgtattttggcatatatcatacttatttttaaccttcttatttcttcgtatgcaactatgtcttagaaggtgttctaggctatgaaaagaggtcaagtgatagcttcagccagacccttccacccaaacgatcaaagggtgatgagataccgcctaaggagaaaagctcgatcgagtctcctatcaacgtctctgaggaggcagtgtctgaggtggagccaccaaccaagaaggcctccaagtccaaaggtgccaagggaggtagcacacatgggtctggtttgcccaagccctctaacactcctatcatgctgaatcttgagaccaagaagggcaaggagatgcttccgtactaccaggatctgctactttctaaggtgaacgaccagctgttcgaaagagatgagatgtctgtggagcttctgatgggtgggctcctgaagaggcaacccgagtaagtatttttcctttggtttttatcttgtccctatagatgtgtaggttttaaccttttcttgtacagcttaatttgaagatggcttacgcctacttctgagccaagtctactaccctaaaaaactatcaccaccaccaccaccaatctgcagaagaagatggatgcggccaagaaggaagttgaggtcgtaagggcagagctaggcgagatgaacaaacaactttgggctgccaataattgagttgagcatttgtagaaggaaattcaagagaagccatctatcgcccagcttgaggcggatgtcaaggttctgtccaaagaggtcaatagtcagatggatgagagggaaagtctccatactcttcttgcaacctaaacaacggataagacgagcttggaggaggatgtcaaatttaggcagatgagggaggaagagcttctgaaggaggtcgagagtttagagtctgtcaccctggaagttttgtacgacttctagaaggccaaccccagaaggaaactttaattacctcggtgatactaaagaggaatatcttagttattgtgcgggccaaaaagataaggaaaaccttaaggcaaccaactccatagcttcgaccgaccaaaacactgagactctggcctccaatgaccaagttgacccgtacaaggaacctggaactcctgttgtgtgatcctttctttttcttttttttttatttgttcggcccatgggccttttaaatataatatgatcgactaagtgatctttaaacttggtaatacttcattttattttaagacaactagttgaccgagcagtctttaatcttgggtttatatcgtgcttttgtcatcttttttaaaatgaatattttcccttgttttagtaattgcacatgcaaactgctatgtttttttgagcttgttatttaccaatgctttgtgcgggtatagttactgtaacaccctaactaacataggcgtgttacgtgatttttaaacattctgtgcagctcgttgctaatcaacgaggtttatggaaaacgtgattaattaaaatttttgctttttaattaaacttataaaataatattacaaatgactcgggatcccgattataaaatcatttacaaaagtttacggttcatacaaaataattgtcgcctagcgactagttacaaaa

SEQ ID NO: 310607 - DNA, 1265 bp, Cannabis indica
aagtatgcatttaagaaaaaaattataaagttctgtaggtatcaaatttctctttatttatggttataacatttttaatttttatttttttgacacatgcatgcttgtattgtacaaaagcaacacggctctaaaatatagagttccacgtgtctttacaacataggaccacttaaacacgtttacacatgcgtaattaagcactaattataattattactcaccacttaattcttttttttaaatactactattcagtattcatctccaactttaacctccctatttataacaccaaaaaatacctgtccctccacgcctaaaggagatatctagagagagagaataacccttctttctttctcttctccttcactattaatacataatagagttgatctcagccgttggatcataccatatcaaacagctaattgtgatccaatggccatggctagctctctctcaaaatctaagctcctaatcaaccaggctcttcccctctccaatatcatctctcggttagtttctctttcttctttgctcaaatttattattaattaattagaatttgattttggcaacgaatgatctggaccgcacaggatggggtacgtggcgtcatctgaagggtccgtagggctaggattaagtaagggagggtgtatgataaagaataagaaagtggaagagagacctcttaacaagtactcaacagaagaggaatcggcctctgcatgggccccagatccattaactggctattataggcctgctaatcgtgcggttgagatcgatcctgttgagcttcgtcaaatgcttttaaacaataaagtcaggcccctttaattacattataatttaactcttacatatatatttcctaatactatattattactacaatacagctctaaaggattcaagatttatgatctttgtgctgttaattttcaaaaatctaataataatatatataaaggtcaaattatcattatattatcttgtttctgatgattgacttgataacaaatttactgtaatttactaatcggtctaaataacttaatattacaacaacctataaaggtaattttaacttaattttacatgtagacaaaaagaacttttaaagttttacaatagttggaaaaaacagaaatgcatactataatgtaggggtgggcatcatccaatctaatctaattgaaccgaaccgatccaattcaatccaattacaaaagttggatatccaattacaattg

SEQ ID NO: 310608 - DNA, 669 bp, Cannabis indica
atgaaatagagcttgcaaaaaaaatattggttgggaaaaaatagatctgtgtgtgcttgttgaagatgatgaagaagatttagtcaaaagaaataaatgaaaaagaaaaaggaaattaaaaaatattaaagttatttatttatttattttatttattatttaaattattttttaattgaaataaaaagttggcccaataatatttaaacacgtggtatttttgtcagcatttgacaggtctgttaaattgagtaccaacggacttgcgaaaatagcgaccttagggactattgccgctatttctcgagcttgacgactaatctgtaacaaagtgaacattttagggacttttgccgcaaatttcccaatttttattataaactttaattttttttattaggaaattctccgccccgtccctgcccccatggggggatttatagtcccatcgctgatggtgaataagtgaggatgagaattaaattttttaacgaggatggggatgggggcagcactccccgctaatttctcacttcgtgtgcatccctagttgacagtgacagtcctatgtgtgtcaccggtattgagaaggagaatgttagagtagtggatgttggataagaaaggcgattacctttagctatgagccatttgttggaaattatttta

SEQ ID NO: 310609 - DNA, 939 bp, Cannabis indica
tccgatgggttacaaatggcaggggtccgataatgtctgagaaatggggtccgatggaattttgtggataccgatgggttacaaaaaggcaggcccgatagtgtctcgggtatggggtacgatgggtgctggtggtcgataccggtgctggtggttgtgcggtgctatcggtggttgtgggtcggtggtcatcggaggtgaaggctgtggcgtcgtgggatgtaccgtaggctgtggcgtcgttcagcgagagagagagagagaagttttgagttttttattttagtttttgaaatgggaggggtatttgtgggatattagtaatgtggtcatatatgaccaatttttttaataactatacatttaagaaataaattttagggtattgtaagcatggaatttcaaatttcccaatacaaaatcaacattctattatggtcctaattgcataacgtcataccatgcatatagttattcacatatgttaatattgacatattgatattgtgtaagcaacacttaattatgtaagtccatataaagtattttaataataatagtctaaaaaatatttatctttgtaaaaaataaaggatccgacttctacaaaacacacgatagtccgatcatatatttatttaaataaatatataaatatgagattttttttaaagaaaaatatatcaggtggtgtaaatatttgagtgtatatccaattcaggtgcccatattatctagcgaaattttgtttttggttttcatcacatatttatttttttttttgagagagaaattcatcacatatttatgattgggcgtcaagtatttatatatggagatatataaaaacatcgattggctgaaaataattcaaagaaatgtttaatgaatctatccacatacatagctaccattactcttttttttttttttttagtt

SEQ ID NO: 310610 - DNA, 1768 bp, Cannabis indica
ctttgttcccaaattcaattccagcaatacaatcatattcctgcccatcaacacccattagtttatccccatttcctcaaaatagccaacataacacctcaaaaatcacactcagtccaatttcccaaccatcaccttccaactcaacacaatctgtccatattcatcaacccatgtcaagccaatatcaactcgagtcacagaatccccttcatctcagtctgttactcaacaccaaggcccttctgaacctcaacatcaccatttttcctccaccagattcaaccccaccacccccaaacaagaatactcaccccatggtcactagttcgaagatgggcattttttaaaccaaaggttttatcttgcagatatcagaacagataggaacaatgtactgtcaaacaagctttagctgatccaaagtggaacaaagccatgaatcatgaatatgtagccttaaaaaataagatcacatggcagctggttccccctactcttgacatgaagattgtgactaacaaatggattttcaagattaaatataaatgcagatggttcggtaaacaaaaacaaagcaagattagttgctcgagggtttcagcagacacatggtgtggtttttgaaacatacaacccaatggtgaagccatgcaccatacgcataatgttcactcttgctactcaacaaaattgggacattcaacaggtggatatcaataatgcattcctaaagaggatgtctatatgacacaaccacaaggattcattgacaaggagcacccagactatgtatgcaagtaaaataggcccctcgagcttggtttgatcaactcaaaaatcatctgctacagctaggatttcaaaactcaaaggccgacaccagcctcttctacagtagaaaaaatggaaagcttctactactcctagtgtacgtagatgatacactgttaacaggtcaagatactcaacaagtccaatccataatcagccatctacacacaaaattcgatttgaaaaagctgggatctgtaaattactttctggggtttgaggctctcaaacaggggtcaaattactacctgacacaacgaaaatatacaagagatcttttcacaagaatcaatatacttgactccaagcctcaatctactcccatgtttgcaacaaccaaactgtttctcaactcaagtcaaccacttcaagatgctcaacaatacagaagtgtcataggagctttacaatatcttactatgactcggccagacatagcatttgttgtcaataaattgagtcaatttttaaaggctccaactacaaatcattggggagcatgcaagagggttctcagatatctagcaggcacaaccaatctcggtctttcattcacaccaacttctcaacttgatctccaagggtacactgatgcagattgggctggcagctatgatgataaaaaatcaacatcaggatattgtgtgcttcttggccaaaacctcatcagttggtgctctaaaaagcaaagtgttgtagctcggtcgagtactgaatctgagtacagagcacttgctcttgccacttctgaaataacttggattaagtttcttctcaatgaaatctctttccctctttctcaatgccctatactttggtatgacaacttaggagctggctccctcgcttcaaatctggtgtattttgcccgcaccaaacatatcgaaatagacattgtaacaccctaactaccataggcgtattacgtgatttt

SEQ ID NO: 310611 - DNA, 2628 bp, Cannabis indica
tattatattttatatttttgctcccatactcggatcttgaacctaaaatcatacccgaactcaaatccggatgggttcatgttatggtatggtgttaaaatattaattttttttagtaagaaaaaattagaaatagttttaaaaaattttgtgccacactattaaatttttaaaatgacaaaaactgttttctattctcacttttaaaaatacagttttaaaaactgaaaactaaaaacacaaacaaataagctctaaattttttaaagttgtataataaatgttttttctttcaattttgaaagcaatcgttctcgtttgattgagcaatatcattatcattagttcaattacttctttttttttaaaaaaaaacgtttaattcattactttaatttcattgtatatgagtgttttaacattgcatccaagacaattaattaaaataattaagagatgcgaattcatatacggttctataaagtctagacagtactgttttaatttgtcaactttgttattttgttgaagttttaaactacattaagggaatattaaacggacagaatgattcagcctttacgttatggttttgtaaagtgcttacttagccctttaattgatgtagaatgaggtataaaagaagcatcccatcataattaatgtagagactttttgacaacttgatcaagagccaatgttggagtggctttatctaattatgaaaaatttaccttttttttttttaaaatgaaatatcaatttcattaaaatttagcattcagagtacataagggcttgtaaattagctggaacattataatcaagaatgctacaaccagaaagaaatcgagattgcctagcaacatagtgggcaactcgatttattgatcgttttacaaaacaaagactaacattttttaaagaggaaagtaaaaactgacaaatctttaacaataagaccaaagacagatgacatagtgtgattatttcgaattgcttgcacagtaaacatgctgtcagtctcaacctcaacatcttcccaagagttcctcttcacccaactgagtgcttctttcactcccatagcttcaattgtctcggctggataaataccaccatgatagacggatatagcttcaagtactttgcctgaagcatcccttgcaacaatgccaaaaccgtaactttgatcctcttggaataaggcagcatcaacgttaagcctaattatattaatagcatgtttaacccaaagctcagcaccatctccatttgtccctatagacaaagaagaaaggtatgttttatcttgagctttcttccattgatcaagcattgtaaaagcttatgcaacaacctcatttgtagtggaactttttttttttcaaaccgtgttattcctagctttccagatggcccaactgacggaagcaacacgacacacggtatcattgtccaattgcataaaaaccccctccaaccagccacctacaaacaagacagtagcattatgaatctgcaacccgaatttgcaccagcaagcttgagcaaaagggcatgaaaaaatttacctaattaatcttctttttatcaataaattttttatagtaatggtcggcgatggtaataaaagagcattgttattagttatcagtagtgctcaacatttttcataagtgtcatcttatgattgattaacgatattattgattaacgatattcactaaaaaaaaaattctaagttatatgaatccgctatttaattataccaataatagtatgacactaaaaaagatgctaagtactaatggtaccctttagcaattttcttaataaaaaaactcttttctctgttcttgatttgattctcctttaattttaatttcttggtgaatttattaggctcatctcgcgacacggcataattaaaggttgataatgattgtacttaagtgtttgccgtgacaatcgacattatatagtttaatttggttaagttacacaaacccagcaagaaaggaataaggaagccgagcatgaccaaaaacattaaatcttgggattagtgaaagactgatattttaccaaaaaaaaaaaaaacaaaaaagaaaagaaagaaaggttgatttagaacaagtaattattaatgcaaaaagaattttaaattaaaaaaattagaaaaatactaaaaggtgttaataatgtttaacatctttttcttttcttttttaacaagggaaagtatcttttttcaaaacaagcaaagacattacaaaataaacagcaagcaaaccagccgccccactctaccagttttcaattacattgagaatatagttgaaaagaggctcattcctcgtactgttacagcttagaaacctaagtttaacaattatcttgacttcattgcttacaatctcaacagtcttacaattctgttcaaaaatacagcagttgcggtttgttcaaactgcatacaatgtagctaatacaatcatttaatgttagggtttataaaacactcaagaaatatataaatcacagatccaaacatattcctaaaagtactttaatatagaaaaccctaaattataaatcttaaagcctttgctaaattaaagaaga

SEQ ID NO: 310612 - DNA, 777 bp, Cannabis indica
aagtgagagggagtcaaagcttaaagtgggcatttatgttgaagttgaatttatgtaagttggcacatgtatttttgaattacagtttagtgttaagactattttgaacaatatttttttatattcctacttttaagaggaatttagttttgctttcgcttttagttaaacaatgatattcttttcgttttgccaattatattattgatattatgttttaactctaaataattagaaactattttttattttgatggtcttgccgaattatcattgactcccttagcttcctcatttatactaagaaaacatttttattaatctgacacaaaatattgggtaacatttttcttaagcaagggttgatcgattaattagaactaaaattcttcctcctcttaatgcttctagttgggatacttgtattgattacacttgtgaaaaattaactaaaacaaggaagaagactgctaactgtagtcaatctttattagaaattatccacgctgacataagtgaaccttattcaattatgatgtgcagaattaagtattttataacttttatggaatatttttctcgatatggcttcacctacttgatcaaagaaaaatctgatgttcttgataaacctaaaatctttcaaaatgttatagagaaacaattagaaagagtcatcaaagttgttcatttggatcatagagaagaatattatggtcgttatacagaatttgaacaacacatggggtcttttgctgaatatttacaagaaaatgg

SEQ ID NO: 310613 - DNA, 485 bp, Cannabis indica
accaaacgccacctaaaagaattccttccaattctaatacctaggtatcaaacatgcgttcggaaagaaataccacttctgccaaggtgtacttctccaacaaaaactgattcgccatgactttatctatttttgactagattctatctgcttgcccctatatattattccaagtaaagaacgagccagagtacttaacaacctccatcttacaaatttccaaacaagattggaaagccaaagacacttcccctttcgttctcttccctactctctcttcaggactcaaaatatcattgaagtctcccaacataatccaggggcagaaatccctactgccaaaattaaactatcaatctctcccaaaagtttgatctaccttattcatcattaaaagcaaaaacaaaggtagtaaagaacttatcctttccgttgcaagaagacacctctaaatgcatgaattgactttgtaacgtccccgcttc

SEQ ID NO: 310614 - DNA, 546 bp, Cannabis indica
cttcttacttcttctttcttttattacaaccacgatcccactacaataattgtcacacctcaatcaccattatcaccatcactgtccaccattaccaccaccaccacattttcactaaacctaaaatattttcaacaaccattatcaccatcaaaagaattttctctaaatcagacaaaaacaaatatagatataaaaaaaatatagaggaagggtggggtcatcgcccaacaccttcaacgattgatgaccagagatggatcgtggcccactgcccttcttcatcaaagagagagatagatgagagaggagagtgagtgcaagagagaccgagataggagcacgcgatcgagagagaattggggtatgtgtttttgggtcttggagttttttgggtatggggtttgatcgtcgatctgggtattaggagttgggggttcgttaatggctaacagagaaggagagggagatctgggagatagagatagagagagattaaggtttgaagaagaagaagaaaaagaaaaaaaaagtaatgtaaaagta

SEQ ID NO: 310615 - DNA, 1327 bp, Cannabis indica
agaggttagatgtacaaggaatagaatgtctagttgtggaagacagtgtcattggcttacaggtagatcttatttctggagctattcacttcattatatgcgtaagatattcgcagattcgaaaatataaataaaaaaaattcaaatcagtggaagaaaactattcttatacagttttctcttttcaatacaagcaaaatacatccaacactgataaagaattccataggctttttaatatagccaaatcctaacaatttcaccctgcatttaagtgctgtaccaataatacataatttttcaatcaagttcaaatccattaatatgtttataccttaaataaagttaccctctttaggcagcaacaggtgctgggatgccatgtgtaattacctatacatcttcaacagctgaccaggtacggctctttcctctatagctattggtgacactaaagaaaataaaagatttagttgaatgtgatagaagtaactactatccacaccaacgcataacaagatagataagttctcttacttcgatttttacattgtgatcactttaggattttaatgatgcaatagcaaaatatcccgacttgagcaatgtgaggtatgaagtcacaaacttgactttaatggtaacacgttattttgttagaccaatcaattaatttcgttatacatttttttttttgtcatctgtgcagattaaaagacttggaacaattacatcaaaaagttgccactaccaaatagaaaatttgttatctttttatttatttttggaattgcatgattttcttatttggatttttcttggaaagtattgctatagagatgccttggcaatttcctttgattgattgactgaaatgattttgttgtaaatttggcaaaattaaattcaatacgaaagaaagcctgtgtaccaaatgagcaaaaggcaaatgtggaaccaatgcttgagggtgtatagggatcatcaagtataaatgagagtggttatgtaattgtatcatatttttacagtacaattaggaagatgagagaacatttggaagagtaatttgttgttggagttgggtctggagtttaatttaaattatttatttatttttatttatctatatttcttaagttacatttttttttttgagtaattattaattgtgagaaaaagaagttttggaatgtctacgtcccccaagttatcttgatggccaagttttgtaactttatacatatgtattttgtgtgtgcgagagaggtatgtgtgtggagaaaaaaagtgagttgtgaaacgagaaatgagtgtgagtttgttg

SEQ ID NO: 310616 - DNA, 1141 bp, Cannabis indica
aacccaatctctctctcttttctgcacctctctctacctcttaatcttttctctctaaaactctcagtctcatctctatttcgtgtcgcaatttcttcctccaaaatgataagtgaatgtcgtatttataggtttatgatcaagatcctaaagtctgtagctgcaagaaacgatgttgataagttagttaactaacttaaccaactcttctttgaacgaagtctccacgtcaacttaagtatcagggcctccggaaacatataagaacacccagactcgcggaccaaggatactcgctgatgatgcttccggataggaaatagcctactgcagtcgactatccgggtctaccatttcaggagagataactagctagctgaaactcctttccagggaagggctagttatcccgaagactgaacccagagtggaaatgatagtcatccaaaaactcccatatagactcgactatcaatccacaagactccttctgggatggacaagttagctgtttgtgaacaaggtccaggagacacctaactttctaacgacaacttttcaagaatgatattggagacctttttatttggaagaattataccacaaattatatgacacctgatacttaattgcatctatatgatacctagaagagtgttaggcaccaatagtatcttttaacatttgacagtacgttcttgcttaataataattttggacatgcttaagttcgttcgaagctacacgtactatgggctcatgcttaatggttgccttggtcatcgaaaggctaggtctacctcaagcccttcagtgaccaacgcaacttgcatggtttcgacacccctttacaaaggcattttaagaattcttttttgcctggtggtttttttgtacttggttccttgttttgaccactacgtctacgtacgtcagttggtgtctgagttcagaaaccttcttcataatacgtatcttggtcgtacttgttttcatcgtactccttgccctcgtaatactcttcttttataggagggttgtaatgaccgctctagtaatatgaattagaaaaggcaattagcactaatttttattattttattattatttgtgaattaaattttaatgtggaccccaatat

SEQ ID NO: 310617 - DNA, 789 bp, Cannabis indica
atttttcaaactcccacttctctctacacctctgttctctctctctcggtctcttcgttcaaactcctaacccacggcgcaccccatagacccacggcatacccatggcacacccccaccgacccacgacgtacccccaccgacccacggcgcactcccaccgaccctcgacgcacccccaaccaaagtgagacccaacccataaccgacggtgcacggaggttcgttgtgattttattgttaaagatagattttgttatatttaggaatatatttaggtttagaatgtcagatatgtgatttgggcaaggttcgatgcacattcaatgtaggtccgatggggtccgaggggttcaatgaatctgtaaggttgcaaggtaggagaagtaggtccgatggggtccgacgtgggattcgatgtggggtccgatgtggggtccgaagtggggtctaatgtgggggttcggtatgtggtccgattgtgttcgatatagagtcagacggggtccgatgtggggtccaaggaggaagaaggaatgggaagagaagagagagagggaggtgatgtaaatggggagggtaatttggggatgacattaaagttggcctagattacaaatattggtaattataagtttaggggaaatttttgaaggttatgtaagcatatttagtcaaatttccatttttcaaggggtaattccataaatatgggaaaaataaagctagtttagataaatatggtaatgaaacttaatagaaaaaaatatggtatttaaaataaaaatt

SEQ ID NO: 310618 - DNA, 966 bp, Cannabis indica
cccattataagaatagtctacctcaataatcatattaaaacttattaatttgtcttagtgtccttatgagcttagctactactcccttgtgaacttggttttcttatttcctagttctttgtttttgtttatgtaggtttggttttcatggcgacaaaacagtcgatgatttgatttctcaggcaagttaaactattagctgaaacatataaggaaagatttaaaaaggaagaggagatggaagactgagcagaggaagaagagtagcttctacaaaatgagagcccgtgaggttttatagactaatggttggcaaaatatttgccaaatgactgctgtataaaattcataaagacgtttttttggcaaaatgtgcaagtttgcaaaacagtgggaagtaaggattttgaagggagatgggacaagtacgtatgagatttacgttagcaaatagcatcgaagaaaaaaaaataaaaaattgttaagggtgtttattaaaaaagctggcttgatgatatggacactatttttgacacatgacacaaagaaaacaacaccgagggccccttatcctatgatagggtagtattacctcacattggggcacccaagtaagtaccatagtctagtgaaatcgtttttgagtgttatccccaaacaaacatgtcgccatgactctaaaagaatgaaccatatatgaagttgaggatgtcatgtggacatcccaaggctcaacttgggacctgcatcagtgttgggtgcccaggttgacatcatcttgcattagttttagttcccggcaactttttatgagaaaattgcttagccattatcttaggatacatgagtgacatgccacaattaagtttcatactttagagacaaatctacaagaaatagcaccttggcactatgaagcccttcttggtgattttttcggcgacaatgataattctgacgactttt

SEQ ID NO: 310619 - DNA, 1093 bp, Cannabis indica
aaattctctcttgagcttggctttaatacttttgatcacgaatttatccttgctcatgatgagcatatcatccatatagaacagaagagcatgggtggagattgctccagattcttgaaatataagcagtgatcgtatgcagattgttaaaatccaatttgatgcatgtacatgtcgaatcttttattccattgtcttggggactatttcaaacatacaaagatctgttgtgcttgcaaactgattcaactcctttcccttccacctgaaacccaaatggttgtctcatgtagatctcttcatccaagaattcattcagaaaagcagttttaacatcaagctgttcaacttcaaactccaaatgtgttgccaaggacaacatcaactttattgtcttgtattttaccacaagtgagaagatttcaatatagtctatgctttccacctaagtaaaaccctttgccactaacttggttttgaatctcacgggttcatccttattgattccctctttcaccttaagaatccatttgcactctacaatcttcttctccagtttcagcaaaactactcaagttttgttttttcgtagtgaatcgatctcctcatccatggcttgaagccatttagacttgtttccacctgaagttgcctcttcatagcttcggggctcttcaatttcagtctattgaaccaccgccagtgcaaatgctattatgtctgcttccgcgaaccttgccggaggttgaatctctctctgggttctatcacaagccaactgataaccttccagacctctctgtccgaacccttctggcttctttgtttggtctttgttatcttgttctttcgactccacaacagcttccgtttatgcattgttttctggttccacactacctttcgcatgtgaaccttcttctcggagcttcattccgtactccacttccacacttgaggtgtctttgtttcttgtttttcttgtaacacacactacccttaccgaaagtcaagtaagcatattctaactcataaaaataacatttctagcaatcacaacctttggtttacccttcctagaaatgtagattct

SEQ ID NO: 310620 - DNA, 554 bp, Cannabis indica
tggtaaaataatttctaacagctctcccaaccaatattaaatcatctgcaaagaaaatatgggacagagtaggaccaccccaggaaagacgaatgcctcggatactaccattacatttggcctcttgaaacagactggacaaaatctcagtcgcccaaataaaaaggtacagagagagtggattccgttggcatagaccacatgacagatgaattgtgccaacctgaccccatttaggcacacattaagagaagtaatggatatacattaagaaacccaatttctgaacatgacaagcaaaccaaagcaagtgagaacatgctcaatgaactgccatctaatcttatcataagcttttaccatatcaattttgatagcaaaaaaaccttttgaataaaagcagcctgggtggggcaaaaaaggcttaatcctattggcaatgattttcaatacagaaatttgattatatatgcatactaatgggggaaattatttccctaaacttatgcatttcaaaattaaaaaaatatgaccactttacattaaacccaaaa

SEQ ID NO: 310621 - DNA, 1638 bp, Cannabis indica
ttccccttccccccccccccccggacatatccatcagccggcctggccgaccatagaggtcttgtcagcctggccaatgaagagggctagccaaccaaggagtactgtctgaataggaagcatctagagtagacacatctatgcaagcacaattggattaactcaaagacatgatcaaaggcttgtcaggcccaaagttgtcaggcctcaaaaaggaccggtcaaggggatcacctatcttagcgtatatcaatgcgtttctgctaccaaaattaaaagttctaggttggaatatatacactgggaaagaagatcccctggcacacataaaatactttgagaactaaacagatctccaaaaagtaactggtgatgtgtgatgacagatctttttgtcaaccctatttgaaatagcacaacagttgtatttcaagctgaccccaggaaggttcaacttttgggaggaattatctcaagaattctatactcaattctgttcctcgagacaaataccttcacagttggaagaccttgttaaaaaaaagacaaggcaaacccttgaaagactacatgcaaaggttcatgaccaaaagactaatagaagaaggacattatatggaaatacttagaggtatcttaccattaagtgaattctggaaaaactttagaaggatcttaatgaacaacatgaaagagttccttgaacgagctgatggtttccttaagtttgaagaagttgtctgagaagcccagacaagaaggtagaatagtatttgacataatcaaagaggcgtacaaccctagttctacccaacatgccaaccaacacaggcaatatcgtccagccctccaacaacaagaataatggaagcaaacgcaaaagtaatggccttggccgaaataatggcaaaaagtggaaattcaatgattcccctacaccataagatcaaagggagaaggaggagaagtacactagctcaacatcctatcctattaaaatctctagacaatgaggaatttggtatatacttggctgttagagaatatgatgtaacagttggaaatattttaccaggatcttagatctactcacaagtatgttgattaacaccctaaatatgaacttctaaaacgattataagtaaacacatataaagtatcagaaaccttacattgggtgcagcggaagaatatgtctctttccactcagatctctaaccaatgtatcctttctgttatagagtattatcaagatctgagcccgaatgtccttctttgttgaatctggattctacacaatcttccacactatgattgaggtactacttgctgtgtgtgggcactactctatcacttagggatttcgaaacaaagaagaagaagaaagagagagagagaggtggtggctatggctcaggaatttccctgaaaggaatgagatgcaaattgtgattctttcctgaagccattactttctatttatagaataccacatagggttagggtttaattacttagcattaaaataatgaaaatattaaatgataaaacctatgcatgtggccggccatggcttgtggaaatgggcctcacttttgcaactttcttgttttatcatttttgtatcccattttctca

SEQ ID NO: 310622 - DNA, 744 bp, Cannabis indica
tttaataatacatagtgtcattcatgttttcggatgaaggacattccaagacagtttcaactcagatgctccaagcccaatcgtaggttcaaaccaaataatggactaaattcattagcgaagtcaagccgtccggatgttaaacagacgagtcatccagacaagatacacctctgacacatcatatctctgaatgacttcgagctgatctcttaaatgagtaattaatggacatccatatatctagctccatatcacaacaattcattacaaaattctacaatatcaaggctttatttccaaaattatgtttatgatttgtatcttctgaataaggaaataaagtaattgttaatcaaaaattaatgtatctttattatctacaaaagtaggaaacagttcgacaactatcaatatgatgtagcctccacgtcagcagaagatcaaagcctcacgagccgggccttatcaaatcgatacaaatatcattatattatttgtatttacctatcagtgggcaagaactcttgcaaaataaatataagaaacccattcatgcaaagtgttagaatttcattccttgagtgctcagacaaattctagggttcaaacacttgtataaatcataagatctttcgagtcttatcataatattattaaatcgtagactaagactcgttaacacccacaaccacgtaaaaactctaattttattctttgcctataatatatttctttaaactt

SEQ ID NO: 310623 - DNA, 3573 bp, Cannabis indica
acagatacagttaagaaaaaacacttaaaagaaacagtgttaactgaattaactaactgtatttacatcctccctcaaactaaatggtgtatttaccatttttagtttggattttaagtaaagaaatcgatcagtagatagtggttttgttaagacatctgcaacttgatctaatgaagggacataccgaacagagacttgcttatccaaaatctggtcccttacaaaatgaagatctatttcaatgtgcttggaccgggcatgaaatactggattcgcagcaagtgccgaggcactttgattgtcaacccagatgacagggatttgcacaatcaaaacttgaagttcctgcaacgatgaacgaacccacttgagttcagcaattgcattagcaagagttctgaactcgctttcagtgctggagcgagcaactacgtgttgtttcttggccgaccagctgattaagttgtcaccaaaaaaaccaaatatcctccagttaatctgcgatcgtttatgcagctggcccagtctgcatccgaatatgcatgaagtgtcataagatgcaggtcgcaaccataacccctcttttattatgccttttaaatacctcagtagcttcttgcaggcttcccagtggactgttgttggggcatgtagaaactggctcagtttatttactatatatgcgacatccagtcttgtaagtgataagtattgcagtgccccaagcgtactgcgatacaaagtaatgtcatgaaatggctccccttcggttagagataatttgacacttgaactagtaggattaggacaggcctttgcaccctccatgtgccatttgacaagtaaattagtgatgtattttgtttgagaaagatacatcccagtgctatctctgtatatttccactcctaggaagtaatggacatgaccaaggtccttcaatgagaaattgttgttgagatctgagattagtttcgagattaatgttgagtgtgggcctgttatcaatgtgttctccacatatacaagaaaaataacaagagtgttgcctttgccatatataaagagagaagaatcaactttagaactttgaaatccccaagaagtgagagtgtgcctcaacttatcattccaagcccatggggcttgtttcaagccgtattagccttctgtaacttacagacatgagttggatgagtaggatctgcaaacccaggaggttgagacatataaactgtttcatttagaggtccatttaggaatgcattgctcacatctaactgagatacatcccagttgttagaaacagccaaggacaacactatccttattgtagtgggtttcactacgggactgaaagtctcatcgaagtcaatacctgcttcttataaataccccttagctaccaaccttgacttgtacctatttagagacccatccttgttatgtttgagtgcaagatcagtgacagaactatggtgttcgaggcaattttcatgagcaaggagaagagcttgcacttcttcgaaatgtaagaacatcccttcttgcagtgatcccagacactacaggatcgtatttcggttcgaggtcatttagaagttgtaaaatgagatcttgatcaagaattggagacccaacaactgcaagagagtcagctatggcctgtatcttgtcaacataatcagaatttgattgtcctcccttgcgaattgtagagaactggttctttagttgaagcagtcatgctttagattggctcgagaacttctgttcaaggacgcgccaaacaacatgggagcaggaaaaactggcaacagaggcaagaaccccttctgtcatcgacgatcgaagccatgacagaagtagctggtcctttcgtttccactggtgatacttaggatttggttctccagagacaagtttttgcagaggagggatgccagccagtaagatctcatccaattcatggccgatcacagtggggatcacctgagatttccatgacagaaaattagtgcgatctagtttaacagtcaaaatagaggttagagagtgagagaagggattctagttggattgcaattggttctgcgcaactggagctggagttttggtgaccagagcaggatcggaggaagtagactccattgatgacgtttgtcgaaggcaactaataccatgtaagatctcagagtatgagatccaagaaaaacaacgcacgaaaaataaaagggagagaaacagagtaggagaatactttgaaaaccaaaattgtatttctttattgattaaaggcttatttatatacaagctgagagactcaagtttgttacaaaacaaaaccaatgtaacagatacagtcaagaagaaacagttaaaagaaacagtgttagctgaattaactaacagtatttacaagtagtgactatgattttgttcctatattatacatcttttttttagccatcgatttatatgacttttaaaagttaagattgtctaagatgtatttgtttttaggttatcaaaatttcatttttttaaaaaaatatgacacctaattaaaaaaaattaacacccaattaattttttaattgttatcatctcttttttcttgtttattcagcaaatatttttccatttcttcctctctaatttccatttctttgtactttctgaaagacaagatgagtcgagccaacgtcaaagtcatgttggtttgcgataaaagggaggttcggaagatctatcgcagctgggggagttgacgatcagagcgaagctcactgctaaccagagcttcagacctttttcaggtttcagacatggttaacaccatccaagaacgaagggtagaggcctatgagttttcagggacccttctttcctaatgacaaagttgatttggtggtaatgtcaaatcatactcttccaaactattatttaatattattataaaaataaaaaataatctagtacatcctaaatattaactattgctatgcacttattaatttatcaccattagattcattatctatggttgtaaaaatattcctaccatagaaacaaaatcaatgtaccctaccatagacatatccataataaacattataataaaatcaacaaaaatgacttgtctttatcgtttaattttttttttactattttgttagtaaataattttttgcacttgctattagcacctcaaggtatttaatgccataccgatgtgaaatttaataattggttagtaatttttttatgaatgatttttgtagtaattttttttaaatgatttttttttgtactattattattatgtggtaccttaaagtactcaataccatactgattcacatatacaataattagttagtaattttctaaatcatattaaattaaaatttgtgagaattgatattgagatgcactaataacgatacgttaccttttgtggtgtttgacaccttaatgtgttccttaatatttttgttattattatgtacatatctttattaacttctattagaattttatttttttgtttattattatatataagtt

SEQ ID NO: 310624 - DNA, 1112 bp, Cannabis indica
ctcttcaaaatataaaaatggtaaagagaaaatggtgaaggaaagaaatggtaaaaaggaataagtgtaaagttgaagagatgtaaatgaagtgaaaaatagtcttccaacactattttgtaggcaaaatgagatgattaaattaatgacaataaaataaataaattgattaatttaattagtgttcggaagtgataaaataattagaataaaattaagagtgttggaaaattaaaatattttgtaaggatagaagagatgtgacaaataatgtaaaaataaataaggaatatttatttaggtaagaaaattgggaatagtaaatatgtttttatgtgtaaaatatatatatatggaggaaaaatgtgaattttggcttttacggtgtgcaatttttgctaagtctaatattctatttgttcttttctttctcattgtagggaacatatagcgcattgctattggattaggttttgacataatcacacacggcatggcagttggggagtgttggacatctgatgctggaggcgtccaactggaatgcatggcaagctgggggcatacatagggttccacgcggtcaagatggcagcatgtggtggtaggtggtacaggatagggttgggcatccgatccaatctaatatttttctcctatccaatcaaattagtagttggatttagaaaatcatcatcccatccaatctagttagacctcaaaatctaatccactaattaatagttggactggatcatttttttttattggatatccaattatacacctaaattttaatattaacttaaaaataggaagaaaaatatgtaaactctaaatattacgatgtatttaagtttaatactccataaacatattatagatacaagtgtaatgcaactaaaagttttaaataactaaaacaacaatattgctaaaataaaacaaacattatgaaaataaatacacaaagcaatcaagtgtttcaaattcaacacaaaaaaatctactaaaactataattaatataataaatatgtaatattattttttaatactttttatattatatagataaatataaattattttttaatatatatacatataatt

SEQ ID NO: 310625 - DNA, 3210 bp, Cannabis indica
atatattttatgtttttttttttaaaaaaaatgagagtattaataataaataaaaaatatttattatgtattttcttacattctttttaatactttatatttttatttgtttttccaaaaatgctaaaatatatagaattttaaatgaaatactcttactaattaaatatttctttatcgagttagtttacatgataaaaaaatatttatatatatagaagagctaaaattgatagtgtccaaatttaattaatatttttttaagtttttgtaaaaggaaaaggcctcatttttagtttttccctaggcctccaacaccttaagatggccctgcttaccattaccctattggagttacatggtaaaaactgctgtatactttctcaactgaacacatatccttctacaagagaaaacctcctatgagttgatgcataattaagcacttgagtatgcacatctcttgaattttagatgcctagcctacgcatctcatgttcccctcgtgctagggccttcatattcaaaggctaccctgaaaacatgaaagcttacacactacttgacatcaaaactaaaaacatcttttctaatgaccacttaattttaatatgaaagttagcaaatggttaggatttaattcagaattagatttctaatttcgatttatgaatttatggagatatattcaaattctaggtgagttatttattttatatatgaaatttcagttttttttttatagtttagtattttgataatatggggcaatttagatagacatttagactgtcggggtttggcagggtttagatttcggaccattttacccctatgccatttagccatttaaaaccttagcgagggcattttggtctttttgacttttggttaggtggcttattctccttctggcagttggcccatttttcattagtggataagtttttggaaataattgaatttgaaggaaaaatgaattagaaaaaaattaagaaaaaaattcaatttcttttctctctcttggttggtcacaagtgaaccatagagacccagctgatttctcctctttgttgatcatttcctgaagatttcagctgtagtagctcaagttggtggtgaggtaaggctcttctctcttcttgtttgagcttatggtggaaaagtttagtcttgatgcatgattttaacggttaggattcagtaggtttaattttgtattgattatgtttgtagaggttgatttatagttggttaagttgatttaagtctagtttgttgctttttgttgtggttgaataaactttttgcttggattaggtttgttatggactttttaggtactctagaagttttggtttgatttggtttgttgctttatgaatttatggagatatatttaaattcaaggtgtgttatttatgttatatatgaaatttcatgtttttactatagtttagtattttgataataatggggcaatttcgatagacatttagactgtcggggtttggtggggttgagattttggaccattttacccctatgtcatttagccatttaaaacattagcgagggtatttttgtcttttcgattttttgttaggtggcttattctccttgtggcagctagcccatttttgattagtgtatatgtttttagaaataatcttactgttgattgaatttgaaggaaaaatgaattagaagaaaattaagaaaaaaatcaatttttttctctctctcttggtcggtcacaagtgaaccatagagacccagctgatttctccttttagttgatcatttcctgaagatttgagctgcagcagcttaagttagttgtgaggtaaggctcttctctcttcttctttgagcttttggtggaaaaatatagtcttgatgcattatttttacgacttgggttctgtaggtttaattttatgatgattatgtttgtagaggttgttttatagttgtttaagttgattctagtcgggtttgttgctttttttttgtggttgaacaaagtttgtgcttggattaggtttgttatggactgtttaggtactctggaagtttcggtttgatttgtggtcgaattgaggtgtttttgtagtttttggggattcctgtactgaatcggtcgaccaattcattatggacctgtaggaaccagaatttcgattaatccccagacaaaccccacagaactggtcttttggttgggaaccggtctaccagttgaagctttttagggcaccctagattttcctaattttatgatatttagggtatttccattttacgcatcgataatgaactttttattttttattttaagtccccaaaaagtaatttagcgtgtcaccctccagttttacgaatattatgacttaggggcctataaatcggcgagcagcagtttcacttaggttgaccgacacacttgaattctgaaacaaggtaagattagtataatgatatacatatgtgattacatgtttagcgtgcatatttataaagcctattagattacattcatagcggtataaatatacgtagagttgtagtggatacacataaatgtatgtttggctcaagtactgattggcactatcacatcagtacgactagagctccaagtatcagctgatattatgctcaatagtactgttgtacgaatgttctagactcagtaccacatttgacgcggggatagggttatagttggttgaatgggcgcctcattataattcgggttatatttatgattatgattatactttctttactgagtctgtcgactcgcaattattgtttgtatgtactggtaagggaaaagctaaggttgagcagctgtaagtgcgagcggatgaagattttacatgtcaggcgattagacctgaagcatacgatctttgggatagtaggctatatattgtatagtcactagacgaaaacttttgtatcaaatattttgtaacgcagttgtaaatattttaaatatgggatccccccaattatgtatatatatatatatgttatttactttgatatttaaaactattctagaaaacttttaataaaccatttgattagcaatgaattgcataattaatataaaattacgataacacgcctaacctagtcaggtgttacaattttgtattagagccaccaggttgtcttttgaagattgtcacgacatgt

SEQ ID NO: 310626 - DNA, 825 bp, Cannabis indica
gtattaattatttattaccctctctcatttcatttaattcacttttgtccacttttttcagttttatttttcaagtgttaatcaaagaaaagcaaagtgacatttttcccaaaacagtccacaaaattaaataaataaccaaataaaggtctactataaaaaaagtctataacaatgaaagattccactaggaaaaaattataacgagctttaaaaaagaaaaaggaaatgtttatttttctctaccataggattgaatcacttgtccaattgaatttaatatgatttcagtttatttaaataaaaattacaaaacttaactgacaaaaagaaatagcagttattaatcttaaataacaacccttgtcttgttaaagagtttgttaatttgttttgcttggaccagttcctggttacaactggcagatcattaaaaactaaaaatatacaaacaaataaaccaaagtgacattttggggaagaaacaaaacacattgtttaaaataattaaagaaaaataatcttatttatggatagtagttttccatcttgtaacaacaaatatattgggtttttttgtcctcatcttctttctttctttttcctttttgggtgttagcaagctaaataaatatataaatacaatagaaatcagaaataaaaattttgaatagtttttcatcatgttgtaattatttctatttctggtgaactcttacattttttgtattcagaatgctaattcattcaatgaagttgatatgtcattaaaaaaaaactgatgtctcactctacaacttaggatgactaacattgaatcatttt

SEQ ID NO: 310627 - DNA, 2726 bp, Cannabis indica
aagtgattagaatcactcatgaaaagaaaaattgtttgattcattgttgtcgtgaaaagaaaataaagtaaccaacatctcccaaaacaacctgatgataggttgtgccaactacactcaagtaccaactgatacactttgacagtgtatcttttttttttgacaagtgattagaatcactcatgaatttacaacgcagacgtccgccaccggcactgaaacctcctcgaactaggatagctcatcatctaaccgcaaagcatgctttgccaagccatgggccgttaaatttttaaagcgagccacatgggacaaaattgcccttggaaatttagacaataaagctataacatctccaaacaattttcctaactcgttgaattatatcttcccgttgttgatggccatcaccaaagctaacgaatctgaataaactgcatgaattggaagaccacacatataagctcaattaaaaccaaccaacagggctaaagtttcagcttgtaatactgaaattccacctgaaaaaatataaaaaaaccagaaaaattttaattagaaaatcatcaagctgatcaaaatcaatcaaacaccaaaaactaaacaactagatccccatataaaaatactagaactagccaaaggaattaccctttggctagtagcaacttaacccttgtattttacttcataatcatattaggattactatcccttactaagaccctaagacctaaaaaaaaatttgatatgtaatctagtaacaacaaataaaccctgcaacactcccatacctaggatatcaaaagtttcttttggaaattatcacaataatgaaataagcaacgaataatctttttaatgtacccactatgactaaccttttaggggtttgctcaatgcagcgtggactatattatcttctgactatataacaacacctaatccaactaagctcgtggtgctcaatactgttgcatccaccataagtttagagtgtaaactctcttcttgtgcacctctaaaatttctagccaaagctcctctattccttccattagtttggagactttttttggggcgatccttcattgaaatgatcgaatcataataattaattatccactcaagcacattttgtggttgtcttatctgttggcaatgagtaatcttattcatttctattcatattgcccaggaacacataattaattttgcaaaggcatctctttccaccatttcaaaagcataaagtaaaatattcttgaaattaatctcttcttttacttcatgtagaaaagagaattccagaagattccaaatgccttgtgaaacgagacaccagtaaattgcatgagtattcgactctcctccaaaaccacatagctgacaagaagagaggcgatattccgtctaaacaaaccattacacgtacgtagaatttcatgataacccctccatgcaaaatgtaagatttttcttggaattttcatcccccaaaattgtttccaccataatgaaaacaaatcactagcagatgaaggtcgaaaattatctatagtcattgctaggttatacccactcccaatagaataacatagaataactaccatgattcgtatagtgccagaaccacgaatcctcgtgattaaaccaacttaatggtatagaaaaaatacattctacatcagatacattaaaatattgatttactactatagtattctgtttccctggtgactcaataaaatctgacactcttgccacctcatacgcaggacgtgaacttggaagaaacgaaggaggggaaactaagggtctctaaaagtcctagtattcgtaccattgtcgatactccgtcgtagcccttataataataaatctcttccccataagattccttgccatgttgatgatggatatgaacccttgtcttcctctaagatgttagatactctaaaatatctttctttcattacttgtgccaatattaatgatgggtttattaagatgcgccatgcttgcttggccaaaagagattgattatactggctaaatcgtctaaagcctaaccctccacactctttggtttacaaatcttatgccaagtcctccaataaactttttgtttattgtcaactgagccccaccaatatcttgttattaatctttctatctcttccccgatgccttctggaatttaaaacatgccatttgataagtaggcattgcttggattacagctttcactagaatctccttacccccttgcgagaaaattttggcctgatattcatttagctttttccatattttatccttgattggtctgaatattgcacttttattttttcctcctatcatgggaaggcccaaatacttttctatagcctgtgttattctcatattcaatgcttttgcagaaagttttcgcgttttctcaggagtattagacgaaaaaatacaaaatagatctgtgaaaatttataacctgaatcaaaataaagaacacataagttaaggcaatacaataagattaaacatcccaaaagggctaggttatttactaaataaatatatcaactaatttggtataaagaacttataaattactaaatcgaacattacctgtcctgagcatcgcaaatataatgcaaaaatttgttgaattgtgtgcaacgaaccctcgtttgcgtctaagaaaagtagactatcatcagcaaaaa

SEQ ID NO: 310628 - DNA, 530 bp, Cannabis indica
tggtttataaacaatcactgaaacagtaaaattgaatgaaattagacgaaagtccttaaatttaataatctcaatagttcgggggggaatttctaacggccaaaaagtttagggggcacgatttaatacatgttaaaattcgagagaaaaaaattactaattagcctataatttatagaatatttatccaagaaataaaagaattattggtggacctagcctttatgcttttgatgtacactttataaaggaaaaacaagtacaataattctgaaaaagtgtgatggaatgaatgaagtttataacattataataagtgctattatacatttcaaaaaaaaaaaaaactgttatatctgttcatgttactaaaagtctcaatataatttgttttacatgttattgaatagattattataatcctttgtgatgatgtacgttatatatatttatatatatatcaacggtgataacggctccctcacaattttttttagaccggtcactcacttaatataactcacttattt

SEQ ID NO: 310629 - DNA, 730 bp, Cannabis indica
tgtataataaaatgtagtgttgctctcatcaaaattaaagtgtgtcttgtttttttatgctttatttctatttttagttttgtttaataatatctcttgtgagtgggggacatgaaggctgctatatgtgtatgtgtggtgttgtgcacatatatttgataaatgtttggttttaagataccttatatttgttagatagtttcacattcatataaacttaacattaataataccatggattacttactcactaccaatttattttgaaataaaatctcatattttttactgtatactttatttcatcttactttttaaaccacacttccactctcagtgttacgtgcggtccaatatagcacgttacaagctaagtgatgcccacaagttggccaagtagtggtcaagtggtggcgcatgttgtggtgcatgctggtggcatgctgatacttactttgtatgcagtggtattttcgtaaatatcttcaatattatccggatcgggatgggaattggtattcgccatttatttgggtctacaaatagaatggtgcaatcggtttggcgaaactaggtgatttggtatatggttcttcccatatgtctacagagcaaaaatcatctatgttcctggtagaaggctaaaagctcagaatgctctttaagggggtaccctggtgtcagctctccaccaccccttgcaccttggtgctaagtgagctactactag

SEQ ID NO: 310630 - DNA, 856 bp, Cannabis indica
ttaaggagtatcgttaatcaatcacaaacgacatgttcaaaagtactaagtactattggtactcaataacaatgctcataactattgcccgtgtacccatctaaatccatattatctatttctgtctctttagtctagttcgaacgaaaaaagaaaaaattgcatgtaatcattctccatggtttgttataattaacacatctcatcacaattattttattttacatttttttaatcacaactcactagctagtcaccaaaaattagttaaacaataaattgaattgaatattaattacttcaattattttcaactttttccatatgtatatatgcacttttagagctcaataataaaggtgctttgctcatgagtctgcaatgaaaaacataaagattggccaaaaataatgccggtcatattcaataattgtatatgtgtataaattatagaaaaaataatttataccttgctaacttttttctcattatttcaattaaaatgcattgattaaaaagttgtctataaaagttccaagtatataatatataaatatttatacaccatatcagtatccacttattatagtcatcatatatgtagatcgatcatagaccatttagggcaccaaatgcgttggctaattggaaagacaaagagataaataattattggaaccatccaatcaaatttatcaacttatttttctttttagtactaaaatactatcataatagtatgcatacatataagaactttgaatctttgaggcaaagtgttgaataattaaggcaatatacatgtataccaccttaaaaaattatttaataactatatttaagggattatttcaca

SEQ ID NO: 310631 - DNA, 2247 bp, Cannabis indica
atatatttttacgtaattttgtagttaaatctacatactctacaattattatttttgagttttgtttgtgtttacaattttgcaaagtttttgtaatcatagttgcctctccgttttctctttgagtgaatccttatttataggaatatgatggtgattactcaatcttatcttagtgaaaaattacaattgatgggtagttaatgtccatgtttcacatataactaaatatttagataagtataaataactcttttatatttaaaatacaatgaagtggtttttaaagtgctatttgacttggtcagactatgttatttgtgagtagatgcattgctgctgtgtaatacgagacaatgcattgctgcctgtgtattatgaggaggttcatcaatggttgtgtattaataggtgattcatcactgttgtgtattatgagatgatttatcattggctgagtattacgaggtcactgactgtgtattacgaggtggttcatcactgattgtatattaggaggtgattcatcactgctatgtattatgaggtgattcatcacagactgtgtattacgaggtgatttataactaactgtgtattacaaggtgattcatcattggttgtgtattacgaggtaattcatcactggctgtgtattacgaggtgcttcatcactgttttgtattacgaagtaattcatcactgattgtgtattacgaggtgattcatcattgttttgtattatgaggtgatgcatcactgactgtgtattacgaggtgatgcatcactgactgcgtaataagaggagatgttagatctttgtattacgagattgaatgttttactaaaataacattccaacaacactgaaatacctaatttcacaaaccttgtgatctttatttagatgaggtcacctctcaagttgaaactcgagttttttttgacttgtcccacaatgtatttgttgtgggaatttattatctatgccatgtggcattcaattcagccttttcattaactagtctaaaaaaagggtataacaattgctccctaagttaattttttgtggtttgcacaaatctgacttattatacgttgcattcccattctttttggtactactccaagcaactcgttttgtaacatacgagtttacaaaacgagttgggtgttacttattcaaagtcatgtgtattacgagcatctctgttgtgtttctcatgattgatgcatggtagagtaggtactacgacataaaatatgggagtatgtactacgaccaaaagcatgagagtacgtattatgactagatgcattaggagtatgtactatgactaaaagtagggagtatgtactatgactagaagtagggagtatgtactacagcccgaagcattgggagtatgtactacgaccagatgcatgggagcatgtattacgaccaaatacatgtgagtgtgtattttgattagatgtattgggagtatgtactacgaccagaaacatgggagtatgtactacgactagaagcatgagagtatgtactacgaccagaagcatgggagtatgtactacgaccagaagcatgtgagtatgtactatgactggatgcatgagagtgttactatgaccagatgcatgggagcatgtactacgaccaaatgcatgagagtatgtactacgactagatgcataggagtgtgtactacgactagatgcatgagagtatgtactacgatcaaaagcagggagtatgtactacgactaaaagcattgagagtatgtactacaactaaatggatgggagtgtgtactacgactatggatgggagtttgtactatgatcagatacatgggagcatatcctacgaccagatgcatgaaagtttgcactacgaccaaaagcatgagcatatgtactacaactaaagacattaggagtatttattatgaccaggtatgtttattaaaacttataagcgttatgagctcaaattattacttaaaatttaattaataagtaatttgtaatacaaatactctaaatgacatatttatttatacgtataaacatgatgggctctgagtattacttaatacttaattcaaaaaataatttgtaatatatatgccctgacatgtttatttatacgtacaaacatgatggactcgtaggggtgggcgatccgatccaatccaacctttttttcctcatccgatccaatccaattagtaattgaatt

SEQ ID NO: 310632 - DNA, 1521 bp, Cannabis indica
ctcacttttaaaaacataattttttaagaaattctacataatttttttgttacgtattagttaactcaaaaaagaattattcaacttatatttaataaaataatttaaaacattaataatataagcccacaaatattataaagtagttagttggtatatttgataaatactacaagagtattatatattagtgacggcaatattagtgacaaaaaagtgtattgtaacactctactaatttaagcgtgctctggtgcttttctaattactcttttttgataattagattgtttgttgaaaaagtgaataattaaactttttaaataaactcaaactttaaataaataattactgaatgctttacataattttaggatctcaattttattttacaaacatagccaaaatatttcatatataaaggtgtcgtttgacgactaaccaaatatgagcctaactgtcctaaagaccgaaatactccaggtttaaccgtctcaatatgtacaatcttcatctagctccagatgtactgttgctcaacctttgttttgcccttacctacacatttatttaaatgtatctttgagtcatcagactcagtaagaaagcataaacatagatatataaccgaaccataaccaggcgcccgtacacctaatcatgattctatatcttgagttcagtgcgtatagtctcgaacattcttaacaacagtataattgaccataatatcagtctatactcaatactctagtcgtactgatgtgataacttcaattcatactatattgtcaaacatatatccgccgatattcaataactctcatgtacactaatgtcgctcttactgatatgttatatcgtaggcaaccataaaacatgtacgctaaacatgtaacctgtattttagtagtttcctatttgtatatagtagtttcccatttagtctcctagctttgtatataaatatatactattctatgaaatacatacacaattcgattcattatcctttacatggtatcagagccatacttagaattgtgatttgaaattcgaaactccaaattagggttcataaaaaaaagattagggtttgagtttagggtttcattttttttcaaaaaccctagttagagtgtgagttctttctcaccgcccacatagacggattacccactcgtcgatctgcaaaaccccaaagttcggcagtcagaatcaccgcgcgtgggccccacgcgccgaccatctccaccgcctcgactcccatgcgccggcgcgtggcaatgttccaggccaccaatttataggctcattgttctcctcgacctcccctgtggtttcgttgtccatttcaattaaatatgtgttatacgcttcactgatttgtgcatgagaagtttggtggaacgaacatatttgtaatggcttttggtagaccaattcttggttctacagatgaatatgccaaattcttacagtttcaagagtctcttaagtattcatcttcttctatcacta

SEQ ID NO: 310633 - DNA, 1121 bp, Cannabis indica
aacactaaaatagaaagttagttaagaaactaactgatatgcccgaaacagaacaagaaagaaagaatagatatctatagtattaatagaataaactgtagtaactaactaactacgaaagactaataaacaaatcctaataggggtcgacacccaaacttgtgcttttaagcaccatagccttcttatggcttactcaacctattcctcatgaataaggtctttaaaggtcaataccaacatatcacaatttagaaaacaaagttaaactttacattttatttacatcatattaaacagcttaagaagggtctaaaacgctagttttataatctgattgtcaataccatttattgatgcaacaaaagctattacactattagtatacaaatatcacttttcttacctgtggtacagcaatgagataaagtgactcactgcaaccccattcaagtgtttttatgagaccctaagcatattcaatcaaaagtcaattaacatctcaatactataattttgatctaccaattaagtaaaatttgattcacgttatactagatctcgttgcaagctttctaataatataaaaaagatttaattttgacatcagaattaaaagttatgccccttttacaaaattgaaaagctacatccgaaacaagggttagaatagttgtgccctaaagttgcaggtagtgccaagattaacaaaaaaaaaatatatagtgttttctattgcaaattgtctccctaattaaaccatattcgaattctgctcaaaaaaagtaccagagcagtatattaacataatagttcatcattaatttgacaacttagaactcatttcttacatccaaatcctacttagaacaagaaatccaaagatcaaaacatgaaaatttcaatttctatattttcctcaaaacatcaaaatcaatctaataacattcagaagggctataacttagtttcatacttgaaaatgtgtaaaataggtatatttcatcaataaaaacatacttaaccaatctcttttactttagaaagtttcaagctcaacaacatatgaaaattgttggaatttattttaccaggatcttagatctactcacaagtatgtt

SEQ ID NO: 310634 - DNA, 4481 bp, Cannabis indica
tgcggtgtggtgcgggcgatttaaggtttgaacggtttaatgaacacccctaatttttattgtttgttattttaatgctagatgttgagacttggttattgatgttataattatattactttttttttgctttttgtttaagaactaaatatgagattgttatctttagtgcatatgtttttgggtttcaatgcatatatttttgtgtaaatttttcgtttatgtcgatatataaaatgtttgattcaactgtgggataatttttattcaagatgtctaataattatagctaggaaagtagttagaaaaatcacttgaatcttttgaatttatgtgttatctgtaacaccttctatacaactatcattcaacggttggacaactattgaatgatcaacatgctagtcaatgtaataagaatttttttttgaacttctaattaatgtttcaaatatagtgttgctaatgctttacgtgtttttttataatagtttggatttggcattcaattataaaacaactattatgtaactttttaaaaccaataatgtatgaaatgtaatagcaatatattaaaataacaattctgtcagtaaacgttcacagaaaaaattaaagaattcaaactaatattctctcaatatttagtcgcttggttatgacatgtcttccggttgtgacttttttggccatatttgttgctcctattctttttttttttgtttcacatgtacctataaattttcttttccttgatcttctggatcacacacaataaataccttgtgaagttaggttctttcaatttcagttatatgtagaaaaataggcttggattgtcctttatcttcaacggttggtaaccttgtttcacttggtgtttcagttgcaattgaatattttcttagttgtattttagcacttgtttcaacttctatactagttattcatacttgcaatcccttgagataaattcgccactagcttcgtaatttacatagttcattcttggatctcaaatttacatcctttcattctcagaaggatggtcaatttgagagaactatttagatactggaagacatgctacgagcatgtgtgatagattttgaaagttcttggaacaagtttctaccgttgattgagttctcgtacaataacagttataagagtaccattagcatggcaccttaggagatgttgtatggaagaaaatttcgatcacctatttattgagatgaagccggtgggagaagatatcttgggcttgaagcagttcaaaggactagtgaagtcataaaaaaaatcgatctcatatgcttgcttcacaaagaagacaataaagctacactgattcaaagcgtagagatattgagttctaggttggagattctgtaattctctgagtaccgcctatgaaagggatatgtagatttggagagaaaaggaagctaagccctagatttattggtccttttgagatactggagcgggtaggccaggtatcctaatggctagctttacctcctgggttgtccaaagtgcataatgtatttcttatctctatgttgaaaaagtatgcatcagattcgacacatattttgggctatgatgatattgagctttagacagacttatcatatgaggaacaacctgttcaggttttggaccgaaaaaaagtacttcagaacaagacaatcctactagttaaagtactatggagaaatagcaaggtcaaggaagtgacttaggagttagagtcacaaatgcaggagcagtatctcgagttgttcaggtaaattttgaggacgaaatttctataaagagaggatagttgtaatattctcgaacctaattatgaataattagaaattattatataaatatgaagtaattagggtacagtgagtaggattatgattctaataatctaattaagtgtgaattaggaatttttaccataagtggataaatagtcgtaatttattaattagaaacattttattggaatatgtgggtatgatgtatgttattcgttgaataaaaatatttttaagttcaacgaccttggggactcgatcagaggctaaaagtatcacaacaattttagaatatgatttcaatggaattattatgataatttgattttagaatatcaagatttagcggggtaacgatattggactattttatccctaggattacgagattacttagtgggaaagtaagggaatattagtctttttgtcctttgtttaatcaccttattttgagtgaatagtggttgtggctcaccaaatttgtggtgaccaacaacttggaaagatttaagatagaaatcaaaacaaaagaaattcaaagtgaaaagtaaagtcaaaactcacatttcttcttcatcctttctctccatttttgaaccctccaaaaccagaacaaaccagcaagctttattccattttcaagcttatttcagccaaggatagcaagaagaaacaacacctccatcctcccaagcaatctaaggtaaaccctaacccgaattcattagttttgtaaggttttagttggctttaagtggctgttttggataggacttgttgagggaatctggggaggttaggaagggcttcccatggttgtttaggattgattagaattggtttgaagtcttttggatggttgtagcaacagttatgcaagtttgagtttaaagaactcaaacttggctcatgcttgataacatgatttttgttgggaattttgctgaggtttattcatgaaaaatatttcttataatgtgtataggtgttctaaaaattttggtaaggttcgactcaagaatgagtgagatatggactttttaagattggacaagggaatttcagactgtcctatttctaaaataggtcgaccatttttagaacgaatcgtccattttgagactagtcccgggaccctaattttgtattttttttttcaatatttaaggtattctcatgctatctatcaatagggaaacctccatttatgaatttaagacctattatgggttaggttaagttgattaatcgattcttttttgttgttgtgacatagggtctgggatcgttgatctttctctattttgggtcgaccgacatacctaaattagaactagaggtaagaaagtacatccatactacataacatgacaagatacgattattatcgtttatgattcgattatgatcgaggtaaaaatacagtaattatcgttaagcaagagaaagtcacgatgtcaatcaaaaccattgttagtcttcatacttgtcaattgttttattagacaatgacaaaggtatgttgatgccaagatatgacatcagggttgttttattagataacaagagatgtgtggatgctgggttagggcatcagggttgtcttattagacaataatggaaatggttactttctgaagtaacgattatgacttatcttattagacaagtacttgtgttataatgtttaattatattattctgaattggttttctgattgatatgtgtttatgtttatttttcttgctgagtctttgtgactcatggatactttgcggtgcaggtaaatgcaaaagaaaactagggtagtcatgagatgacaatcttctctgacaaatatacatattgacttatccggcttgtatggtcgagttgtcaaaagatgttttgtgcggcacttgatgtgtattttgacttacttttgtatatagtcttattgtaaaaattttgtaacaggtgatcccaaaaataaatttttatcgatgtaatcctgttcattgctatagttttattttagtaaaacttttactattaccactgattttattaaattattaatctactattacaaaactatgttgtaaaggtacacacatggcgtccttaggagttaggttgttacacaaacgaagccttccaaacaatcgctgagacaatctggagaggaagtctaagaggtgcctctaaaagcctcttgcaggatgacgtgactgccctctgatacttggtccaccaaattagatcttgtcccttatgttagaacatgatagtgcacgagccaccaaagggagtatgtcctctttgtccaactttgcctatctgacattcttgtctactgtagcagcacccgcacgtgaggcctttccagatcgcgtggccccatccgtatggacaccttcggcagacgagccaaaatcttgtagtgggcctcaatttcatgtactctatgtatttaccccaatagtgggtctattttgtagatgaactctaaatgggtctcgggtatgcccgaatccgactctaagcctataaaaacccctttaacccttcatgcaaaggggatggaaaaaactcctaagttctctctaagttttcttcttcatccaagaaaaacatagagggaaaaacactatagcaagaatttgttgggttttgtgccc

SEQ ID NO: 310635 - DNA, 790 bp, Cannabis indica
cagatccatgacgtcaccaccatgacctgggaaaggttccaggaactcttcttagtcccaggatttcgagcgttagggcaatgaaccttcaacaagttgaagtcatccatagactgctctcaagaatcaacctggccctcctacagttggtcgtcgtgactaggtcccccacgttcaactcttcctttttataaccagcaaacacttgtgcgtggtttagaaagagttgagtggggggagtgcggtgcataggaggaaccctgacccagtctgtcagcaggtttgggagctcaaaggctttgaagttggaggaaaagaaaaaccgatggtggtactctttcacgttcttccgaaagtggaaaggtacttgaccctcattggctggtgatgtcgcccacttagttacactgcggtcgcggtagtaaacgggctatatgtcgtatccacagggaggtaaattaccactaaagattagtataaatagaaaatgatagaaatgtgaatgaagtaaaaataataaaatgatgagatgagaaagttgatcagataaagagtttggtaaggtagaaatgtagttatgcaaatcttattctaataccgatattaattcaaaacacagttacaattctacaccattaattacaactggaagatgtatataataaaagtgcaaattaattaatcttgcataaattgaatctcacctctaacttaacaacatatcatattatatatcataaatcgacaaaataccactgttggcagaatgcagtaaatgacatacaatata

SEQ ID NO: 310636 - DNA, 990 bp, Cannabis indica
gatttggtaaatatcaaagttcgagaaataaaaatattagttagtctatgaaataaataggatttgacctgaactaaaactatagtagacttttactttcttaactttttcagttacaaaatttttcttgaattataaaaatattgcaaatatcatattttagttacattttacttattttttttaaaaaaaaaaatagtactaacgtgacattttttttaaaaggctactaacgtgacattaatatagtacactttaagagttcaaataaaaaaaatacataaattactatataatgataaattataataaaatctatttgtattcttagaatccaagcttctagaacctacaatgttcctacttccttggttgtcccttctgcagctccctcattggtgttgactcctcattttcttagtgagggaagcaaagtttctttgttacgtgaggcttcaaggggttagaacttgggtttagttcgaggcctctttctccctaatgaagcatatgttatcttatctattcattcaccctttttagatgtggatgataaacttatgtggaattttgaaaagctaggctagtactctgtcaagagtggttactagttgggtcgtacttctctttctggtgggtactctagttgacagaaaaattagtagaccttaaatatttctccaaatatgagattgtttgcttggcaaatgtcttctaattagattcctacaaaaatcaatttgactactcatgatctcttatctgatgatctttttcttccttgcgaacttcatgaagagactactcatcatgcttatgggggtgccctttattggcttgtaagaaactttacaattttgctatgggtaacccattgtccactcataatgattttcttagttttattcacaatgttatttaccatttgcctaagaataaaattaaattagttatggtcattttgtggcgtatctggttcaagagaaataa

SEQ ID NO: 310637 - DNA, 2346 bp, Cannabis indica
atataaatagtctatcatttaattttataattaaatatgctaattgttcaccaagagttgagagactaaataaattaatagagagtagagatggaaatttttacgtggttcgggtattaatgaatcctagtccatgagtcaatcgtatttgattgaatagtaattaatgtattacaatggagttattataagctcaagaaccctaacttcttgctatagtgtttatcaaaggcactaaaattgaagaggtcatctatctacttctgtatgtagataacatgctcattgtgagcaaagaatggtccaaaattgaccttatgaagggctggttaagagaacaatttgaaatgaaggacttaaggaaggcagctaaaattctaggcataaatatcataagggatagagaaaatggaaccttgaggctacattagaagaactacataaagaaagtcataaaaaattttctatgacaggtgccaaacaaactaagcaacctatgaccaatcagtactatctaagcaaagatcagtgccctaaaacttcaatagaaagggaagttatgagtgaagtgccttattctagtgcactatgatcaataatgtacttaatggttagcactagactagatctagcctctgcgtcattagtgttctcagtaaatatatggcaaatctaggcaagcaacactggaaagcaatgaaatggttgtttagatatatttggtaggatctactgaggtaggtttaaacttcaaaagaaggaacaactacagaatgatcactggatatagtgttactgactatgcaggtgacagagacaataaaaaatctacatcagcctatatgaggaaattgtatcaattagaaagtttaattgcaacctgtggtagcattgtctaccacagaatctgagtatatagttgtgacagaagctattaaagaggctatatggttaaaaagattgctagaagaacttaagctacttaatgaaaaacctacagtctactctgatagtcaaagctgcattgacttatgtaaaaaccagtctttcataacagaacaaaacaaaattaagtatcactttatacgagataaagtgagacaaggaattgtacaaatagagaaggtcccaacaaaagagaacccatttgatattagtactaaggtactaccccatacaaagttcaagcattgtataaacttgttaggagttggtgatgatggatgaccatcaccagaatgagttaagacccttgaagaatgatgcactatgaaacaagtgacatatataggaggaatctaaggtggaaattgttaaaattagatccctatctcacttgtttcttacaacaacataacagaaaagaaaatataaataaaaggctcatgattcttactcaccagaaataacaaacatcaactacatcctaacagaatttctgttatgcaacagaaattccccatactctaattacaacagtagtaacaactataaaaggatgagtcctcaccaaatgaccaatagagcagaaaaccagaagtatgagacccaaatttagagagtggagagaggagctcctgtgttgagctcggtgagttcatgcaaagaaaaataaaagaaaattagtgagagagattatcagaaaaagaagaagaaagaaacttgaaataccagtcaagtttgtggcttggatttcttacctgattgtaacattcttgaaagtatagttcagatctgagattgtttttcaaggcgagctcaaagaggacgtacccctggatttagggcgaacctctataatccatgtgtattttctctgtatttttttttctcttttgatgcatgttcttgtgtttgtatagctttgatctaattttttggggttgcgttctggtaagattgatatgatttgatcgagaaaggggtttggttcctagggttgtttcgagagaaagaaagagagaaagagatttgtttattaatcttgaaggtttgatgttgaatctgagctagggttagctcaattgaaaccatttgtttgtcctggtaaatgacaaattgttttgatctaaataatttgttgtaggggctaaacgacttcaattttatcaattttttacttaatcatatttgattgtttttagtcatttgtcaccctatcatgttgaacataatattgagttgggtgtagggcatgcttggaatttaagaattcctacatgttgtttgcctatagctagcgtgttgatcatgaaagtttttcgttcaacatttacttgtctagtgcaaatacttgaatggatatttgttaattccatttttggcatatttaattgataaaaatat

SEQ ID NO: 310638 - DNA, 1736 bp, Cannabis indica
ctctctctctctctctgtgtgtgtgtgtgtctgtcatgcgagagtcacaccagtgtcttctctcgaccatcgttgtgcgagaaccaccattgtcgccactccaccaccgagccaccactactgctgccctcgaatttttggtttctaaatttccttttttcttcgacccatggaaagagaaaagtgatccaagttattgtgttgaaaaagagtagttgttttatttaagaggaaaatattaattttgagtaaatgttagtttaaaacttgtgttttgtaaaagttatcgacttggttcgctgttttattaaatgaaaaattaggtcttgtaatttttaaaggaaaatttgattttttataattacatatacttaatattttttccctaaacacataacatttaatatttgtgggatatgacattcctaaaaaagatgatgtctgggtccaccgtcaatagtgtcaagagcagggggcgccgtcactgtgggtttaagattggatgggtttgggataaattcaccgtgggtttgggcgagaggagggagaggaggcagtttgggtttgggatttcaaatgtgaggggtatcatgggaaatatggtaatgtgatcatctatagacaattttaatacatatggatttaagggaaaaaaaaaaaaattaaagtattttatgcatatttattaaaatttcattttttaaaatagtacccaaagttcacttttaattaaaataatacataataataatatgataattgtattacgactagactagttatatatatatttcatatattaaatatagtaggtaattttttttttttaacaaaaaaatttaaaatattatttacccaataattaatagtacatgaaaattgatgaaaacttttattttttacaaggaaggagggaaataaaacaagtacacttattttttggggtcttaattagtactaattaaattatctttattttttttatttttggtggatatagaggacgacagtctatcatgaaatgagtggaattagtaatttagtattaccaaaaggagtgataaaaataaaaataaaaataaaaataaaaaagcaaaggcagaattacaataagacaaagaagaaaccgacaagaaaggacaatcactccaaaccaaaatactaattgtactacacacgcccgcacgtgcggcacgtgggctgctgacccacccactacgaacaacagttgattgatttcacttccacattcgcataacaaacaactcttaatcatttattaaaataaataaataatactcttaatcaccttttaattatttttatgattattattattattttgaaattgaatgaacataactgctttcttctccttctgcgagtactactgcatttctgatttaaaaaggcctcatgtacggtaatgaaaattaataattatgcatttagaaatagttctaactctaaacattattattattattattattattattattattttcaatgaattattattatttgttcggtagttatctaagaacattattattatatgtatataatttaaattttataattattagttagccatttattaatatattaaagggattttttattttacattttaaatagtttttttttttgtttttttttttttttttttactatttttacagaattctacatagaaactcatattgcaactagtgctgcaacctaaattgcaa

SEQ ID NO: 310639 - DNA, 1226 bp, Cannabis indica
atattttaatagttgccgaaaacctcggtcaacacaactatacaacacaaacaagaaaaaacacacacacacacacaaaaaccctcaataccaacctcttaaacacattaaaacaactgtacaacaccaacgtataaaaaatcataaaatagttctacaacactaataaatatagttgctgcagaaaataaaaagaacgacttcatcgaattaaattctaggttgagtctcggtctaagttgctctctttaagacgttcacgacactgtttagaactgtgcaaacagactaccagtctcgtcatcctcaggttaaaacaacctagtcgaaacactatatcaaagctctattgcatgatagagaaccatcgaaataccacacccaatataatcgtactactgctcaaaatacatttgtaatataatcgtatataatttttttttgtgagaacaaaatgtatttctcccgttgattctaattatatagggaacacaccaaaagtagtaacgagaagaaatacatttctgattaggagaacataagaaagtgagatagtgagaacgatgctaaaaatcaagacgagacaacgtctttatttactaattaagtaaacacttttaaaaactattttaattaaataaaaaaatgaataataataaaagaaataaattttctctaaaaaataaagtgacaccacacccacgcgcgcatgtggtggtctggtgtgtgagttctcacccatctgcacaaaatggcactactacaaatatcagaattcgcgacggtcgtaaaaatgatttttttcagagaccgtcgctagaaaaattaagtaactatttaaaaccgtcgggaaaaatttagtatttccgacggtttaaagttgtagtaaacaaaaattgcgacattttttaataaaatacaattttttaatggacctttataggcgactgtttaaaaccgtcgcctataagggtccatcgaaaaatcatcacctacttcttgccacatttcccacgtgctcacctactttttttctatttcccacatgcccacctatatcttcttacctattatttcttcttcatttcccacaccctaaaacgaaaatcttaactctccacaaccccacccacgcctccgcaccatcgccctcctctctcgccgtcttcctccctctctcgatctccatttcttcttgtctctctcgtccatcgatctccacccac

SEQ ID NO: 310640 - DNA, 1792 bp, Cannabis indica
ctagaagcaacaacacagttggacaaaacaacatattgcaaagtccaaaagatgctaaagcaatactatggcataatagacttgagcacataacagagaaaggaatacagattgttaatgagcaacaattgttgggaaagatagagtaagcaaagtggaattctgtgagcattgcatacttagaaaacatcacagattgaagttcaaaataggtacacataaatctaaagttatactagattatatacactttttatggggccctgaaaaaaatacctactcatggaggtaacacttattttatgtcaattgttgatgatttttctaggaaagtatgggtgtttctacttaagaataaaaatgatacttttcaaagatttaaacactggaaaacacttgttgaaaatcttactaacataaaaatcaaaaacctaaggacagataatggtctggaattttgcaacaatgaatttgatatgttttgcagagaaacagaaatacaaaggcacaagactgttaggctaacaccacaacagaattgtgcagctgaaagaatgaatagaaccattctaaacaagaccaggtgtatattgatacaatctggactgtctcatggtttttggggtgaagctgttatgacatctacctatctgataaacagatgtccttccaatgttattgaatttaaaatacctgaggaaaggtggtctggtaaaccacctgacctgtcaaatctaagggtgtttggttgtagtgcttatgtgcaccaaagtattggtaaacaagaacttaaagctataaaaagaattttgctgagatatcctgaaggggtaaaagggtatagaatctggttaagggaaaagggggattttaagactattatcagcagagatgttatattcaaggaaaataaatttccatgtttacttaaaactaaccctgcaggtacatcagatactaaccctgcaggaatcatacagtttgatccatcctatgaagattagaggatcaagaaaaatttgatgtcaattaggtggaaccagcaggaggagaacctgaaccagatcaggttcaggtggaacacacagaaaatactaacagagaggaggctcaaatagaaggacaacaagaagagaagacaaaagacacaacaaacaggggctctatatgactaccaattgaccagagatagagagaagataacatcaaaacctaatcccaaatacaattttaatatctggaatgaagatatagcttatgcatttatgacagctatggagtcaatcaactcagaacctcaaacatatgaggaagcaatggaaggacctaatgctaagaaatggttcaaggcaatggatgaagagatggtgtcacttaggaagaacaagacctggatgatggttttaagacctaaggggaagagaataatagcttgcaaatgggtctacaagcataaagaaggcagatctaaagggaaacctacaaggattaaggctaggctggtagcaaagggtttcacagaaagaaggcatagattatatggaaatattctcaccagttgctaagtacaagactattagaatcatgttatccatagcaaaccagtttgatatggagatttaccaaatggatgttacaactgctttcttacatggagatctagaggaagaaatctatatagagcagcctaaaggttttgaagttaaaggcaaagaagaaatggtctgtaagctaattaagtctctatatggactcaaacaggcccccaaacaatggaatagaaagtttgatg

SEQ ID NO: 310641 - DNA, 1573 bp, Cannabis indica
tgaagttgatatttcataaaaaaaaaaaaaaaaaaaaccaaaattttatataatttaatataataacaacacacaacacacttggacagtcgaatagcaataacaatacactacttttagatattagaccatgcccgaaccgaggttctttcaaaaaaaaaaaaaaaataattaggcaatgtgctcaatagagtagcaatgctcaagaaacataacaacacacatgaacatgtgtcagtcttatacattgtacatatataaattataacctaggatattgtctaattatatgcacataccctttcaacacacaaatgcaatccctaaatagtaaataaactaccacccaagaaaacaaaaaaacaatctattattatcataaaaagaaaaacaaataaaagtggaaatatagttgaaagaaccaaagacttagtcaacatctaaatttatttttagtacatatcttatggaatataaaaatccactctcctcatcactaacccaaaataacatacaatatactttaattttcttcttcaaacaaaatataaaatataaaatttaaagaaaaaaaaaagccatgatacgtactaatagtaataacgttaaagctacaattttaacggttaatctcagtttcgtattattattagcaacgacgacagtcgtgttgggtggcgacacgccaataccggaaagcccttacggagttaacaattggttcagcagtaatgttaagcagtcaacggttagaaagtcaacccttgatcctgtccttttccaggcagagagcgtcccagttaaggtgatcacggtcagtaaagatgggaagggaaactttaataatataaaggcagccattgatagtgtcccaaacggcaacacaagaagaatcgttatctcaatcggaccaggtgagtacaaggagaagattacaatcgaccggagcaagcaattcatcagcttctacggaaacccaaaagccatgcccactttggtcttcgacggaaccgcagcgcagtacggaactgtcgacagcgccaccttaatcgtctaccccgactatttttctgctgctaatattatttttaaggcacgtccatcgtatgattttctttcgaataataagagttttaattattattgaagaattcaacacacacacacatatgtatatatgtgagtagctaatttgaagaagtttttgttgttgttgttgaattaaaaagaattctgcaccagaaccggatgggaagagaaggaatgctcaggcaattgctttgaggatttccgggaataagtcatccttctacaactgtaggttcattggttttcaggacactctttgcgatgacagaggtcttcattttttcaaggattgttatattgaaggcactgttgatttcatattcggaagtggaacctctctttatctggtatatataaatatatatatatatataatgcatgcaaacattttatttatatatgctatatatataacatataatgttatatcacatcactttttctaccgtaaaaaaaatgaaatttaaaataaatttataataat

SEQ ID NO: 310642 - DNA, 1571 bp, Cannabis indica
tttaattcatcatacttaatgttcattcgagattttattctgagattttattctgagatttcaatgtgctcgatctagccactacaggttgctttttttgcagaccacggcaccaggtttcccccaaagaaaattgcatagccacccgtggactgtcggtcatctgggcaacttgcccaatctgcatctgagtatgcttgaagacagaattgtggtgctggtctgatgagaagtccctcatgaattgtgcctttaaggtacttgaataaccttttacatgcctcccaatgaactattgttggagcgtgaatgaatttacttaacttgttgataatgaatgcagaaaaacctttctgaaataatgtttgtttcagtgtatcagtccaagcacgtggtgcttgctttaggccatataaggctttgcgaagcttgcatacataagttggtttctcagcatctacaaagccagggggctgaggcatgtacacaatttcttggagtgagccatttaagaatgcattcgagacatccaactggtttatgggccaattgtttgttacagcaatggtgagtagcaatcaaattgttgctggtttgacaattggactgaatgtgtctgtgaaatcgatccctggagtttgaagatagccttttgctacaagcctagacttgagcttattgactgaactatcagaatttagcttgatccgatgcacctatttgttgtcaaccaaagtcattgatgaatcataaggaaccagggtccgtgttccattttttgagtgttatgtattcatcttgcatggctttaaaccatttaggatcggccaaggcttgtttaagtattttgggttcagttggggttagagattcaggtaaagggtgattggtggcaaggtatgcttttggtttatggactccatttttggatcttgttgtcattggatgagaatttgtgggtggttgagtaactggtaactgaccacgggttgggatcatggtagtttggttggtgtctgatggtggtattggttcatgtgatataggatttgtgggggggcatctggtgcatgtgtatttggctcatgtggctcacaggtgggtgcatctggtgcaggtgcagtacgctggagatgagtagggagagatgttgagcttgcagaaacatcaccaatagtaggtgtgtcaacaacagtaggattggagttagataaaatattttccataggagtagtaaagaatgaagttgttggaaatagtgtggagggtgaggattgtacctgttgttgtggtgatgtacattttgctggaaattcttggtcattaaagattacatttcgagcaatatatattctccttgtttggcttctgcacaaatagcctttgtgctgcatagaatatcccacaaatgtacatttttatgatcgaatctctagtttatgagattgatatggtcgtaagtgaggatagaaaaagcatccaaatggcttgagaaagctgtagtcaggctgcttgtgaaataggcattcatagggtgagagatcaccaataacaggtgtaggaagcctgtt

SEQ ID NO: 310643 - DNA, 659 bp, Cannabis indica
gtataattatcttgtgtcaagtttttatattctgcactattatttttattttgttattgcaaatcagtgttctgcagtaataagtttccaatctattactacaaatctttacatacgcattttttttacttttattaaagaaacttcttggcaaatgcaaaaataaaattttttagttgtcctccccaaaacctaacttttttcttgggttaccaatggctgaaagggagagagaagagattgattgagtttgttagtcaccgatggctaaaagggagaaagaagataccgattgaatttgtttcagggttagaaagtaaagaaaaagaaaagtatatttttttaatattttattacaattttttaattattcttaatatttttaaatgattttaaatagtttaatcatattaaataattaaaattacattgactaataaaaaccttctacatgaaggtcaaattgtgatgattgtattgtagttgaccgtaccacgctagagaaaatgatatttaacggagcccatttaacagaatcttaaaatttaaagggtatatattattttggaccatgtgttttgttaaatgacaaaatggaccctgtgttttctaaaatagtacaaataggaccctgaattgattttttgtcaaaataaagt

SEQ ID NO: 310644 - DNA, 1073 bp, Cannabis indica
taggacctagaaccctggccggtcaaggaccaggctccaagcgggcaaccatctttttccctctttagaccatagtaacaattgtgtggcggccttagaggcatataaactgtggacttattcgtggcttctcttcaaaactctgtataaggctagatgataagtccattatggttaattgtacaacaagggattactgtatgtcttagcaattgtgtctaagacgatacttggtcgttggttgaccttgtaccctttgttttttctagaacatgttgtcgagtgttgacttgaatgtatttgtagttttgtcaggttgttcacctccccttatttcttccatacaaacaatgctgggtgttggattggggagttggtagctgtataggtctcttaaatttcattataattatggtcaatatgaaatagagacacaacaaggtgatagaaggggctgccttgcctcatggcgacatgagctctggaaccgatcatgagaatgagagttcagggcagagtccagtcgtgaagaagttgttccggttacgaggaagagatacaagccttgtgtcactctatccaattgtcctttaggttgctatgataacgatggccatatgctaaacaggctgggtgagcctttggtactcagcctggaccatgtcttggatcaatcccttgagcataaaactcttgatgcaagttcacaaggggataggtggattgtccttattttgtctctctcgaagcacagttttaagaggatataggttgttgggctagtagaggatatctgctgtaagatacctccctaaaataaactagctcataggttggctctcaactggttggcctggttggagtaccacattgatcagggagctatacttcctcttcatccatacttttgtgatattgctgcttatttttggatgtgtccgacacaaatcaccccaaaaggtatcaggtacctttcagcgatgttttttcttaggagctaggctggcctcaacttactccttatgaagtcggatactattttgatctagagtttactgttggaaatattttac

SEQ ID NO: 310645 - DNA, 798 bp, Cannabis indica
aaagttttttttttttttttctatgttctttcttttagagttcataatatacatcattttcttccttcccattttcgatgcctctacatgaacctttgcttcctttttgtagtacgtcccctcgcatgcatggttacactgtcacttatttagtactctgtttggtacgtgttattcttagttggaagtttttcatgattagttttgttaagttattttattttaacgtttattcatatttttaagtatttactgatttatatgatttgttggtttttaatattctactgtttttactctatttggtcggtcaactttagattacaattcttaactactatatatttagattacttattttctccttggattgagacgagatgcgccctagtgagtccataataaatcccgtcttgatagtttgaggctaagccttcctcaccatctccccgggaaatcaactgtctcagtcttctgagtcagatttttattttgttctatcttaagtgggactcatttcgactcgaatctaataattgcttcttctcttggattgggtatgctcgccctaattaggtcaagaatgactttatcttatttcaactcgttcatactcggctcggctcggccacccaccccggtgtgaacttacctcttatgcctttagtgggtcctacttcaggttaacatacatgaatcacattctcagtccaactccgaattgagcccaacctcttttctcaagcttcttgtttcttcttataggacccagttttgtgcgaatgggtgaggacacac

SEQ ID NO: 310646 - DNA, 815 bp, Cannabis indica
tgggacagtttctccttggagaacatatagaccattgatcttttcacctttcatcactactaaagaacctttggtgatcctcaaacttccacgcatggacttgtatatgtatccttcatcctcaagcacacccatggatatgaggtttcgtctaaggtctgggatgtgccttatgttcgtcaacaccttgattctgtcatcatactatttgatgaccaccatcctagttctaatgaccctgcaagaatgatcatttcccattagaactttacctccatcaactgactagtaataaaaaaatgactctcgactcagacacatatgataagtacattcagagttaagaatccactccttgttcatagatgactccgagatggagaacagttcttcgtccgtagagcagtcatcactatctttaacgattgtcgcaaaatctttcctgtgatgatggtgtcgaaagtctttcctatctccattgcgagatttgttgaagccttgttgttcattgtacttcttgcaaaatatttgcaagtgtctagaccttccacagatgtaatacttccttatttccttctctctggactttgatctcaattgagagtgatggtgtttattcttcaaacttactttcttggatggtcttcctcttgccaaatacacttcttctttcttgaatttcttctccgactgtaacttgaaatcttttgacttaagttcggcaagaacatcttccaaggtaataacatctctatcatacttgatggctaccttgatgtaacaccctaactattttaggcgtattacgtgatttt

SEQ ID NO: 310647 - DNA, 2089 bp, Cannabis indica
tgaaagacttagagcagagttttttaagctcaagtgttgttcaatggacaaaagagacttgaaaaagcattataaaagaatggactaaacgattctacgaaataggtggcattgatgatccaaatttaaaacaagcctttctttcctttattccagagccacttggtgagaaactttgaagctactctctggattgggaaagagcctaacgggtgctacaattggagaaattttccaactagtcttaaaaacccttgaaaaaatgtgctcccagaagaaatttctccaaaaattcatgaagcaatccaaaaaactaggcaaagtttgtagcagataatatttactcactacccatttccctacccatttccttgagatgcaaagcttatcctttccaaaaccaaaaagtcagcaaaagaaaaggcctctcacatgactgtttatactcacaactaaatcctctctaaacttagaccctattttcaacatgattttttaattcacccaaaatatccttttccaatctagtctccctctggactgcacttttcactccaaaatacatagcccatcttttctagtacctaacatgaaaatgtacaattgagtttgaagtccaaactatgactcttcacactgctaaacagtctttccttgaacaagcaaaaaataagccagcctaccaaatctaaatggacattttgtcttggtacgctcctctagaagagtggaaaaaaaatactttgggatgaatagaaaaaagttcgcaacaataggcatgtctttgtttatccatcaagaccacatgtagccaacatgatagattactacactgtcttccatatcagtcttaatgaaaaattggatgagaacaagaaaatagtttgcaaccccacctttaaactatacggctcctaagaagcaccttttagagaaaattcagagtacagggatctccaaaagattatttttgagaaaaaccgtactattccaccagaaatttggccaaaaatagaagataatgccccatgggtaatgtttcccttagattattcacggcgcatagtaaaggctctagaaaaattccaaatttactaaaaatagtcataatcaggtccaagccccctgaagcaaagaagaaaaattcatcactattacaaaaaaaaaaaaaacaaacactataggggtcttactccgtaagacaagcattttttaggattcataagattcatacatggaccaagagatcaaccaggatccctatctctttgagtacaatagactagaatgagagattatttattctgaatatgatgcatgtccaccagatgaaagtgatgagatgaaccatcaggttggcacccactttaggaggaccctaattttagatagctcataagtagtacaaaaagattcaatatctcttacttttgtatgataacaataaatggaaaaattcctgatagtcatgatagttgtaagaaattttctaatcgtttgtttgttggtttgttggtttgtcgttttttatgttttttagcttgttagtttgtccatttgttgccagattttccttttttctgtttgttattttgttgatttgtccatttgttgtgagttttctttttctatgtttgtttatttgtaggaaatttttagaaagtttcttattttgtatcctactccatgtaaatggttatatatagagccatcttttttcattctaagaggcatgagaaaagcattctactaaataaaatttttagtgtttttctttatactaaattttctttaagaaatttttgagatagtgtgcatggtcattgattttaattttgccttaaacttaattttgctcatgttttgacaattgtcactgacattaataataaacattatgctgatttctggtacattggatgcattatgagggatattattgcctattcgcagtattgttaatagtatgggtcactctttagaagcactttattttcttctgatgagaattaaggtcgcgtttggttggaggtaactggaatggaaaggaaataattttattccattcatttgtttggttgcattttaa

SEQ ID NO: 310648 - DNA, 529 bp, Cannabis indica
ttttttttattattattttctaatcacattcagattctcaaaattgatgtacatttttatatgcgtatgtgtaatttctattattgattaattttcttaaaaatcatatatatatatggtatttatgttatttagaaagtatatacttttctcgattatttttatttacataacattaattcaattttaaattaagctttgtttttgcttgcgcattgttaggagtattagttagagttgttacacttgtgttagttatttcagtttgttagttttaacaacctgttatgtactgcttgttctaactgatttcagttagctctaactaattctccatgcttgtaattgttggctatataatgccaattaccattaacaatcataataagattgctctttgttatcaatcttgtctttcattatctttccctctctttccttctcttttcctctttctcttagtttctggtttcactgttcttcttgttctctgtttttgagtgttcatcaatggctaagagattcaaca

SEQ ID NO: 310649 - DNA, 1524 bp, Cannabis indica
ttaaggctgtaatgcacttacaattaaacccactaaattatcatctcatgtcggctattaatacttcaacatatcataaattaattaattaaaactactcctatatatttctatacaagtatatagctacatacatagatagatatagtttatttatttcattattaattaatttaatccttatctttttttctttgatgatcaccattttcaccactcatcaattaatttatctatataataattttaactagagactatatatagagtgccttgttcaagccaagtactttctctttactttgacccacatacatccaaacacctttctgtgctaactttttgaccctgtgattaaggatttatagattataattatgctatacatctacaatattatatagggtctatttataatgagaaatgttgatcaaaggatgggtgatgcccatcatcaacatcatcttattaagtgttcttcagaaattggaaaagaaaaatattaaaaaacatcattaatatttaaattaagtattgagtctcatataattaaatttaattaactaactatttacaaggtatcaccttaaagtagtacctcacaatactcgttaagaaaaagaaagttgtatgaaatttaagtgtacaaaagaaattgatattactcactaaaatcatgtggggccatcaaaattttacgaaaaatacactaaattatactataaggtgtaattcaaattttcatatctatattccaacactatattgcatacaatttagaacaatatataagtaattcaataatatataaaacaaacatgtttaatccataacaataacaaagatttggcaatacaatactaattaacttattactaagtcttcctagatttttaaaacagaatagaagttagttaatcaactgatcagcaaaagcatacaattgtgatgagtatttatagagttaaggatgtaatctaggaacagaaccctaattggattaggcctcatcattaaaagcttcagttgactagaaaaacttatatttttgcttcaactaaacttcacatagatactaaagctattaattattaatcactaactatatgaactaaaataataaaaaacttttcatcaaatccatattttaagaaaacaataaaactttaatgtaagcctaaaataaaaatttagcataacacgttctttaacctcacatcgtcgtggtgggattaaacactataaatatataaatgctaattagaatttttgccacccgaattttgacatatgtaccaaattaatcatgccctttgaatatttctgtccgctaaaaattttctatgaactattgagattgttacatttaaggatttttgtcgaattccattcaattttactcattcagtgattgtttatgtactaaatcatgctcctgagattttgttatctaccaaatcatgtccctcgaatttcgacatgtaccaaatcatacttcctgaattttcatcaatgttagacttt

SEQ ID NO: 310650 - DNA, 1791 bp, Cannabis indica
tgttaatgaaacatacttggtagtaaatctagatcctggtaaaatatttccaacagttagtagatccagaatcaacaatctaaatggatttgtcattctctaaaactcatgattcaaaaactaaagcattaccattattcttagtgttgaaatgtctgagacaatttgatttaaaatgtcccttctgttcccaattaagacattgaataacatgtctgcttaactatttttggattgttcttattgctggttcaatctattatgaaagataatctgatgaagtggaatcactttctctatccttttcaacttagcctgaagtagtaggattgtcggaggaatcattcttaatatcttcagttttcttttcgtccttatgtgcattactggacaaggacctccatgcaagtaacaatgtttattcataagcacgtaattcaacgtccgacttgtctatgtcggaggagttccaattgttaacaataaattggttgcaaagctaaaaaaactgaaggttcagctacagggaatgttggatctaaaatttacaagaccgagtacctcaccttggggtgcaccagttttgttcgtaaagaagaaagacgaaactttacagatgtgtattgattaccgagagttaaataatttgacaatgaaaaacaagtattctctcccaaggatagatgatctgttttaccaattacagggaaagaccctcttctccaagatcgatctttgatctggttatcaccagttgaggattcaggaagaggattttcccaagatagctttttgtacatggtatggacactatgaatttttagtaatgtccttcggattaacaaacggcccggcgacatttatggacttgatgaatcgagtgtttaaagactttctggatgattttgttattgtctttattgatgatattctaatctttttcgactcggaagagactcacgagagacatctttagatggtgttgcaatgccttagggagcacaaattatatgctaagtttaagaaatgcaaatgttggttgccttaggtgagtttcttaaggcatggggtgaataaagatgatatcttggtggattcgatgacaattgaagcgctacgggactggcctcgacctaagtcagcaactgaggctagatgttccttgggattagtagggtattacagaagatttgttgagggctttgcttagatttctatgcccttagcagaactgattcaaaagaactagaagtttgtttggactgataagtgtgaaaatagtttccaggaattgaagcaaagattaattaccgctcttgtgctaactttaccagtcagtggtgaaaagtttgtcatttattatgatgcatccaaataggggttaggttgtgttctcatgtagtctgggaaagtgattgcttattgttgtcgagcgaaattcgcaacaccaaaagtatataataatactaataataagaggaaattgtttgaaggacaaatgcgagtattcaacctaaaatggcgagtactcgagctgggaatgtaaatacttaacagaaactggaaataataagaagacaaaggattatagtggttcagtcagatcacggtctgcttagtccactgcagcaagagtttcgttaggttccatttcatggttgatcactcctttatatacaaagcaagtgtccaattagttatacaaagattgcattcattgtcaatccgtttgcacattgatttacagtaattaaactaaaaaacgtaaacatcaataaatgaataacagtt

SEQ ID NO: 310651 - DNA, 810 bp, Cannabis indica
gataactattgttataagaaaactcgatcagaagaagatacttgttccaggaatcctcaaaatctaagatacaagctcgtagcataacctccagtatctgaatagtcctctcaaactggccatcagtttgaggatggaaggttgtactgaattttaacttggcacccattgctcaatgcagacttttctagaacttagacgtaaactttggatctcaatttgagacaatcgactttggagcaccatgaagtcgaactacttccttgacatatatagatcagcatattgatccactttatacgtaggctgtactggtaaaaagtgtgctgattttgtataccaatctacaatcaccaagatagagtcataataccttactgtccttagtaatcccaccactaagtccatggtgatgtcttctcatttccactcggaaatctttagaggctgaagtaaccccgctggtctctgatgttttgctttaatctgctgacagattaggcatttcgatacatactccacaatgtcacatttcatgcctgaccaccagtacagggctttcacatcgtgatacatcttagttgttcctgggtgtaaggaatatggtgtggtatgagactcatcctgaatcttctgtctaatacctttgttgatcggtacacaaatcgtgcccttataccgtaataacttgtccgacaaaattaaaaagtcctttgttgacccggcttctagcttttctttgtacccttgtagcttagaatcattctgctgagctgtcttaattttatctaacaaatcagactgcaacgt

SEQ ID NO: 310652 - DNA, 636 bp, Cannabis indica
aaaaatgtaaaaaaattattttgaaaaaataaaaataaaaaaaaaaatagtgcatcatctcaaatattaatcccaatcatgtttatgatcagtttatggaatttttcttcttctttgaaaggctatattttgtagatttttacaaggaaaaatatcaattcaaactaccaactcctaagattgcactaaaaagaaaatgagatcttataacaacacacacaataaagttgataattttataataattatatttgagtaataatttgtgctattaaaatatgacatcttgtgatgccaatgctttgtaaagagtaagtcccaatttagataaatagaatatctgtcactatgtaaatttatgatgagtgtactcaattatatatttcgtgatcagctctttataaattcatgcatgtacttctatatttaccgtagttattattttttttgtattctttttatttctttcaatgctatatttgtaaatgttaattctatttttgacatattgaattgagaaaaatattttattatttattgtatatttcggttagtatgtgttaatatggtttctttattttgtgtattcaaacttggaaggaaagttgtcaagttttcttatttttggaaaaaagg

SEQ ID NO: 310653 - DNA, 1880 bp, Cannabis indica
agacgtgttgtttaccttggtagaaaatttgcttaataaggcatgtcatttaccttaatttaaggtaatgcgtttacctaaataaaacatgttatttatcttattttaaggtagtggtttacctttttaataataaattatgctctaatttatcttaaatatggtgtttacctaaataagttgtgtaattatgttctaacgtttttgattgtggctgaatagctttggacaaaacctataacgctaaaggctaacaacacagcttaatgaacaaatgtcatatatttgatctaagaaaagaggggtatgttgcttatattgtattgagtttgctaatcagagtctccccatatatatatataaaaactattattaagggctatctgatatttaaaaaaaaataccagtcagtttttcttgtcctaatatctaaagttaactgatatttaaattgaaacatggattgtgtggtgtgattggtatgtcacatcatgttgactcagataaaacacattcttttgtggctagagcagcaaggaaggctgctatgctatcagtagttcctgcacatacaacacaatcttttgcaaagcctgcaaataaatttatgtaagaacatatgttaaaattctatatgttaataatggtctctctaattgtgatacttattactcagatggttgtttcacagaggaatactatgtatagaaaaaaatcttctggtatcatggactaaataagttttgattgaagcaattatacatcctaattgacttttataagtaaattaaaatatacttaagttattgttgtcagaaattatgatcacgacatatataataactttttttgaattcattatatctatgctatttctcattctataatgtgtgtatgcacctctcattcaattcctagaaatagagtaaaaacaaaaaaccaaaaaatttacatggaaattactctcatataaatctgaattcaacttaataggctaccaaaaataatgatttgatgctcaactacatgtacacattgatcgattaaggaaaccattaattactcgagtgggaatataaacaaactagaccatcaaacattatatataaagatgtaaactatggtgatcttaggaagcactaagattagtgatgttgtaggtttataaaaaatatcacataatacaaaatctcagaattgagttaacaaatacaaataatgatcacagtcacaaacaatgagatgaaaattaaaaataaaacaaatggaaggtttttataattgaggactttcatcaaacacatgaattgtaaaataattacctcgctccacaaaggctaaacaaactttctctggttcaaaatcaacacattacaaatcctccaaattttattacaatcaaaacacactaatcagtgagaaccacaataaaaataataccccacttaaaacaataacctgaaaccgtatacggtacaataatcaaatggctgaaatggtagttacgaatccttgaagccctagacgataagcgctaaactttgaagatctcgatggtactagcattgttttttggaacagtggagataggtttgagagagagttagccaaattcgaattacaggggaatggagagtatttgaagacgggtaaaattggtagagtatttaaaaaaggaataaaaatgatagactttaaaaagagggtaaaaataaaagaagacagtctaatttggggtaagttgaaaaatgcccattttattaatcaattaatcaaatttacctctaattttatatttatttggaacatacatctttttatatgtattgtttccaaaataccctgacacaagagaatcacatggagagtatcttgaagtg

SEQ ID NO: 310654 - DNA, 2227 bp, Cannabis indica
gctccccctctttcattcctcttgctcttttaggacccattcttgctcaaaatctctaacaccaaaacattcaagaaaattttgacagcatctccccttaaaattccactttccgggtgaaaacccaatcacaaatttcacaatgttattcacatacaactctccacagtaatttctcaaacaatattccaaaaaaattcacaccaatttcacaagatcctccaaaaatcaaaattatctattaacaattgcatagatagttataagaaattgtttacctcaatgagaatctccttcactctacctccattgaagaaaaccttgaagctcttgaggtagatgatgatgaatagtgaaatttttgaatttgggtgaagtttagggatttggatatggttttggaaaggaaaagaatgtttgatgagagaaaaagtattttagagtgattggggatgaatgattatgaaaagaatggaagaaaaagggttttggtgagatgagattgaagaaatttggttatggtggatgaggtttcggaggagtagtttagggttgagaaagggggttttgatttttaaagaaatcgtaatgccccttttaaacccgtctgggcattctcgccgctgcgagacgaggttaaaaaaaactgctctctgccattcgacttatggccgcggctgaagttgggcttgccgcggcgaggaagtctttaaaaaacctgctctctgccattcgacttatggccgcggttgaggttgggctcaccgcggccactgggcagttgcccagaaaaattattttattttattttctatacaaacataaaaccaatacccagtttacaaatttaatgaacacaaatcaacaaaaaaaaaacaaagaaatataatgaaacagttcaactaaaaacaccattaagtcttgggttgccttccaatagcgctgtctttttagtcatatagccggacgttgactgatttcttcaaagaggcgccagaatcatggcggacttggcttggtcaaaatgacctccaaagtaaagctttaaccgctacccattaaccttaaaagtgtctgggctttcacctttgagttccacagctccatatgggaatgctttgaccaccgtgaatggacccgaccatcttgactttagcttactcgaaaataatttcaacctggaattaaagagtaagacttgttgctcgggttgaaagtcttttctgattaagcctccgtgatgccatttcttagttatctctttataaatcttggcattttcataagcctcgttgcgaaactcatccatctcattaagttgtagcagcctcttttctcctgctgttgccaagtccatattcaatgttttcatagcccagaatgccttgtgctctaattcgactggtagatgacaagctttaccatatactaacaggagacattcctattggtgttttgaatgctgtcctgtaggcccataatgcatcatccagctttttagcccatttctctcttgaacgctgaaccatcttctccagaatcaatttaatctccctgttggaaatttttgtttggccattactctgaggatgataaggaagtgttgttttgtgacaaactccatatcatgcaagtaaagcttcaaattgcttgttgcagaaatgacttccttcatcgcttataattgctcttggtgttccaaatcgggtgaaaatattcttctgaagaaagtttaacacagttttaccatcattcagatgtgttgctgcttcaacccatttggagacataatccacagccaacaatatgtatgtgttactgtatgatgacgggaaaggtcccatgaaatcaatgccccacacatcgaaaagttccacttccagaattccagtcaaaggcatcttcttgaaatatttctagttcgttgacaccgattacatgcttgaacaaattggtgagcatctttaaataaagtgggccaaatgaatccactttgtaagaccttagcagcagtacggttcccactaaaatgtccaccgcattgcaagctatggcaatgatttaaaatagagaacatttcctcctccgacacacatcttctgataatctgatccgcacaatgcttatagaggataggctcctcccaatagtagtgtttgacctcagagtagaatttcttcaattgttgccttttaaattctggtggtatgtgttggaaattatttta

SEQ ID NO: 310655 - DNA, 2642 bp, Cannabis indica
cgaaacctcttcctttataatattattttaaactaacataaatgtacatttatcttgttttatagttagttaattaaaattattttaaaacctaactatatattatatattgtatataataattaattttaaaaattagtaataattaattattttagaaatattttaaaatatttctaactaaataattaaataaatttcaactacttaattatttaattacaattaataaagacgatatatgagatttaaattaatttaatgaaattaattagtaattagaaatggtacttctaattaaccaatagtagattaatggtcaaaggaggatggtgtgaaattcctaaagctacatcaagcaacaacaaagaagaattctttatgagagagactgctcttagtgtagtttatttcttatatttcaaagattttttttagaaatacacaatatttacttgattcacatttcatttaataatcaattaattgtttgctaattgttagtacatacatatttaattatcatacataaaatctcacatagtttgcttttgataatcatgcatctcatattagatacatgattatttaagattgtcctatatattttatgtgcattgaatttagaaaaatcaatttcataaaatactaggttgtattaattagtttaataacctggtaatacacaccaagtgacttgctttaagagttagtcacataattaactaatatttttcaaaatatggtattttcaaaaatcactaagcaatatggcattaattaaattatttttagacctatgttatagtaatttaagtgatgttttacaacttggttaaagattaaaatcaattttttaaaagagatttttataaagacaaacacattttaaaatagtgagtgggagagggttctcatctgttatgaaatccacaatctccattattagtccaacactgagggtatagggaggacctcaagacgactttgttttcgtccccctaaggaaagtgttgaaccatacattgtaaaggttggcttcctttatggataggacaaagtgatgtattttagtgcgataccgacccttaaggcggtgctactaagttaagtcatggaatctgaaataattggttacactcataaagttatgtccatgtctttgatactaggggacataacttgaccaaataaatagtactttattttgttaagaaaataagaattattttagtttcaattaataaagacaagaacaagtctagtagattattcgaaattaatttgaccgaccctaaggcaaaactttaatctttgaataatcttaccgtggaatttctaagttgttttatgtattttttttaattttctcatgcatcatatttaaattccaaatttaatatttattttttatttatggtacttaatattgtatttatattctattccatatttttcgtgttagttattttttaaaagtctaataacgatataaaatggaataacaattcaatattgacacatatccctattactatgtaactgaatttgatggtaacttccaatccaaatttatagagcttctcttgtaaggagaaaatcttcttcaccttgtcgctgttaaaactccctggatcaaattgtgtaaacattctggatacatagtcaagagagcttttaaccaatggcatgatgataatgatcgtgctatgtatatcttgctgcttcatttaaggaagagataagagatcggtatgactattagtgtatgcctgtcacatctaaaaggcagtacataataagtatattgtcgctcatgatcaattttcctatgagagaaatactcatcctaacaagatggatattttgacagagttatgaagctagagaagaaggtaaatatgatttacttttcttcttgtcttattaaacaatggtggattgaattgttctaaaccactaacatttttctctcttacttgtaaatttgtgaacagaagacaaagatgattcaaaaaagtgagacttctacaaagtttgtgatggaagaagattttagaagagcaatgaagaagtcaactataatttaaaattttaaagacagtttatttagtttattgttctaaatcttagttgcagatttgatgtttgtttttaatctaaataattttattttaaacacttaatgttttttcaataaagtttatttaatatgcaatcttaagtgtacaaagttaactaaagatttcaatgctcatattataattctaaaagcaagtttaaatgtattaattatttattttgacttaaaaataaataagtaacaattttcaatattaacttataaaagtatctatagttttaagatgagttgcgattttaattctatatgattaaacttaaaattaaatgagatttaatttaaaggtttaaattactattcaaatatatacatggatatggaattctattccaatcatgtatatgttagacttttatttgggcttacattaaattttattggttttattaaaacttgggttgattggatagttctttgctgtattggcccatgttgttggtgatcaattgttaatgggcttagcatctgtgagtaaagtctaggtgaagcagaagtgtgg

SEQ ID NO: 310656 - DNA, 1926 bp, Cannabis indica
aaacaaaaaaaaaaaaaaacttgagatacgcgcgtgagatacttcgtgatcaagaaaattccattaaatttgaatttaaatttatgtcggttaatttgaaaataggtgagtggcgcctataaatatagattaataaaccctttttttaaccctaaaccattaattactagagaaagaaagagattgtatttgtattaaacattaatatgaattctgagagtgagaacaccattattcatcaaattagtagctttactaattcagttagagttgaccaaattatcaacctaaataaccctaacattaacgttaattataaggacattaccactgttcaattccacttcagcttcacctaccgcaccaaactcaccaccggctacggccatgtctcacaagaagaagacggccactactacacctacgatcaaaccataacagccgttgattacaccccaacattgcaagtcttctctccacccttagctcttcaccaagttcgttctttggagggctcctacaaggctctttcacccattttgtcaagcattggagtcgaatctcagagtgccttaaccgacgtggcagagaaggttaccgagttctgcaacaggtttattaatgtgagtccgatgattgtttgtgcagttgtggagatggagaaagaggtagagcaatgggagtgtgagtcgtgtagtaggatgggtggtaaagatgaatttttttggctggataatatggggattgtggatttgcatcttgatgcttacagagttggagaggatgatgagaaattgggagagaactgttctgtttgtttggatgaatttgaagctggaacaaagggggcacgaatgcctgactgtttacatctgtttcatgtggattgcattgccaattggcttcgaaagaatccctcttgtccagtttgtcgatctcaattatatcccacctctcccttgtaatcaattataattcatgtatatgttcttgaataatacaattggaagtatttttcttgtattgcaaatgaattactttcatagacaattttaataatagtcagtttttattttataaataattatataattttagttcaagttatcttattttgtaaattttttgacaataccttattagtacttaatgaaaaatttgcattcaaaccattatacacaaatatagaattgaagggaagctgagtttgggatttcttagtgtggtgcaatgcaatgtcttggtctcaaagtttagattcattgtgtgggaagctgtgaacaatcacctaatcttctctgctgtaatctcaatttagattcggctgcctgtccctcatatctattctgagtgcatttattcaaagaaatttctgcagtttgtgcgtgcttggcttggagcagctatgtggcctgccctttgtgcggaatggcgagcttggttaagtaggacttagtatgatctgctgcagaaaattgctgtatttctgttgtgaatatggagtgtatgactaaactgagtgtcaaagttagagtgcttggtttgaggaacaaaaagtttactcaaaatggtgtgttctgcttgttttagtgcagttggttgattaagtaattgcttgcaatgttggacagattataggtgtacattcgccaaggcagtttgtagataagaagaagcataaaactaaaatgaaaaagaagcaaattcactagtttattaaaaaatgaataagaataaacatgatatcactatgaggatatctgctcattagttttagtacatgataacagtgactaatgtacaaatcaccttatgagggataaaatgcaacactatagtcagtagtaagagaaaagaatcattccttttttcccaacaccctcttgcattttaattaaaacctattagttcttgtaaatgcaagaa

SEQ ID NO: 310657 - DNA, 651 bp, Cannabis indica
aatccaatacatccattggatcggatcggatcgaatgactcaattcaattagattggatcagatggaaaaatccaatatctaataaataattggattggattggatggctccaaatccattgaatgtgatccaatgaacacccctatgtccaagtcttgaactaccatcggaccattgtgccactcgttgaaaatccaacgcctctaatcatagacgccttgcaccaccaatccaccatgttatcgcatctttgtacacccatcgcctcgtttcttttcgaactctgtccttccacaaccacgtccagcacatatcaaatttggttcaatcacttgaaagaaaggttgctggaagtgcgacatcttcaagtgactagaatggaatggtgcatcttcataatagtcattatatatagaaagagtgagtatgtgagagatagagataccagagagttgaaccagaaaagaaataaagaggaagaatataaatagtaggaggcagataagtttagggttatgtgtgtgatacatttatatatgtaaaaagtaataataaaaatatataaatataatataattttaattatcaggtacatataaataaaaattataatatatttttttttgaataaatactattttggatcctgt

SEQ ID NO: 310658 - DNA, 2203 bp, Cannabis indica
actgcccctcgggaatccggtgaaggagcatccagaggtaatcaatgtggctgggcacctactgtacttagggctcaacataatacattagttaccttccaagactcctgtcttaatttttatacttggaattccattctcgtggaccgcattgctcaaaaatttgacagttggtatcctagattccatgtctagattaactgtcacgagtcattttatggtatagccgagcaatacggtactacggaagattgggctggtcacatagatgcgagccttttgtagggattttagagaatattatggtccttctaccgcttcatctagtgatagctcgccttctagtgattttggtaaatcccttaggttgaaaattatactcctcctctttttaatcggcttttataatgattgtaacgcctcgtcctgttttgcagacatgggttatgaagacatccttgaccgtaaggggaagaaaaggacatccaactctggagttcctactgttgccaaagtggttcctcccaagaagtaaaggaaaaccaccgcccataagaagaaatcactggccgagcctatcaatcttgacgtttcgaacaatgagatcccaaagcaagttcctcctccagttgttcccaacgccaatgctcctcatcctgaggcgacccccgctactgcttctccgagtcaggccattgagaccctgtcggtcgtagccagaaaagctgggtctgaatttgcccaagcatatggagtcgcttgttggcgcaaacttcaaactctccttccctttgattgggattttctcagtcttacaagtcaaaaatagatgctttcaaggagcttagactgtcacttcattgtatgtcgactttgttattatcactatgttatctttttatacctctttcatattcatctatttgcaattgtcaaggattcttttgcttcttttgcttccaatagactactataagagcggctcgagtatttggagggtgaggctcacaaatcggtatcccaatgcaaggttatgagtgagcaacgaggcaatgcccgatagcagattacccgccttaggcaagaatatgagaaagcaaaggaggaaatagagaaagcaaggatggaagctgagaaggcaaaagaggaagcacaagaaggcaaaagtggaggccgagaagaccattaaagtcaaagccgatgagtttgaggagatgcttgctgaaaaactttctaagaaagaagtcaagaccgtagaacggtgcaataaagttggttttcacgctgtatatcggacttggctttgcgaccctaacatagataccagctttttggaggagaaggaagaagaaaccttagctctttgcgagatgaccaaggtggaagaagaagacagcgaggtcgaggaagaagaagaagatctgtccaagtctcccagcatgtagactttgtctatttatctcccttttctcgtttaggaaatgaccctttggccgagacaatgattttgcccctagtggcagttttttgtaaagacagatttgcaaggttggacgaccaactttgctttttaatgcctcgggcttttaagtgtaaactttattatgcggatgtttgcttgtttttattcacaatataaaatttcacatgcatgcataaagtttattaggggtttccattgattatcctttcctccgacgttaagtagttaatttcctactttacgtgcgagcaacttatctgcccattcctcaatctacgagccatcatcgattctgtctcgcgatcatcggaaatgatttgattttaagcacattaaaatatatttttaaagaacttgtcatcttgtatatattttcattacttacatgagtagttaaaatttctacacacgtgttgggcttaagaattttttcaagacatttggatgtctcgcttaatactttcccatagcacgagccgttagtttttagctttatgcgctagtcataacttttgattttcctttctcgtcagttaggttataaatcaaaagttacagttgtttgatccctttctcgtcagaaaggtttgatcaaggcattataacgattcagcccctcttctgtcgaaaaggtttggttagggagttataactgttcaaaccctcttctgtcaaaaaggtttagtcgaggcccttttttttttgaaacgatgggtttgc

SEQ ID NO: 310659 - DNA, 498 bp, Cannabis indica
gacatgatttttcccacttttttgtcagagtgtcaaattctgattttttggattttcgtgcacgtgcggagcgcgtgttccttggaagcgcaaaatggcagcaattggacttaggaaatcttctcacttactgagtgttcttcacgatgcatgcaatgatgggagctatatgttgggaagcaaagcgctcttttagcttctcacacccaatcactgggtgtctctcggggtgaactgaagcgtttgcttcatgtgcaatgcgcccattccctatcatcccataaatacctacgatagccactttttttttttcactcttcttacctgttaacccactatcccttcctatttttctttctttcctagtcacattggtaacgctgctatcgtcagacattatttttcctactaaggacgccacaccaagccctcctgcttcattagctagtaagttctctatttactcaatagtttctgagggaattatgatggcatgtt

SEQ ID NO: 310660 - DNA, 823 bp, Cannabis indica
tagttaattatatatgagcatgcaactcacacagcttcaagcatttatatataatgcgacagttagctgccttgggtcaacttgcgaaaacatttaatatggtcgcatgcattgcagcagctaccactctactcttctgttatagtaattaataaaccagctgtcccatttgtcttaagccacatcattacagaccaagccttagctgttgttatttaactaatggcaatcagctccaaatactacctgaaaaatgcctccaataaggggtttattgacaggatttttagaagttatgatttttgggcttccaaacctgcaaaaatcttcttaaattgatttggtacgtcatatattatattatattataataaatacttgaccccaacattaactccaagtcgggtccagagtccagaatcagggatctggtctaggtccgggtgggagtcttgatccgggtctcgatcctcatcctggtccgagtcactagattcggatcgaaaatttgggttgatcccatatctttgtaaatattataatataagctatatacagaccaattgatatgtacttaataacacaacttatattgtattaaaatttttagtcgtaataattaatacaatatattactttatttaaacataatattatttataaataacataaaataactcaaaccagttataattaaaatagaaccggttctataatagtattataatgaattaaaacaaatatcacgaaataactcaaaccggttataactaaaatagaaccgattatataacataataaatacaaacaagtaacacgcaat

SEQ ID NO: 310661 - DNA, 748 bp, Cannabis indica
atattgatgaagaagatgatgaaaatgatcatgatatggatcatatgatgatcaagactagtaatactacttctacttctaataattctacagttactgttgcacttcatatagggttacctaaccctagcgccgctgaaatggaagctcttctctcaggttctgcaccctcatcttcatctgatcaactaataaccaacaataataacaacaatcttaatcacaatcataatcataatcatgattattcaacttctactactaatacactctacaagggtcagtactggatcccaactccttctcagattctcattggtcctactcagttttcttgcccagtttgttacaagaccttcaatagatacaacaacatgcaggtattaatttatttaattaattaatttttttcttagatttcaatctttattaattggggttttttttatctttatttttctcccatacttgtttttttttttctttttttcttttgggtgcatgggttttatgggaattaggattgagtgtgtatatatatatatatatgtatatgtatatgtatagtactgatcttctctctattccccttttatatatatgtaagtagtgattgaacaacactagagagccaataataatgtttcttatgccttttagtactttgaagttctgtgcttttacacagatttggcagggtttgtatatttatagaactaggatgaaccaaacaaaacaaaaggaaaaa

SEQ ID NO: 310662 - DNA, 727 bp, Cannabis indica
caatagccaaacaccacgttccaatattgtcgggcacaaaacatgcaaaaatataaaattaatatatgatatatcaaatgcattttgagtttaataaatccccgtaaactgaaaaattcataagtaatatacaagtttcctaattagaccctaattatctgctaatttccaaattaaagttaagtggtcttcacactgaatgatgattgtaaatgttaggacagcgcaacctagagtgtttggtcttaggacatcttggatagtaatttgtagtcactgtgcgatatttttgtaaaaatattttagatatgtttgtaaaagtttaaattgaggatcctggttatgtaaatatttatatgtttataaagttttataattttagtcaaagtttttatttggcatgattttcgagaaaaacctttgattagcaaatgtggcaagttaattagaaaattactgtagcacgcctaagtatcaaagctgccaggtttgtcatccgaagatcgtcaagacatgtacaatcattatcaaagaaaagctcgattcacggttcagcaagcctttacttatttagtaattaatgtgattagataagaatgttcttacttatctaatcaaccttgttgatatgtgtatgtgcgtctagaaacaagtcggtaatatattatttgttatatgtttttcttactgagtttgttgactcacagttgctactttcatgtgtagg

SEQ ID NO: 310663 - DNA, 1140 bp, Cannabis indica
tagtgcataaatgtcatactagtcacccatttttcctctaatgggtgtaatatttactttgggtttatctggttaagcccgacccatgggatgccttgtgtatcgctgatgtggaaaccacatcacgataccagttgtcaaaactatgtcatattttcctgggaaataatgacacattaattacttgattgtcaattaccatctttccttatttggaaagatatgatattctacccgagattcttagaaagaaatctttgatcttgtgcgatctggtagtaaataggaaactatattaggcttccagatactcgctagaggcttcttccttccagacactcatcgtgttggatgggatctcgactggacgagttgctcattcttcacctgaaaggacagacaatttatggattcgacctagttatctcaattgggcccactgttgggccttaagtatttaagttgtatttattatgtgaatttcacgtgttcctagccgaaaacacggataacatttaccctccaagcttccagaattctgagggttgcagaggcttgctccatactgcacggatggacaggtggagagtaaaggtgaaacctttaaaaattccaagttaccttcatttatggttgacatcattctattttttgaattaatgcaacatgtggtgtcacagtattcatttgtggagttaatgttcagtgaggaggcgcgtggaacgaagtttgtaaactgcggttaattattttggtatgaatctcgaggagaatatcatcatttaaattttctcgattcaaaatatttcattaaatgcctggctgatggcgttcccagatcattggatttgtcttgtgttttctgaaacttgatcatggcccttgatcatgtggtttccgtgggcagttatttttgttgggttttgtgccctaaataaaacccatttcaatataatcagatttacttattgttgctaaatttataatcactatgcaagtatacgcaatcaagtagtaaactcacacaggtgaggtcgaaccacagggaattggactaattactactaaattatactattgattctatctggtaaaagaatattttttatgaattaaataaaacaattcagaaaattaaaa

SEQ ID NO: 310664 - DNA, 609 bp, Cannabis indica
ccatatatttttagggtcggccctgctgatattaattggacacgctacatggatgataaaatctacttataagcattcatgattctaggaggagctattttgtaattgtcatatgaacacctacaacttcatctctcatacaaagcgagtagaatagtatggggagttatatatgattaggtgttgtatgcatatttatatcatcctcacttgtaaaggtagagtgtgtggtgtgttacaaggacattgattgtacattataattgcgatattttattttcgtgttaagactagttgactctgttgtgaatttactgaacttatgtgataaatatcggaatcatatctttctcttggaacttgagtattattggtccattaatggtgatgacgttccatatgtagtgagaaagtcatggggtatcataacatgcacttacagacaacatgtcaacaaatacactgatacaacttacctgaacaaatgtacaaaaaagacttttcttgttttgattatttggagccaaagatgtatttggtcagtgggagttattgttttcatgtatgataaacatgttaagaattgttattggttgttgaatacatgca

SEQ ID NO: 310665 - DNA, 2963 bp, Cannabis indica
aggaccttggcaagtcttaaacataaagcttggagatgcacttgtacagagtattgtagcacgcaattggccgattaataactgctgaagtaggacaatcaaccttaggtatcaaggtgatggttgtactacgaagctccgtggggtatttgattagtagttaaaaaaatgaaccaagtggctgagactaaatttccttcccacctcaggtcagaattttttgtaaaacccagacccaaagccgtctggacctagcaatttgttgctaggtatactgaataaagcttttttaatctccttttgtgcaaaaggcttcaagagagtaagttgtttgtcaagtgagagcactggacccatggctatgcagtttttttccacctttaaagaagagtattcgagttccacatgacactttgaaagtgaccaacaaaatgagcaactactttagagaaattatccaccaccgtgccattaccatctgtaaaagtagcaatgtgattttcatctttcctcttttttaaacaagcatgaaaaaaaggcagtgttatcgtcatctttttgcacccagttgattttactcctctgcctcaaaaatttatgataccttttttcctaagtttgaaagtaaatagctacttttttctcctcctcctgataattgatatcactcgggttcgcctgggcattgagttgggactttttataattatctttggctttctcaaagttctcccaatatcaccaatgaattgcctattaaacactttcagcttatgttaaggctcattgtcttcaggtaaatttctttaagacccttgtcggctataagctttctctagctatttgtcacagtaagattgaactccggatgatcagactagaaattaaagtatctaaaggcttttacccctattttttcagtgacacaagaagccacaacacacaagcagtaatctgaggttgtctcccaagtaaaattagctgctgattgagaaaacttgtcaatccaatcttcattaggaaaaatatgatctattctcgaataaatcctagcttgcccctcttgattgttagtccaagtatagtttgaacccgtccttttcagcgttcccattaaagcttgggtcagccaattagtagagtcaaatatctcaaccactgtgactttattccttctacttttgtcatcatgaaaaaaaactgcattgaagtcacctacaccagccaagctttagtagggaaattcaaattatgaagaacctggcacacgcttttcctatcttcaatcgaattagctccatagacaaaagaaatacaacaatcatattcttgcccaatcatcttgacatggcagtgtataagctgagaagtttcttttatgatgttcaccttaacaaagtctttcctccaaaccaccaaaattctacattcaattgtagcactagaatagaaatcccaactagtgtatttataaaccatatcactaattctgtccccttttaatttggtctcaagaaatgctccaattcaaactttattcaaacttaaaatatcaaaaaaagtccattgtttctctttattattcaaccctctcacattccaacatcctatattgcaacaatccattatcccaacatggatacaccaactcctacctctcctatcccctcctcctaccttactttaagagcagcaaatgaagttattgtagcctggtgttcctcaacatgacctccggtagaattcttaagctgagacacaactttctttggtgtttccattctttttggacactggattccccaacagcacgatcattcacatcaagatcaggttcagccatcgagccttcttttgtagcttgatttcctctttttactaactcttggtcattatctttttcttgacttccttattcagatcagactttttcttggtcacccctagtttcttctcaactggtatctctgtcttcctgcaatctgcctgaatgtgaccaaatgagctgcaattcttgcattttgtagggagccattcatagtctatagcctgatcaacaagttgcccaacttcattaaagtaccacaaggatctcggagggctttccgaaatatctatttcaaccaccactcttgcaaattggatacgagtcctatctttggtaaatttgtctaccataataggagtcccaattgtgctaacaagagcactaagagtcttgctagcccaatattgcaggccaagacgatggagcctaatccataagagcacagattttactaatcgaaccgtatcaagatcagttgtccaaggcctcactataatcgacttcctatcaaattaaatcatgccaagttccaacacttgatcccgaatagtatcataattaaaattcactgttgtaagccctattgtcattttagaaatctgagcaatgcctagatggccccaaattcttcgaataaaaccctcaaaaactggtgcagggacgttggctctaagaaccatacagatcacaaccgaactctagtgtgcctcttcaatcttcacttcctcaatatctactttaccaattttcaatccattcttaaccaaaagaaagattaaggtcagaatagaatgacttaccattggtgaatttcttccattgagtctgagcacttgcatgaaaattctcttcacgatctacttcctctgcccaatttaagcttctttcagctatggcatcttcatcagcacatagagccttctccgtatctccatcgacaacagtctcttctatttgaatggtgttcacaaatacatccattactttgtccccgaccgaagctcctccatcctcaactcctatcgccagtttctcacccaaaatttgctccgacaatctcgtgattggctttctaggtacccttttcttcttcgccatggagagagaaagagacaagctagattagccttttatt

SEQ ID NO: 310666 - DNA, 607 bp, Cannabis indica
aaagatgaccctttaccacaattgaaacaagtttttatttttatattaacaaactgggtttcatctatttgtcaaatagacaactgcagaacagaacctactactcctaagtaaaatcagaaaaagtagtctctttgaactgctgcatttgaggaaatgatgagaattcaaatcattagattctttttctttgttttagttttaggatggggagaagactgaaatcgtttcagaatatggatcgaaaaagatgtatataaatagcaaactttggccagaggtcacaaaattaacaataaattcagtctggacaactttgtaataaaagcttaaattaaacagccaaatgtttagagtttcagccataaaagaaaattccagatataatagacaaaaatagcatgatgttttccaactttaaatgccatcatactttgatggtcatagttcatgtttccaacaacgaaaatcatgtttgttccatagaacactacagcatcattattttattttatactttatatgaacaaagacaaccttaatctataaccaccatcggaaaatgattcattaagaaaccattcctcctttctcaaaaaaaaaaaaa

SEQ ID NO: 310667 - DNA, 1793 bp, Cannabis indica
ttgatattttgattttttttcacgtataattctatttagttataacctctcaattagaatattattttcttggtcctaagtgtattcttgaatagaggttctactgtatctcttttaaacctaaacatttatttttgagcactttccgaaatatttcatttaaattgagataatatttttttgttttgatttaagcgtttataacaaccatattttacctggactcggaccgaggacctccaacacacacctattcttagctcaagtgatttaaattgagataatattcatctttatatatctaaaattatttctatttctaatcaagactttaggtgtacacccgattatatacaaacattgataaaataactactttgcccaattcaaattactaaattaggtttcttagatggataacaaaatcagaagagtcggtatatataaatgttttcatttacaaaattataaagaaaataaaacacatgggcctccatccatccatatatcttatataaatttaatttaatgtctctaatctaatgtaccacgttgccaccaataattgatcatctgacacagccacataattattataatatatctcacattttcaacgcctccactccacaacactcaaaaactcaaatattaatctaatttcagaattagtaattttcaaataacaaaatcaaacattatttctgatctaccagtcagtgcaccaactctacttcacttcacaacatattaatttcagcatcaaatacactctagatgtgatattttataatttattagcaatacttttttaaaattattatgttaaattatataaaatttaatatttaattacactaattataatattgatatgtttaaatcctatatgaccacttaagcttgttaatattaatttaggtttagattttttttttttaatccaaaggcttagataattgatatgtgtataatgttcatttttattattatttttaaataattccttggggaccaaagacacactatataataataataattaaaaaaaattagtagcgtatacagattagctataataataacatagttacaaaattatcatttttttcgttcagaataaatctctcctctcatctcatctcatctcatcataaagacataaacgtcaattttgctccagaattttcgtttacttccaaccttttcgatttttgttttttttttcttttttaaataaaaaattattatcttttcgcattattattcgttttttttttgaatatggcaagaaaatgttagctgaaaacggtttcaggagagccaatcagatgctactaagaacggaagcttaatcgtcacacacggtttgtaaaaacgaaaatggctacgattcggagaagaaaagctgcggagaacagtgagattagcaaagaagaagaagaagaacataaagacgaagaagagagtgatgatacaaagaaaaagcaaccaggaaaggtacataaagcgaaaaagaagagtgaagataagaataagaacaagtggtcttgtgtggatagttgctgttggttcattggatgcatttgtacagtttggtgggttttgttgttcttgtacaatgctatgccggcttcgtttccccagtacgtgacggaggccataaccggtcccttaccggacccgcctggtgttaaattgaagaaggaaggagtcagcgtgaagcaccctgtggtgtttgtgccggggattgtgactggtgggcttgaattgtgggagggtcatcattgtgc

SEQ ID NO: 310668 - DNA, 1760 bp, Cannabis indica
gtgtgattctttgtcctttatcattggtgtttttctccgtttgtggtttggctttgggttctcctattttggttgtgagattttgattgtaggctagtctcattttgtttgctcatttatcgaatttgttggttggtttgttgtttgagttagtatggtgggacagacataatatttaaaatgacttatggaagactagttcttgtttctacagttgaatgtgccaaattcttacagtatcaagagtctcttaagtattaatcttcttttatcactaatattgttgattcaagtaaatcaaattcgtgtcttctttccttatcttccaaattggtcattgattttggagctacagaccatatgacaagtaattctagatacctttctacaattgaatgtgccaaattcttacagtatcaagagtctcttaagtattagtcttctttcatctattgttgattcaagtaaatcaaattcgtgtcttctttccttatcttccaaattggtcattgattttggtgctacagaccatatgacaagtaattctaaatacttttctaatcttcaacctcacgcttccactactactgttaccttagctgattggtcaccaccttatgttcttaggtctggtacaattaatcctacttcaatgctttatttgcgtctgtcttacatttatttaatttttcttttaactagatctctatcagtcaacttactcatgatcttaactattgtatttctttttcctagtcattgtttattttaggatcttatgacgaagcaaattattggttaaaagacatgaatctgaaggcctctacattcttgatacaccattacctaaatcaattgcttgcttttgtgtacaatcccccttcgaggcacattgtaggttagtcactcatttcttcctctgcttaaaaagctttgtccgcaatataataagttcttttcgttagattgtaagtcatgtcaatttgctaaacgtcgtcgtcttagttcaagtcctagcagtcaataaatgtgctagtattccttttgaattagtcttattcttttgttggggtcctcctatcttgtctaaacttagttttcattattttgttacattgtggatgattactctcgtaggttgatttttataaagaattgttctaaattgttcactattttttgtgccttttatgctgaaattcaaaatcaatttaatgtttctatttgtactttgagaaataataatgtcaaagagtacaaatctactttatttcaatcttatatggttcaaaacagcatatttcatgaaacttcttgtgttgatacactatttcataatagtgtagcataacgaaaaaaaatagacatatttttgaaatagctagagctctcttatttcagacacatgttcctaaaccagtttgggctgatacttttactactgcatgttttttgattaatctcatgccattttctgtttttcatggtgaaatttcttacaaaattctattctccaataagccattatttcctattgagccaaaaaaaaattggtagcatttgctttgttcaagatattcgtccacaattaactaaattagatcccaagtcattgaagtgtgtattccttggttattttcgttttcaaaaagggtataggtattactgttcaatcttaagaaacatatagtttctatagatgctacttttgtggaaaaatacactttatttttcatcttcgcctactcctactcataagg

SEQ ID NO: 310669 - DNA, 1669 bp, Cannabis indica
cacgtacttgtcatgcttcttttatttcttcttgtctttggttgaccccttagagtcgtctttcctctttgagccagaggcccctgggttatcagctttagtcgagacagtacttgttgatatatatttatataattgtgttgtttgggtaggtgacatgacatcttgtataagcttttcttttatttttttgctcttttattttttcactttttcttaaatttttgttaatttttaattaataataatttattattgtagaattagttaattgaaatacattaatgactttttattttttacaactcctattttaatatctaaaaaatagtaagaataaatgttgcagttacaaaatatattatgtattacatttttttttttttttggaaccccattatatgttacattataacttaagtaaatgctctaaaatgcaattaaatagtctaacttaacttaagaaccgaaagatctccctttaatgatcaaaatatgtgataatgtgtaatatataaagagagaattaggtctctatcacataattttgctactataaagaaaaatttagacaaaaatcttttgttttgacaaattcattgttttgattttgatgcaggacttctcatataattatgattttggttctttttatatatgaaagtatgatagtagttttttcttcaataatgcaaagtgttattattattttttttaaaaccatcaaaattgactgaattatgtaaagtttatattatacgttttatttattcttttctgtatgaaaattaaaatttggaatttaagtttattctttaccaattaaattactaagtagtcaccttttctttcttattttcgatttgtcttatcttcatcgttaatgttttaacaagaaaatgtagtattttgagtaaaatgatcaagagagaataataaattttgcatattaaaattattttagatataattatagttatcataacttgaaagcacttctgaacaaaaattgttatgataatttttatccttacttaattagatattggtttttttaatgtaataattagatattagatggagttaataatattgttatataataatttttgtgcttgagttctaacattgtgctatgttaataaatgtaatttttatgtataatagtttttgtatttgatatctaacctggggctattgtaataaatgtagcatttgaattttttgagaaatgttatatttccctaagtactgacaaatcacttcattctatacactttttcaactttagaatttgaagagatgtcaaattcacaattttagaaatgtttcaacagtatttgagcgtataagtatagtatataatattataaatataaataacttttaatataaagatattgtttgtctacaatacttattgcatatatgtttgattttttatttaagtttgaggaaaaaaaataagtaaaagatgatttacactattaaattttttttccaacgtttctatttatgccaaatattggttattagcacgaaagaagaatctatatatctatataattatattgttaaggtatgtgacatgactattagaatatttttatttatggaataaaataaataattaattttgtgataaatgaatattttatatttattgaat

SEQ ID NO: 310670 - DNA, 1225 bp, Cannabis indica
attctacatttctgcacttcagatctgcataactctattgcctattctgagaggcaagcatctagctttaatcttttctatggcttcattggtccgttgcagttattccgaacctaggtattttctttctcccacttcatcccagtgaataggagatttgcacttcctgccatacaacaactcatagaaagccatccctattgttctctggtagctgttgttgtacgaaaattctataactagcaggtacttactctaggagccctcgaaatccatcacacaggctcgtaacatgtcttccagtatttgaattttcctttcggactgtccatcaatctgaggatggaaagctgtacagaatttcagtttggtacccatagcctgctgaagactttgccagaaatttaaagtaaacttcggatctctatccgatataatggactttagagcgccaagtaacctcactatctttttcatgtacaaatctgcataatgatccgctgtaaatgttgtttttactggtaaaaaatgtgcagacttcgtaaattgatctaccacaacccaaatcgaatcgtacatcccgtagttctaggcaatccaatcatgaaatccatagtgacatcatcccacatccactcatgaagtgtcagtggctgtaataaccctaccggtctctgataagccttgatctgatggcaagttaagcaccgggatacaaattctaccacatctttcttcatctctcaccaccagtagtagggtttaagattttgatacatcttagtagtgtcaggatgcattgaatatgtagtggtatgagcttcctcgagaatctcatttctaagttctgcactattttaaacacaaacagtggtcttatacaacagcatcctgctatttgatatcataaaatctttagcttgaccagctgaaacctcttctcggatcttcactaattctggatcaactaactgagcaactttaattcattccaacagatcaaattgtaacgtcaaattatgaagtttgcctacaacaaacttgatgcttgatctaactaccatatcatctgctagctgagataaaatcttaatcatactggttacttgcctgggacccttcctcctcaaggcatcaaccactacattggctttcctaggatggtacaggattccacagtcataatccttaatcaattccaaccaacgcctctatctcatattca

SEQ ID NO: 310671 - DNA, 841 bp, Cannabis indica
aaaatggtgagtgttgatgtgtttgttaaaagagaagaggctcgtgttgatggaaaggaagctatatgtgattggggccatgttgatgatggagttatctggtttagaagttgtggtaaaggagaagaagaatcaggaaggttactggggttgagcaaattgataatggatagaataaggtgggaagaagagagagttgggtttaaagtggatgagattgaaaggcaagtgaatgtgaaaagaacagaggagtttgatggaaaagagtggagcaaatttggatgttatgtcttggtagagaggtttgtgttgatgagagtaaatggcaccgtattgttgactcttgattttaagcataccaaccaaattaggtgcaaatgggaatgagctagcaatatcggtgacacttcaatatactgaagtgtagtttatgttctgcatatttctctgttttttttttcttttctcttttccttcttccactatttaaaatgtataatattcactatttacttattgatatgttaaattgctgatgaaacatggtagtgttgtcatgtgaggattgtattatatttagtgtgtgtataaataaaccatttattgcgagctaagttgattttctatgatttttatttttgaaattcgtttcattttacaaaccagattatattagtgaagaagggattggatctataatatgataaaactcagcccacttcaaacgtgggtgctgccataagtgatattcatccgttacaaaaatactgtttttttaccaaatattttaaaaaatactgggacacggtaaattttacatttttactgtccaagcccattt

SEQ ID NO: 310672 - DNA, 1150 bp, Cannabis indica
agacttagttgatagtattgcactatcaaattggagtaactgttgtggatcaatcagagataattgctatggatcaatcaggtacacatactcaattatcatatactactattgtgttctatgttatatacaaatagatcttgggttaattgttaatttatataacatgacaaaaatcattgataaatgaataatatcatacaggctaaatgacaaaatacatcctaaagaacaagttattaatccatccgaagagtagctaattcatgtgcaaccagatcaaattgttacaagtcatcttaagatgtctaattgtgggaaattttagtaacttgggtaatgttagtctcatctgagcacattaattacctgcatttgatcaccaaggttaacaacaaaggcattagttatggcttccaacatgacccattggcctttgtgttgaacttgaagaccactaatctcattttggattagaagagtgacaaggccatggtctgtatgaggtgggattccgatggctcgatcgggctctgggcaagctggatagtagttggcagccaagagttgtaagccttcatcccaattcattgcctttgaaatgcaatcctcttctagtcctaatgtctctgatattgcttttactactttgcttgctacttctcttgttcttgtactgaactctaaagcagtctccctaaaatgaaatttgactaaatttttagaatatatgtagatagatttttaggttggacacatcacatttactatgctgtaggagtatttttcatttcatatcttatttctttagttcatataatattcatgtatattgtagttctaatatctttttagaaaattctaaataatttatgacattaagaaataaaattaaaaaaaaaatacatgtacatgttactatttaaatcttatatattttcggcgcaatataatttataaaaaacaaacataatgcataatacataattataatatacgatatcatataaaaaaaattgagatataatataaaaaaatatctacaacttaatatgcattacatataccaattttcatcaccaaattttggtgcactataacaatttatgatttcatttacaaaaaatacagtcttttaatgtatttttat

SEQ ID NO: 310673 - DNA, 2751 bp, Cannabis indica
aattgggttccaatagttgtatgcgcgctaagtatgcactgtggagtcaaaactccaggttattattactcatttcatttactatctctaaccacacctatacctatgcataccaccataacacataagaaatataagatgttattccttgtactatcctgaatcaaaatatattgatcaaactatatcggtaatttccatcaatttttatatatgcagatatagaagtatgtttagcaaattatctagactccttgaagatgttctttctaagggtattgttcagcgtgtaagacttagtaggaggggtccagtgctttttcatatttttttttcgcaggtgatctcattttggttggtagggcaaatatggctaaagcgaaaggtgtttggcactgtcttgagaagttctataattggtctcgtcaatgagttaataagctcaaaacctcgattttcttcagcaaaatcttttcccaaatccacatgaggcttaccaattgttggttccccgatttctgaccttattccctcgcatagtaccggggaacagagtcagtcgtggtgcgtgggggctactctacattgacaaaaccctctatacaaggtgccaatggcagatctaccctgggcagtagaggttattcattaggattagttagtttagcagggtcaaccgaacttgttgtgttggccgagtttattgagcctgccgagttggcaaggttggtaggattggctacatccattgagttcgtggaaacgctagtggtgattggaacagaacatcaggatcaacagttatggggtcttgaggaagacccaataaagtagaagttgtagctagagttctccttgttacatccatagcgattgatcagatcgatagacaacgctctcaatgaaagtaccaaaatgttgacctcagatttggtcaactgacagcagagtcttatttatgattggaatcaccacgtgtaagcaattagaacaagtaaataaatggacacaacaattttatagaggttcgacccccttagttagcaggtaacgaccgactccccttttaattatattgatatgagagataataccacttagatcacaagtgttgtaagttctagagtggctctctttgaattataatattgaaaatgtgaggcatatctcaagtaaatgagatgtggaagacttaatctctactacattgtaagtggcgtgtaggagagagaggcgtttcgaatgcttgaacttaagagcttaggaatcaaaacttagacctttttggtttaacctagtgctctttatatataagagagcttacagaaaatttaagttaaagtaggttgatatcccctaaaatgaggagatatcacctatttattacatattaaaaatatataaaaataacctattaattattcctaaagaatatgtaaatatatgatgttaaacccctatttttgtgggttgttaaagtcaattcgtagctgacagtgtctgtttaagttgaaagttatagagacaccaaaagtgtctacaaaagagaagctggtcggcctaccatttgttggaggctggccggcctatgcttcactatggtcggccaggggtggtctggccagacccccatggttggacattttgttgtctttttgtcctgcttgaatatttgaactcttcgtcaattggtacgttgtgcatggtgatttggtcctcttactgataggttgtactccctgttacatcaatcttgcctatgtggacatgccacgccacgtgagcaaaaattgggataataagcgatacccaaaaagccaagattcctccaaataatgtttatcctccctgcaccaatttttgtctccatcatgaagaaaacatcatggtcctcatcaaagacaagctcgcgagagccttaactacctgagaactccttagtcactggaaatgccacaagaggaatcgcataagtaactaagatgttcaagcattatccaatccaaccacaaccaaggaagatcaagaatagattagaacaactccacataaccaaaacattgcaaagtaccacaagaaaataccaccaacaaaagaaaattcaatcaagagaaccaaaactcccaaaagaactcacaggagtagaagcacactgaggccaaaaaaagaaatctccaggatagccacaaaagaccacatacagaaaaggggaaatcatctcacagtttgaaccccaaaccgaaacttgagaaagccaaaaccctaacaagcgagccttaagacccaaaaacttgagaaagaaaaaatccattccaaaggctaaacagagaccgtagccatatagaaaaataaaacctagcatacccatacgaaggaaagaccgccatacagagatgtgggtgaagcccacttcttagaactaaagcttcaactgtcgcaagaggccaagctccactgagaaaaccaaaaccatgagatggaaaacacgactgctcaaatgagagaaaccataataaaaactagatggtgactaaactcagataagaaacacccactaagaaaaataggactgaggccgacatagggatgagattccactggaaacaactcgaaaatccctcaaaaacgagtcttggaagtcgaggagagcataatttgcacaaaacgacaaaattcaagcaaaatacattgttaagttgggtattaaattttgaaaaatttacaaaatagaccaaaaatatttcaacacag

SEQ ID NO: 310674 - DNA, 725 bp, Cannabis indica
aaaagaacaaaacaatacaaaaacattcataaagaagtgcgaagcggaaaatacacacaaacatgttctaaaacatttattataaaaaagtctagaaacatcttcaaatttgaaataaaatatgacctttccataatttgaaaggcaaaattacgagaaacggttggcgggccgtagtggagtactatacgtggtccatccaagataagtttgggccttaagatcaacagtgggccacttatgtcagaagtccacttgtcctactcctacccctaatagtgacgtggcaaccaaacggcctctcacacatctctagactatacaaccacacaatgacaaatcatgacgacacgtggacacccaccatcgttgcgtcggttacatttctttgacttttgtcttagcttttttctttgctctgactgattctcaatcaaacggttggtatttaaaaatcaaacctaatcagaaatatacgacatgtcgttttggtaaagtcttgaaacgacagtcactggccattccggtctcccgttgcccttccattttatatagtatcttttatctttgttagctcttctcactctctctcagctactctcaccagaaccttcttcaccaacaactctttctctctctcagcttcttcttcttcgatcatcatgggtaatgttactggttttctccagcttttcgtttctagattatgatatcttatccatttt

SEQ ID NO: 310675 - DNA, 1344 bp, Cannabis indica
tttttttcagtttgaaagagaggaagagagagggggctgggtccgattgggagagaggggggctgggctgggttgtgcgtggtcggacggtggtcggaggctgctgtcggtggtggtgggtggtcgtcggtggccgggcgtggtagggcggcgtggtgttgcgtggtcactgagagggagagagaatttttgatttttgattttgtttttcaaatgggaggggtattatggggaaaaatcaaatggagtcatatatgggcaattttaataggtatagatttagggaaataattttagagatttttatggatagttttttaaatttcacatgtcatatacctcaaccaactaagctattacaatacacttaaattttatttaaataaaagcctaatgattttttttattttttttattttgtcgctcctaaaaagtgtgtgtcctaagcacaggtcaaacccgcctatacctagggctagccttgccttcgggtagcatcgctcttgggaaaattatctccttgaagatttccatttgttaaatggtgagataccctagttggagaggaggtggtgcatttttatgatattttgctaaacaattagaaaagtggggcattttgtaaaatcccaaactaaaagggtagatatgcaaaataaaagatgaagttggcccacctttttttttttgaaagatgaagttggcccaccttactagctaagacatgtgaagaatgatataatctctccaactttattctattttctttttatttaaagaaaaataaatgaataaataaataaaaacttttcttcttttcttcattttattttattttattttaatttacagttttcaacagttaattagttattgcacaaaattgatgtcgttttcaaatattagccctttaatgccattgccaacagtcaaccaacttctgattgattccattatttagctacataaataaataaataaataaataataacaaaatatattatataatatataacaagtgaaccgtagttgttagtaagtttgtaatatacttctaatatttatatattaatagcgtaagaataataataataaaaaagatacactttacttaccaattgctacactgtaaagcaatggtatataattaagatccttaacaatatttaaaaatgttacatgaaattaaatactaattataaaaaatttgtgcattagatctctaaagaatcattttgatagatttattttatttttcttttagtttagtctattttttttttttataatagtatacgttcactaacaaaaaattacaatttattgtgactaaatgtattttt

SEQ ID NO: 310676 - DNA, 1243 bp, Cannabis indica
aaataattcttgtgactccaagaaaatatatgatggataataaaggcatacaaagaacaaaagggaaccttactctaaaaatggtttttagcaaaaaatgacgaaagtgatgttaaagaagaaaaggctattttatataaacctcgtaagaaccgttgatcaacgatagttaactcaagactcaattgaaaagactacattaattacttgcagagtttttctcagaaaaatacaaccaccaaaaaatgaagcttgttcaataagcataaaagacgacttatctctctaggtgatgattaaaaagtcttttttcaaaactttttttttaaaaagtaccttttatgagaaaagaatttttaggggacagttgttatacccttatttcaaacaataaatgaaggactctatttatgtgacacgtatacaaatgaagaacattaaattatctcctcgcaaatgaaagaacatgcatgggtcttcttagaaaccatcaagtgtattaagtgattgatgagacgtgtacaacatcaaaaatgagaatctcacgtatcaaaagaaagaaggcatgaccaacataagaagaaagacaagtttactgcgagattgaatgcattcgacttagtttgcacaagatatacaacttgaaaaggattacttatgaggagaggaattcttcatccacacttcactctcttagcgatcagcgagaaatgtttaatccatcctagtgattcgcgaggcgatacgcattcggtacacatcaatctttcagtgtattcttcgaggagtaaaatattaaaatgaagctgctcagtgaaaacgtgataaagatctagatcatatcaaaatagttattcattttaaatgttggctgtaaaccgttcccaccaatttatagttaaatgaaacatggagaattgtggtactaaattaagtacacaacgaaataataatttatgattatcatcataccacatcctcaagattaccacatatatatattaaatctgaaattaaatagacaaaaaaaattacctcttgaagcctattagtgtatccttgtttcttttcctatgttgtatccttggatgatgatgaagaactcccaccatagtgttaggttgtttttagtattatttttaggttaatttttagtgtatttttaatttagttctactcttgtttggagcaattttacgctttttatcttttattttcgcagatttaaaatagaagaagatta

SEQ ID NO: 310677 - DNA, 2031 bp, Cannabis indica
aaaacatagtaaaaaagtaaaaaataccgcctggtaatatttttgtaaataaaataacaaaagttagtatgtcatgtaaattttcctattttaattaccagtaattggtaattaaacttaaatgattgttttgatagatctcttatctgtttagacatacagaaaaaaaatttagtctatttttttcatgatcgtatactttatagttatttaggaccacttgtaaagtttcaaaaaattctaaatagtttatatttctgtaaagacattctgtttataaataaaagttgtgggatttgcatttatgtttataaataaaaattgaatattttgatatgtactatgcaaaattattgatatttaatattgaataatttgtataaatatcagaaaatttcttactcatacatgaggttgtgacttgtattgtataattaaaatcatttagccataaataaaacagtcagtaacatattaaagatatggaatttttaatcaacggttgctagtatgattcactgatgcatgttattcggtgcaagcaatctcgattcgaattactgatgcagtatgatatctaagtgaaggtgtatataataaagattattcgaatcactctcataccagtttttagttttgtggtactaaatcaggtatgcaacgaaataataattatgattatcaccgtaccatatcgttgggatcaccacatgtatatatatgtgaaatctgaaataaatagacaaaaagaataatttatctctcaaagcaaattagggtattttttttttcttttcgtaagttgtatcctcaagatggtgatgaagaactcacaccgtgatcttctgaaccttccaccacacacaagaattagtatgggctaatagtataaattgtatattaggttcttatttttgtcgcaacacatgagcaagaactctgatgatgatagaaaaaagtttaatctaattaaccttttttagatttcctcaaatttatatgtatatagtttttaggttttatacgacatataaaacaaatcatgtagaaataaatttattgtaatttgaactttattgggttcaaaattgagctacaaatttacgacttgttaaatttaacatagaaatcctaagttttgaaatttaaatttaaaacttatatctaatgaataaaattattatttaattattttatttaaagttaaattaacatgagattataattattttattattttcttttaatttttattagatttaattatacaataaaagataaatatcacacactcttgttacgaatattcagagaacttctaatcctaagaaaaattaaaaaactacaatctcaatgtctttctcaacttgaatcataatttttagagaagatcctcataaaattctataccttacaagcaaggtcggccatgtacacgtccaaaaagtgctgatgcacagggcccaaaaattaaaaaggtgttactttttatatattttttttaactcagcgttccactaatgcaacatgcccaaattaaaaaaaaaagcaatatattatttttttttcttttattgatttcttttccttatttaatgtcccttttatttttttattttttttttacattctttgataactaaaatagtgaatagagagagattgactccatccaaataaaccaattcccataataaattcatttttaatttccatcaatactatttattattcctcttgaaaccaacagataaatttttgagattatttcacaaatacacaaaaacaacaaaaaatacaaaaatacaattttacgaaattttaaataattttacgaattttttgattttatttacagaaaatacactctttttatgttatactcttgttaatttgttgttgattttttattatctatatgttattttttgttgttgttttgatattatttaaatgttatttttatgttacttttatgtagtaatcttgttgtttttgtgttatttcaatgaaaacccgtaaaaatgtaaa

SEQ ID NO: 310678 - DNA, 889 bp, Cannabis indica
aactaaagaaatttgttaccgaaaggacgactctgccatacaggatggtggcttgtctctagaagatagaccatcaagcgatttctcttgggaaaggcaaacaagagggtaccctacatttaagcaagagaatgaaggagaaagtgatcaaatcatggaagataggttttccgatgtaactggtgtattgcaatctactgttgtaaatgaggacgatgcactggctatgaagttatcatcatcaattatgatgtctgagaatgagagctccacctctaatgaggattcagcttcacatctttccgcaaaaggttagtattttaatttattcattttattttatgatctgttgtttctgcccctactttgtttcatttaatccttggacaattaaaactatttaattagaatgaatggttgacatatcactgacactttcggttctatgtttctcagctgcaactgttgcttctcagtggttggatcttctacaacaagacattaaaggacgtctttctggtaaaccctttatctaaatattttgtagtgctattgtactaatggcccataaaccatattctcatgccttgagtggaattttactctattatgttgttgcattgcagccctgcgacgcagtaagaagagagttcgagctgtaatcactacagagttgcctttcttgctatcgaaggaattttcacttgatgaagacaataataatccacatgcaatgaaatgcacagcagcaactgtcgacgcgcatcgagcaaggtggggtaaactgttcgatggaatggataaagcgctttctgacgaagagaaacacctggttagttgctttcaaagtttcagttgttagctttactttcgaagtctcatgtgttgt

SEQ ID NO: 310679 - DNA, 530 bp, Cannabis indica
attataaggtcaccaaagtgtcattaaatatgtgtttttatttagtaaattttatattttatgtttcttcatataaaaaatttattttattttttaaatgattcaaatttttaatgtattttattaaaaaaaactgataaaataaaaataattttggccaatgacacgttgtcagctacgtctttagttggaaatgattaacgccacaccaaattgaaggttatgaactaattaaatttggttaatttggatttttgtccattgaatattaaagttcgggggcataatttagtacatggacaatcgtcagttaagcaaaattctatgaaattggacataagtccttaaatctaacaatttcaatagtttaggagaaatttttagccacttgaaaagttaagggagcatgatttggtacatgtcaaagttcaggagtaaaaatcctaattagtcattaaatttattaaagggatagttatataaaacactattttttgaaaaattttatatttttacgtttaaagtttttt

SEQ ID NO: 310680 - DNA, 1023 bp, Cannabis indica
ttttttagggtttagatttttggtttaataataaattttttaatttttaagtatataaaatcaaatttccctaaaagaggaagtgggtaccatccatctcttgaagcaaataatttgacctataaactcaaaaggcatttacttaaaaaagtaggatttgattttagggtgcttaatttgctttcaatagccagacttgaatgtactctttcccttgaaatgatcattcatcaccatatacctctttttctgtgtccgggttgatgatgcatgcatcagatgactcatatgtgtgattgtacaaataaatattaaatattaaatattttataattacaattattcttaatggtaatgttagatcccttgaatcattttattattagccaatcatttcttctttcagtttattaaatactctcaactattattctatttctatataactttttaaatttaaattttaatggtaaaattctccaaactactgaactatattaacaaatttaaagttacatctatttttcacagtaaattttgaaataataatattaattataccaatataaatgtgtaagtgtatacataaatagtctatggtggcctaaatttgttaacagtttagtagtttagaagttttaccactaaaatttaaacttaaaaaattaaatgcaagtgaaacgataattgtaaaggtttagccaaaaactccatcaaacttgtctttctatattttttcaatttcatcacaaataataaatttatatatatttttctttgaaaaaagttaagtaatttatatatttgtatgacaaagaaagatccatcatttagaaataagacaaatttacacaattctaaattttattaaattattatttattgaagatcatacatattatatgaaatttacatttcaactacaaaaaatcaagttatttagggattgattagtttgtgattcaaaaattgtgttttttaaaaatgtgttttggaaacaaaatttaaattttgtaagtgaaa

SEQ ID NO: 310681 - DNA, 1987 bp, Cannabis indica
taaataactataacgtatatgaccatgagaaaaaatttgactaaaaaattatttcggatgcttaaacagataggggtgcatcaatatatctattttaaggggggtgcattataaattttttttaatttatttatagttgtaatataattgtcataagattattttataatttatttatagttgttgcgaatatttaatttttttattattttttttaattattttcttataatttgatgagcaataaaattttagaaaattaggagggcaaattacaatttttttttgactgaaaatttgttgtattattaaatttgtaaattcactaataaaatagcatgaaaatcacttgagataaactccttattgaactaatgaccttaaaaaaaaaatatgcagctcaagtcaaatacttaactatcttatttacagatcatttaacagagacaataaaaatattgtttaaaaaagaaaataaacacttataattagaaataatcaacccaaacaatgaattcttttagagtgtataacatattgcataaatacttaacaatcaatttcaataacaatttgagaaagaaaaaaatacaacaaatattctttttttaccaacatttggggcatatgggtggctggtttcctcccataggtgtattgaggtatattttattttatttttttgtatgtttttattatttggattatttgaatgtgttcattaaatttttaaaaaatttaaaataatttaacacactaaaaataaaattaaaataatgtgtacttatgattttatgtacggtgtctaggaatcttttttaatataaatttatgtgtatttatatacattaccaaattagttctaagattaatgtctaaaaccaaggaacaaacaacttgaaaaggaagaatcaatatctaccaaattattaataaatattattgtttaagaaaattaactaatgggtaaatattattttatattttgtattttttaaaatttgcttattagataatttattttattaaataataatttaattattgtatttttaaaaatagcacaaaataatattttgtgattaacttttgtcaacatcaaacataataataataattttacttgaagtgttataaaaattaacttcaagttagttgtattaaaaaaaataacttactcatggtattatttaaaaaaatacaaaatttaaattttcaatttaacaaaaaagaattgtaatgactcttgcaaaatacataattaaaaatattttttgcccactaaaaattgttttttgttttttaaaaaagtgaggattaattttaaaaaaataatttgtagcgtaaatacttaatgttaactctatatatttaaatttaattttttcacactaataaattttggtaagtattaaatcattatatacatgtcattttttattgatatatttaaagaaaaaaaaataatttaataagatggaccaatgttacaatttaacttattattagatgtaaattattcatttaaaatatatatttttttgacaaaaaataaaaatatatttaatataaaataaaaataaaaaagcttttccataaaaatctcatttgtaaattactctctgtagcccttgacactagtccttcttcttcaccaccacacagccggaccggcctcgctccggtgaccaatccaccaccgccaccggttctgtatcccacgcttagctacctccaaatccaggccattttgaaccagagaaagcttgtttagcgtagcttgtagtcagctcagaacaggtatgtaaaagagatttgaataaatttttgaagtccaattgtttgatgaaagtcctcaaagtagtaaaatttatgtgtttgatgtttaatcttcctttcttctgtggtgttttcattttttttgaggttgttttctctatttgtgtttggtttagtataagtgtagtgatgatattaggatttatat

SEQ ID NO: 310682 - DNA, 875 bp, Cannabis indica
atatgcatgcttacatgtttagcgtacatgttttatagttgcctgttagattacatatcagtaagagcgatattagcgtacacagagctgcactgaatatcgacaaatatatgttaggcaaattctaaagccattagttcaacatatcaatgcaagtggtattgatgtacgtagagttgcgctttggatactgacggatatatgctaggatttatcatacgaacgttctagacttagtacgtgttgaacgcgggatagaattgtaatttggtgtatgagcgccttgttatgacttagttatatgtttatgattatgctttccttactgagtttttttgacttacagatattatttgcatgtgcaggtaagagccaggactaaatcagagcgtttctagagcttgatgaagattatatgtatcaagacagttagacctaaagtgtttgggtctttgggatagtttaggttcacattttgttagtcgctgagcgacaacttttatttaaaaaatattttgaaaatagtggtaaacttttgataagatcctgaagttatgtaaattatgtttatttattaaagtttaagtttaatcaaaaagtttaaattaatcacactttttaataaatcttttgatgagtaaaggcctgcatagtaattagaaaatattgtggtgtgttacaaattggatatccaactgtttgtaattagatttgattggattggtgtaaagtaatttgattggtttcgatgtggtcgacaagtagttggatctagtatggatcgttcatggacggtaattgggggcgactttcttagggttccctcttctgttagacatttatatgaataaactgaaacatatatgattaagtat

SEQ ID NO: 310683 - DNA, 1625 bp, Cannabis indica
attgcatgttactaatactatatgaaatatctcaatttgtattatctattaataattacaaaatgaatttaactctaaatattaatttttaatatatataaatctatatatgtgaaatgaagacgaattgtttgttacaagcacatcattttgctataaatttacttttagtcacaataaaatttgtgactaaaattaaaacagttgtgactaattataaattattattctaatgttgtgactaagaggtctatggataataatattagtcacaaaaatcacaatttattatgacaaaatatatttttagtcaaaatatttgttgtgactaaaactaaattagtgacaacttctattgatatactatgttttagtcacgaataattttttgttcacaaaatcacttttagttacaaaaagtttatattctgaattaaaaaaattatcattttaaggttagtttttttttttttttttttttttagcattcgatctattttaaatctacaaaataaaatgaaggagaattggaattaagtttaaatataagacaatttacgagatggtctaacatttagatgattcaagcattcaagctaacaccaatattgatgaataaattaaatatgaattttaagatcatgcaaaagaagaatgtcctcgattaaagagagatattgtcgttgtttagattctgtttgtttggctttacacagaagaagatgttgaaaaaaagaagttgcataacaagataacgtgaaagaaaatgaagaattaatgtgttccattcttataggttcatttaaattcgatgatctagcggtggcacagacgttgaggtaattaacttgtttttatagaatttttctccaacaaaaatttggatttcaacatgagaaagaaagaattggaatgactggaaaaaggaaggaacaaagaaaataaaatagtttttttttgtcttttttaattctttcatagtgaacgactgaacgccgtaaaaagagtcacaccggtgtaggtcccactatttagtagtgattgacccttaaataattttaaaaaattttataatgtacctccttaaaaaggatgtactgatatatatctatatccgaaataatttttttgtcaatttttttctcatacccatataaattatagttatttaaaatatcttacaaaattttaaaaaatttggaaaaatttaacacgccgaaaattacgttcaaacagtgtaaaatagattgtttgaatattgttttctataatgtaaattatttcgagtttttcaaaattttgtaggatatcttaaatagctataacatacatgaatatgaaaaaagtaagacttaaaaagttttttgatgttaaaacaaataaagagtgcatcagtacatcccttttaatgggtgcattgtagaataagctacgagtgtgttttaatgaataagcttataataacaaaactcaatttagactataaaaaaaaagtatttaattaaaattttgataattaatataaataaatgggtgattctacaatgcacctccttaaaagagatgtactgttgcaccttctactggtttcagcatccagaaaaaaaaaattagtcgaatttttt

SEQ ID NO: 310684 - DNA, 2247 bp, Cannabis indica
ggtgagttcatcacttccaagttttctatcaagaaatgaaaccttgagctgatagtccctttgttaagcaatcagcaacttgatttgatgagtgtatgtatcttatgtcgagttgcttgcttaacactttgtcacgaatgaagtgaatgtcaactttgatgtgcttagttctggcatggaaaacgaggttgggaatccagggcattttctcccatattgtcacaccaagtgatagccgtgggtgttggaaaatttagttctttgagcatagattcaatccaagaaatctttgctgcaacatgagctaaagcacagtatttagactctgtgctagaccttgcaacgacaggttgctttttggatgatcatgacaccaaggtgttcccaaagtagacacaatagccagctattgatcttctatcgtctagcaagcccaatcggcatccgaatatccagtgatgtgaagtggctcatctcggcttatatggaagcctttatgtattgttcctttcaagtatctcaagacccgtttagcaccactccaatgaacagttgtaggagccttcaagaactggctgagtttgttcacagcatatgagatatttggtctagtgtgggacaaatattgtaggccacctattatacttctatactcagtaagattaggcagcaactcaccatctgttagggacataggtttcccaactgtagacttcaaagaaggggttggacagggctttatgttagtgaattttgttcttcaaagaaggtcttcaatgtatttagtttgagtcaagtaaagccctgtttcatctctgtagacttctattccaaggaagtaatgtaaagagccaagatctttgagtgtaaatttcttgtttaattcaacaatgaaactctttaattttctgttgctgtttcctgtaactataatatcatcgacatatatcaatgcaatgataatatcagttccatgcttgtagaagaagagtgatgaatctgattttgaatttttgaattccaactaaccaaggttgatttcagcttgtcgaaccaagctctctgagcctgttttaagccatataatgacttattcaatttgcacacatagttctctttccctggttcctcaaagccttgaggttgcaacatataaacttcctcctcaagtgttccatttaggaacacattgctaatatctaattgtttgatttctcattctcgagtcacgacaatagttaaaattattcttactgtagaggccttgattactggactaaaggtctctccaaaatcaatgcctggcctttgatggaagccttttgcaacaagtcgagccttaagtctctgaagtgatccatctgagtttagtttttcacgaaacacccatttgttgccaatcaaattatgtccagcttttgaaggcacaagaatccaagtgtgatttgctttgagagcattattttcacactgcatagccttgttccatttaggatgtaagagcttctttgacatcacaaggaagtgttgttgctggtttccatgctgtctgtcccatgaaaactcgattaaaaattcgtgcttttgctcgagttatcatgtggtgtccagcagcagctagtatatgaatgtctggtgtaacattagtttcttcagaatgagattgaccagaattcgactcattgatgtcaatggctattcccctctcaacacctgaaatcgaggaactagaaacaacagcaggtgacagatcagtaagagtagagttgtgagaatttacctgactgtgtgttggagaggaaggtggttcttcaggtgtgctcaaggatgaggggatgtggctggaatagtccctgtaggaagagtgaaagaaggtaggatagaccaggaagaactttggatgatcactggtttttcttgttgatagttatttagaaaaccaagtttaaaaggaaactcaagctcattaaaaacaacattcctagaaatgtagaattttccagtaggagtaaggcatctataacccttatgagactcactataacctaaattgacacacttcaaagaatggaattggaacttgtatgtttggtatggtcttattgtaacgccctaatctataggaacgccacgtgtgtgaatttataaaactagtttaatactaatatattaattaattattaaaaactgtgaggataataaaaacttgactaaaataaaacactaaaaacggacattataacgaca

SEQ ID NO: 310685 - DNA, 1490 bp, Cannabis indica
gatggtttgatatttttaagattaatatttatagttaaatttatttagtaactactcatataaatatatatatttatatcatattttgtactttaatattttaattaatcatattattctaaacttttctcttcaaatactccctaaatggtatatcacttcttaatttattattttggataaaaatagaagaggaagaaagaagaaaatcattatattgaaaagtatacgaaatattggtatttacttaggatgagtcatatttcttatagagacaaaattcattagatttttgaaaaatatccatgacagacagacagctaagtcaatagtcttcggtagctataatcatggagcaacttcctacattaatggccatatatccatcatcaattttaatacttctaactacaaacaaaaaatattaatatatgtttaattacattatagtttaaatattaattactaataaatattatcaaataaaatattaagaatttatgtgcaatcaaggtcggctttgagattgagtggaaaaagtagaggctttttcaattttacactataaaatagacttttttttttttttttttttgtcattttttacagaattccacataaaaattccgataacaactaacagagcaacctgaatcgtaatcaaaatctgtatagcaactcacataaaacccactagaaaaatcaccagagcaacccaaactgcaaattaaaaaaaaataaaaaatagtatatggggtagttttttaaaaaattattggcctttcatttaaaaaatagggataacttgaagaatacctgttttttgtattagtcaatcaaaactaccagcaaactatattcatttaaattatacccacttttataaggagattgcctaatatacccccacattaacattaaagattgaaaattaagtctttctgtttttggttgaagaaagggtattataggaacatgaactataaaagtgagtagaaaaaatgaaatattaaaaaaagggtaaaaattaaaatagttaacttaaagtgggtacctcacgcaatttcctctaaaaaatatgtattattttcaaaaactactaaaaaaatatgtataatttaaatgaaaaatatttttttggacccttaaagctgggtgggccctaggtgcctaacctgccttaatctaggggtaagttgaaaaatacctcttttattaatcaattaaccaaatttacctctaattttatatttatttgaaacatacctctttttatatgtattgtacccaaaataccctgacataagagagtcacatggagagtatcttgaagtgacaagggcaaaattggtacaatgtttaaaaaagaggtaaaaatgatagactttaaaaaagaaggcaaaaataaagaaagacaatataaaaaggtatagagtgtaattaatctcctaatctaagtccgatcttatatgtaattattatctctatat

SEQ ID NO: 310686 - DNA, 687 bp, Cannabis indica
gagtctggtctcaagtttctaggtgagagaaatctcactataacaattttttaatatttttagaagaacaattgcttactctaattttcatacaaattcgcacgtgcgtagcataagtttttcacctagtgttaataaaagtgtatgatttatatcgtttttgttatattttgacaaaacaagattactaacaattatataagaacttggtcaaaaaaagaaattaaataagggtaaagagtgcaaatgtgtcgataataaaatgagactttttttttcttttttgtcttcaaaggattaacaagaaactttgacaattagttttttcttttttaataaaatatattggttaattaagatttttatcctccaaactttagcatgtactaaattatgccctctgaacctttaagatcgttagaaatctcccttgaattgttaggatcgttggatttaagaacttttgtccaattttaataagcaaagtcgaacattgatgaaagtttaggaaatatgatttggtacatgtaaaagttcgacaaacatgatttgatagatatcgaagtctggggagcatgatttagtacatagacaatcatcgaattagtataaaatgaaatgaaattggaaaaaaatcttcaaatataacaatctcaataattcaaggggaatttttaacgaccaaaa

SEQ ID NO: 310687 - DNA, 1156 bp, Cannabis indica
tattatgccttgccgtaataacacattaatataccttcacaccatctatatataataaaataaaaaattattaaaaggaactacgtgtctaacacttttttcagtgtcatacatattgttattgctgtaattacttatcaaaaatattaataattaattgtacggtgctatttataaaagatattgaatattactagtgcacaataacaatccttgataaaatataataaggcaagaaattaaagggtataaagtgaaagtgaaggaaactcatcatcataacatctcattttgtacatatacaaacaaatatattattatactaccttttatatgcctctaacacattgtgaagattaagaataatatttcacttttttttttttttgtatcgtgcgcccaaggaaagaataatattaactctctctatatatataaatgatacaaccacacatacaaatatagtagttaattaattaatcgatcgatcatagatcagaaggggtacgtaattaatggagatgaagataagaggaccattgatcataattaatgtcattttgttcaattattgtttgggtgtgtttttgtttgcttcacttggcacagctgaaaaagttatcacccctcaaaacaaggtacactactcaactatatatatataaattgttatcttatcacctagctagtaataaccatgcatttacatatatttgcttcaaatataagaactacctcctcgaactatataaatatcttacaacatcatgtatatatagttgatctatgctatatatgtatatattttcttgcttatatatattttgctttgaaagcttctacaaatacaatctggttacctgataatttttcatgtattcaaaattctctattttaattgatgctaataatattatcaatgaattttttagagctcggccttgaatatacatcttctttctaaaactattttctcaataaatatataaatatatttaatcaacgtataatgcatttacatatatggaacactttaggttaattgagacactaattttgctcatactataagaatgtgtgacagtcagtagtcccgtgatccgtaaggggaaataccgggtaagctgtgcaatcccacaccgcctggggaaggtca

SEQ ID NO: 310688 - DNA, 941 bp, Cannabis indica
tcttttgtttatgaaaatattccttttataataaggcttaattagtatatgatcaatctcaatggtaataatgtaacttaccatatttgtcatagtttgtaatgagctccaaaactagatcataaacattggcatagataaaagtggatcctggtagagtttctgttaagtcagtaagcaactgttttaacctcccattatattgaatagccaatttatttggcaattcaacacattggtctttctttatttgatttatggtcttttggtaaggtatgcaacctattggaccaacatttcccaccacaaatttccgagcatccaacttgtacagtctctgcatcaccaaatcaaacaataacaaactgtttttaaaaggagaaaaataaaatgaaacatgcaccaaatatagttgtgaaaaaatttgtagtccaccctaaatagatgtttcgatagatatcttatttacaaggcgggttctaagttacgtgaaacgcaaaattaaattttagaaccttatatataatttaattattatcaaaaagactttttaccactacaccaaatattatttattatattttcttattatttaatataatatatattaataatttttttttacaattttgggtcctgaacgttcgagcgccagagacgcacgtctgactcgcctaccctcaggccaatcttgcctatttgtttcggtatccaatttttttttaatttaattttacgttctagttatttataatcaccaataagatttcaaaaaattataaatagtatacatctatcatgccgaaaattttgaatgaattaggatcataagtgtaataaaatatttgaactttatttttgatactgtaaattattcaaaaaaatttaaaaatttataagtgatcctaaatatttacaatgtatacatttataaaaaaaaa

SEQ ID NO: 310689 - DNA, 1601 bp, Cannabis indica
gtccatggtggtcgtgtcatggggccaatcattcctacccgtggtattttccaaggtgaccctctctctacttatctctttatcatatgtgccttcggttctcttctttaatacaacggtttgaatctaatggcattttataaggaatccgagttgccaatcgtgctccctctattactcatatgctcttcgccgacgacagctattttctttgtcaagttactcaaggggcggttgataacctccttaatctgcttcattcctttgagagcacctcgggtcagaaagtgaatgctaccaagtccaagatcttcttcagtcctaatacggccccctctccttaacaatctttacaatgttcttggtatgatggaagcttctgaaggcagcctctatttaggcttgcccaacatcattggccgtaataaaaatgctattcttggatttatcaagaataaagtcataaacctccttaacagttggcatgtcaagtttctctctagatcagacaaggaaatacttctaaagacagtgattcaagcactccctacttatgccatgagcgtctttttaattcctactggtacttgtcaagagattgaaaagctaatggctcagttttggtgtaaaacaagtgcaagcaaaggcaatggtatcatttggatgtcctaggatcgaatggccactcataaacatttgggaggtgtgggatttcgacatttaagtgatttcaatctcgccatgcttgctaagcaaggttggcaaccgttatgtaatccaagcacgcttgctagtcgggttacaaagcacgatactttcccactctgactttctcaacacagaacatggctgcaaccccaacttcgtttggcgtagcatttggagtgctcaaaagttataaacttggggcccatcgcaaaattcggtcaggtacatcaaccagcatattgcaccatccttggctccctgataagaatcaaccatatgttacaactcacaatcctagtctttacaaccagcatgtttcctccctttttttccactgattcaggcagttgggatcacgacctggtccttgatatgttcaatactcgagatgctagcttcattctcggcctcccattgagcatcagcgacgaaggcgactgctggtcctagaccggtgaagcaaacggtagcttcactgttagcaatgcgtatttgttgttgcagaatgattaggaaccacgacccgtggtgaataactttggtttttggaaaaatttatggcagctcaagataccgccaaaagttaagaacttgttgtggcgagcattgacaagtgtatttttgttatgtgtatttttaaaattttataaattaaagaaaaccacttattaatttactaaaatatatttatattaatattgtataaatataatagaaagttctttaggaaaagcaaaaatcccacatcgtttagaaaacattaagaatgttgtattatatgctatatgaatgtgtagtaatttttgtgaatgttgtataatgggtgattaatagtattaatctagcccacatagttattttttttaaataaaatatatattattttattaatt

SEQ ID NO: 310690 - DNA, 1482 bp, Cannabis indica
tttgcctttatctctttagcaggaaacaatttgtttcccacctattgatagacccttccatcaatgccggtgtcagagaggtactcaaacattttaaccgctctttttcttcatcatgctttttcatcccatccatccaaatggcctataaaagccaacacttcccccaactgggtcatttctattgccttttaatttttagattttcaaacccattcgacaagattccagacgcccctgatttccttctgctcttcctccaccgttgtcaggcaaagtactaccatcaaacgacgtcttcggcccttgccttgcctttattgtgtaagttctttctgcatatattctttttttcatctgctagggcaagtagtgatagtaatgtgtatgttaatctgctttgtttgttttcctcaaaatgacggccatggtcgctattagtgtaacgcctccttcggtgggtgtctgatgacacgtgtctttctttatcactatattttatgcctactatttttattatatatgtattgcttctctctgttttctgaaaagaaggtcaaaatcgaagagttcttcgtatgcccctttctggtagttcgaagctactcttgcacgccttctatttttttcatttgatttccctgtgtcgcttggatatttttcacttgatgcctgtctttgtgaatcgtttgattccttttgactgtcatccagagggggcctctttccagcggttaggggacccccatttccatttttgacttagggtttgatgtgggggataattgctggatttctttttttttttcagatgaatgaagtccatcgtgatcttcacaatcacattttctttgggtttgaccaagaaattcttgatctctaccaagctgaccctatgtccacccccgcagataccagagcaaaatcttccaagaaggggccaaggaagttggccaccttgaaggaggttatggagggcccaatcatttataagaagttcgtgtttcattccaattgttgggacgctgacgaactctattcgacgttgacttatgcccatcagttagagaagattgtcaccgtggctgggattaagccctccggttcaagcgtataccactgtctcccgagggacgaggagatgccaaaccataactacaatggctcggggcttggagtcagactcaccttatgtccggggccaggctacccctccaatattacttcattgatttcctcattttcgtcgaactttcaccctatcagatgattctgcaagcttaccacctgttatcaaggctttttatttttaatacctctaagagctggccagcccccaaccctatcaaaattttatatttttacgaactactttcagtcccaaaaagggggacaagtttaaagatggtttacaggcccatctgaccaacgagactctagtaccctttaatttttagaaaaatgtaagggaatactgttgga

SEQ ID NO: 310691 - DNA, 649 bp, Cannabis indica
taaagatagcttcgaatatacctcaaaagaggccgcactaccggtgttctcgaagactggtgcttcttgagtttctgctaacctgcctgaatcatcaagttcttctatttggtttgatttagcaacatcatcgttagcagcctccttaattcaaagggagaaaaactatgataagcaacactaaatattgatgtaaattaccttaaacaggatcaacaccaaaatcattgtataaaattagcctcaagatttatcttttataatgtataaaaatagcttcggatatacctgaatagaggcggcactaccagtgttctcgaagactggtgcttcttgagtttccgctaacttgcctgaatcatcaagttcttctatttggtttggtttagcaatatcattgttaggagattgaaccttcatattcatatgattttgatccccctccttaaatcaacggaagaaaaactatgataagcaacactagatattgatgtaaatcaaaatagagcttcaaatataccttaaaagagcatgccaagccgcaagtgttctcggaggctggtgcttctagactggtgcttcttgaggctggtggtgattcttgtcgctctgctaacctacctgaattgtcaagttcttctatatggtt

SEQ ID NO: 310692 - DNA, 1010 bp, Cannabis indica
attacatatttatagtctttcacactctttacaaatgactaataaacccctgcactatttcatagtgtgacaattcaaggtcgcaatactgcgttttactcgtcaattagctctataatggaaacattcttggataaattcaactatttttcatttggttaaagacgcaaacagtactatttgctaaataacttggtacccaattgcagaacctagctcaatcgaggtcatcaataaagttttaattcctcacttatgtttgacgcttactccaattctgaaacatagataaattctaatccagaacattgagatcaaattaagaaatgaaaaatcccagcaaattttctatttagccaaacaaaggataaccatgaccacaataataaaacaaattttttattaagaaaaaaaaaggacagaagagaaagaggtagaactaactgaagagaagaagagcgccgaaggccccacccaaggaagagtagacgaaacggcgaacagtgagatccaaacaggcatcccatttagcgttgacgtcgtattggggtggaatgatggttttgttgtccgacattgccaagaccagaaagctatggaagtttttcttttgtttaattaattgttatttttggtgtaataaatttcgagttgttgtaggtaggtaagtggaagactaatacaaatatgcttttccccgaaagcttttgaattgtctaatgttatgttgctgtgttttcctctggaacttacgttgcagagactagtttggggaagaaagctgcggactcgatctaactggactctagggctttctctttcttggactcaaatattgggcttactttatcttcttggactcaatttaatctaaatttggactttttgaattataaaaaggcaatgaggaaattacactctataccttttttatattgtcctcttttatttttattctcttttttaaagtctatcatttttactttttttttttaaacgttgtaccaatt

SEQ ID NO: 310693 - DNA, 1441 bp, Cannabis indica
actaattttaaaacacattaaatttatacaataacaaaataaatacatataataaataaaaaagtatataaataaataaatgtatttataccaagctcggagagagaaagagggagagagagggagacggacgggaggtggtggtggtccgacgtatgagactgagatgaaagggacaccaacgggaggtcgtggtggtccgacgtatgcgatggagaggagagggagaccaacgggaggaggggtgtgtggagatcgatggacgagaaagacgaaaagaaagggagatcgagaaagggaggaagacgacaagagaggagggcgatggtgcggaggcgtgggttgggttttgcagagttaagattttcgtttcagggtgtgggaaataaagaagaaataggtgagaagaaataggtgggcatgtgaaaaatagaaaaaaagtaggttggcacgtgagaaatgtggcgagaagttgttgacaattttttaatggacccttatacccgacggctgtcgggtataagggtccattaaaaattgcattttattaaaaaaattcgcctattttgtttactacaattttaactcgtcgggaatactaaatttttcccagcgattttaaatagttactcaatttttttagcgacagtccccctaaaaaaatcgtttttaggaccgtcacgaattctgatatttgttgcagtgattgagactctaattgtgacagatccagttagggatcttttccatggcgatctagttgtcgttaaggaagccattgcagttatcactacgaaagaggccttgaaggccgtcaaatctgatgaatagtggttagcggattggcaacatcaattccgagaacaattaagcgaggctaaagagctcgccatttgttttaaagataatgtctggaacaaaggtactcctgaagcaagtactatggctaacatatcctatcttattgtttagggcaatggaaggagtgtgttcattgcaagtgggacacaccatgtacccttttgtgctccaaccaaaaattagagcataaatagggaaataatttattgtccttaacacaaccacacacattgaaaagtacaatttcactgtacgcatcttgacattgaacaaccatctcccacaactgattcagttcatcaattaacggtctcatgaacacatttatatattttccaggagatgatggacctagaatcaataaagtcaacaacaataattctgatctcatacacttccaaggtggcaaattatatgggacacaaataacatgcctcaagctataagagttgttcatgttcccaaatggactgaaaccgtcagtaggcaaccccaacccgatgtttctaggttcgacagagaaagacggtcaaaccacttccattctttagcattcgttggatgcctaagcacactgtct

SEQ ID NO: 310694 - DNA, 1905 bp, Cannabis indica
tgtgtcattggccacatgattcgtggcaccagtgtcaacataccaagattcatcatcactaagctcaggaatcatagtggtaaggagtgcttgtggatcataaggaatatcatattcagttatatgagcttgaggagtgaaattaccatatttggggttgacccaatttttgtcaaatcgatagtggcaaatggcagcagtatgtcctgttcaaagacagacttgacagagcaatctacttccattgccacgaccataggaaagagttcgattagggtcattagtgtgtccacgatccacagcacggccataggaacgagaattcccatttcttgattgctgggatgcaagattggcttgcatctttaaagataagtcaacaatggagttgtgatgcttgagcctggtttcatggagagaagaagggcttgcatctattattacaatctaaacaatcaatgatcttttatagatggtttacattcagtagggacaaatttaccgttttacccttcaatgtattttatccttaaaatacttagctacttgtaaatgatatttcagtaaactaatataattactgaaatgagcattctattatttatcgcgttaagccaagctctaagaaaactatcattttacttctaatagaagctatagattccatatctataattaatgctcccactaaattgaactaccgagctcctaaagatgtaagtattaggccgatcctattgatcagctataacgaacaagtcaaagaatccatatagtacaataaagttataacttaaccatcttaggattgagatcaattgacctaagatcaactaagtgagattgacttagaaaagacattacgataagtttatgatatcttttccattgtcaatatcggtctggtctgatgtatagtcaatacatctaatactaatttactttgctaatgacctagaaaggatattctacttatacaagtataagtaaaccatatcgctgattatcacgtcagtgtaaatcctgtgcattgataaatcgtgagactatatagtttgaagcatataatcatgcttattttctactgtgtggacaacaatataatcatgaataactttatgtttggaatttaatagaatttatatattaaacatataatcatgaaagtaatcatatgaaccatacatcctaaaatggtttatgatcttttagtaattagtaaatctaattatgttaaaatacgttttatttagggcataaagtcctaacatttaatccagctcattctcccctatttttgaggatgtgtggtgtcttcaagttgatgcctctgttgtcaactcgaaagctcgttttgcgattttttataagaattttcaagtactggatgaggcttgggttgttgttggcttttaatctgtctctagtgtgctcgaaggtaagctgcatggtatatagctttggctttgcaggtggctcgggacaaaggtactactaatcttcgtattgaaatggactcaaaggtggttgctttggccttcaaagttgggtcgttaccttttggtagtgtacctttcctcttttctcttgtattaatctttttcattttttttttttgagtttgttaaagtgtctttgtgtactctagctgggtgggctagaattgctaaggctaacattgttagttgtctaagagaagtagctccttttgtagtaactagtttgggttagttgtcgttttcaataaaaaagtttatttaataaaaaaaattactaatagagtggccgttattaacaacttcaatttacttatcaagtatgttagtcatgtgtagcatacattttttttttatctcaaaaaaaaaaatatatatatatatatatatattagtcaggtgtaattag

SEQ ID NO: 310695 - DNA, 988 bp, Cannabis indica
atttcatgcttttgtcaaatttaaaattagtaatttttttttttcatataataacgtcttttcctacaaataaaatttggttgtattatgatttgagtgtgcgaatcggtagggtggtggttcgacaataacagaaacgggaggattaaagagagagaggatttgtaagaataattacatggcaggccctgagttgaaatagtcaataggtaaaaaaaatttaaatccttactataaagataaatggtatgtttaaaaattattaaaaaaatatgtatatttttaattttttttttatttgagcccctaaaatagtgagttttagacacgagctaagcccgtcttaaactaggggccaccttgaataattgataaaaatagtaacatttcggactgtaatttgaagcatagaaacataaatttcccaatgaaaaacccactagtaaaggctcctattggatatcaatgcaatgattaaataaacattaatgtttttttaatatttttatatttgaacttttcaattttttgtgttttcggtgtcagaatttttaaacagtaatattataaataattaatttgatacacattagaacatacttaatagtgtatacatccaaaagtcatttatatcaagagttaaaaaatgtcactatattatagaaacaaaaccaatgtttctatcataaaattattttatttatatatgtgtgtaattttttaatagataatttataccaagttatcttcttcttcgaatattcaatttttttaaaactttgtgatttaatttaattttctatattattctaatataataatattaattattcaaaaaaaatataataataataattaatcggtgttcggcaccaaaagaaattgtacttataaagtataatattccattttctttaaaactatatgtaattgatccaattaatcaattaaacctaaattttaatgttaatgttaatatttaaattgt

SEQ ID NO: 310696 - DNA, 2060 bp, Cannabis indica
agatgtaggcaaggggcgagtagcatccccaacagtgcccccgtgagccaaacgccggcaaaaggccctctctcttttctccaaatcctgggatatttaggataaaggtacatcatcatccattttgggaccgtgcccaccacctgagctggcctccttagcaaatctaaaccacctgatgggccctcgaccctcaaaactctacatgtaggggaatacaggccgtatgtctaaaagttggctacagtggtcaaacacagtatattcttcctccctacgaggagggccatgatgtggttcgctctatccctcatctctagggtagggatggagtgcttttaggtaggcactagctgaaaatagtggtgtcaaacttccttgatatccaaggcaatgaagtaattctaggcatatctccttacttttgacaaaagtgtactgttggtgtcacccaaccactagtagccgatctggctgacgtagaagtaccccattcagttctacttcgaagaacactttaagtcaaaataatatccaatctcatacggagtaggctggtaaagaacaaacatcactaaaaggtacttgataccttttggggtgatttgtgttggacacgtcccgaagtaagcagctatatctctgaaatatgggtgcaaaggcagcactgccccctgctggatgtggcgctccaaccatgccatccaatttagtaccagccagtgcgctcattgctccctctaaggcacctcacattggatgcctctcactagtccactctccagtatcctatcgaaagcctcgacaatgataatagatggaggagaaaccctctagtctccctgtgacccggcatcaagaacttgaggctccgaagactgtaccaagacatggtctacacctatcaccgagggctgacatagcctattcaatggcttcctgtcatcattgcacgagcctaaagggttgttggagaaaacaacacaagtcctatacatcctcctcctagcaggcgcagcctcttctacctcaaacatgttgtttggaatctcagcacccatgtcaaccacaggcacctctgcctggctaatctctagatctttaccatcaagaggttgtgtggcctcgtccactatgccaaccatacccattgttgccaccctggcaacgtggggattaaatggtggtgcactatagtacgactgcttagttctggccatagtgtatcactgtcagtacaaagatcactcagaaagttgctacaggatagactagatgatacctcacaaaagtaagactaactagacctattacaaaggggttgtcacctcccacgaccaacactcaatatcacctgcatagaagagacaaggggaggtgaacaacctgacaaagctacaaggtacacacaaagttttggccaatcgtaccgaaggatacttgccagataaattacattgtacaaggttgggtattagcgaagtaccatttaaaatatacctacttagacaaatggtgagtcaagttgtgagttcgactatattggactcactatcaagtcttatacaaagttctaaagtgaaccacatatgagattacagtggtatatgcctacaaggtcgtcacaaaccccttgccgaggtcaaaagaggacaaaaacttggctgcccgcttggaaccttggccttggttggctagggttcccaagcttagagagggtcggccaggtcccatgacctagctaagggttggccaaggaccatatgcccaggcattggctgactagcttttggggacccccttatggccgaccagctaccatgagaaatacctatggctggccaagtcttgaacaagacccccatggccggccagggtgtacataggatctaaatgtgtgcttttcaagaaatcaaacacgtttttcatgttcttcatgactcaagaatcacaacaaaggtcaaaatcagatcttttttgtcaagaaatgacaaattatacatcctaagactatcatgcacattaaaaatcaaaaaaagattacaatctaatgtgggaat

SEQ ID NO: 310697 - DNA, 1036 bp, Cannabis indica
ttattttttttattaaaatatacttactttttttgagtgaattacctaatataccctcactttctacttaagtctagcatataatttacataacctaagaggtctaatgaggacatcatccataaaagtgggtatatctaaaaaaaatatgaaaatagaggtaaaaattaaaacaaataaaataaagtggatatacaatgtaatttcctcttaaaaaaaatataaagttttaatatgaggttttaacttaataagaatgataatgttatttggtgaatcaaattttaatgcttaatggatttgtgctttcaagtaggtcctactttttacattaaaatagtgatattaattccctctaacacttaagttttatattccttcaaatctacttattctaattcaaactcagataacaaaaactcttatatacccttacctagttttcttatataaaacttgtaagaattgtaacttttccttattttggcattattaatcttagtgtgtgtttgagagttgattactgcacaatataatcacacaacttcttgacaaagaaaaatgttaattaggatttttgtccaaatttaatacgtactaaactatgcttcttaaattttttaagtcgttaaaaattttccctaaattattgaaattgttggattcaataatttttgtccaattttactagcagaagtctgacatgaatgaaagttcaaagagcatgatttagtacatgtcaaagttcgagaagcgtgatttagtaaatatcaaagtttaggatatacgattttagtacatggacaattttcatgttagtaaaattgaatgtaattaaataaaagtccttgaatttaataatcttaataattcaagaaaaaattttaacagcctaataaaaagttcggaggcatgatttgctatatcaaaaaattcaacacgcaaaaagcataattaactaacaaatatatattctatataaagtgtgcttatataacagaattcttggtttgtgagaaatttatgggtgactttt

SEQ ID NO: 310698 - DNA, 1997 bp, Cannabis indica
catggtcttagattcgggctatggagcaaaaattatctcaccttctctttgcggatgatagtcttattttccttgacgcaaatttaaatgagggttttaccttgaaaacaattcttgagacttatgcagctttatcaggacaatgtattaatcttgagaaaacagagatgtgtgtgggatgtaagattggagactctttggcaacaagtttagctacaagcttgggtgtttccttggtgaagaatcatacgaaataccttggtatgcccacatttatggggaagaacaagcagcaagtgtttgggaaaattagggagaagatagaagctaaactccaagggtggaaagtcggtctcttctctcaagcggggaaagaaattcttatcaaagtagtgattcaagctcttccttgttatgtcatgagttgctttcgaattaccaaaagtattctccatgacatagaaagtttgattgctcgtttttggtggggagcaaactccaataaacataagattcactagggtagttgggaaaagttgtgcaacttaaaagaaaagggagaaatggggtttcgtaacttggaggatttcaacaaagccctcttagccaaacaaggttggaagatccttaccaatcccgattgtttactagctcgtgttttaaaagcgctactttcccaatgaaagtttccttgaagcaaaattgggtcactttggatcttcgatttggagaggtattttatgggggagagagttattaatggaaggataccgttggtgtgttggagatggaagatctattcgtattaatgaagacccttggcttcctagaggtaggcctttcaatctccgaactaaggtccctattcccaaggatgtaactcttaatactatgttgacagcaagcggaaagtggaaaattcatggagtgggcagctggtttcacaaggatgacaccccttgggtccttggtatacttccaaatactagtagatcggattggataacttggagtttaaatgcaaatggaaaatactcggttgctagtggctataaacttcgatttcaaaacccggaattagcggagtgttcaaacaactcaaaaaccaaagcttggtggaaagttgtttggggatctagactcactcctaaaatgaaaaacttcatttggaaagttttcaataattggctcccttcaaaggtggaatttgaaaaaagaggtatatctttggatacttattgtgattggtgcaaatctcaaaaggaagacactagccatgctttatggagatgtcctcaagttcttcacatttgggagaagttgggatttttcaattttcttcccccaaaggtgaatcggcctgctgatattttgtggtggtgttgggatcattttgagaaggataagcttttaaggtttgtaggcttttcttggttgatttggctaagaaggaataattttgtcttcaataaaaagcactcgccagaccatgtttggatcgattgggctttggagtatctcgagcagcagctggttttgcaccagcagctgcctcgtcctgctccctctaggccgattgatacctggactactcctccatctgatgtccttttaatcaacacagatgcagctctaaaaatgggtgtgttgggctgtggtctaagtgctattattcgagatcatgcagggcagttggtggtggctgaagttgcttttattcatggctgcttgtctgtgcagttagcagaagctgcagcaatcaagttgggcatccagttggctttgcgttggtccattcaaaaggctcggttaggctcggattgccagcccattgtcaaagctcttaactctgatttgaacgtgccacggattgggggcaaatggtgattgatataaaccatttgaagactcattttccggatttgtcttttgttttttatcctaggaagtgtaatcaagtagctaatagtttagctaagtggagtcttgagactcaa

SEQ ID NO: 310699 - DNA, 1055 bp, Cannabis indica
atcactgcctgcactccctgctctgctagtgcaagctagggtagcgttacttgcacggtggcacctccagcggatggagacgtggccacaatctcaggtggaacccaccttgtgggaagcacgagaaacttgcaaaaaagatacctaagagaacttgaggtaggggaagtgtgcgcactagtgtagtctcctgcatagtgccccaaaatgatgaatctccccatcactgtcaccgaggatgatgttagaaatgtgcattttctcccacaatgatcccttagtaatcaaagcacatattgccaataaacgagtttctaaagtcctttggacaacagaagctcaataaacatcctctctaagcttgcattccaagcaatagggcttacagaagaagatttaacccttattagaatctcgatgtgaactttagatccctattagaaacgatagactctaggacaccatgaagacgaactatttctctaacatacagttctacataatgatcaatggagaaatttgtccgtacaggccaaaaagtgcacgactttgtaaacctatcaactatgatccacacatagtcgtaatgtcttgtcatcctagacaatccaaccacaaagtccataccgatgtcttcccatttccatttcggaaggttcaatggctgcagcaaacgtgcaagcctttggtgttcaactttcccttgttgacaagttaaacactaagcaacatattctgtaatattattctttattctaggccaccagaacatggccttaagctccttaaacatctttgttgtcctcggatgaacagaataaggagtcgtatgagattcattcagaatttctctcttaatatcatcatctgtaggaacacagacacggttcataaatcgtaacatcccagtattattcattgtaaaatcactagtcttcccagccgaaaccctatctcaggatttcactaagttaggatattgctgttggaaattattttacaaggatcttagatctactcacaagtatgttgattaataccctaaatatgaactt

SEQ ID NO: 310700 - DNA, 1523 bp, Cannabis indica
tcgatccttattcatagtgtatatatctttgatttaattccgcattttatacataaacatatatgtttcagtttatatatataaattctctaaaaacaacgtgtattcatcttaaaagaataaactgacccaatgtaattgatgtgacaaatgtcactcaaaacagtaaaaaagtaaggtatttaaatgaatacagtataaatgaaaaatatatacagtataaatgaaaaatatatacagtataaaagtaaattataccgtgtaacaatataaatgtaataaaagtgataatttaagcatggggtgtaaattttccaaataaaaagctttttatttgaaaaaattaagtgtactataaaaaataaatatttatagcttggttggttggcatgtatgacacatataatggtatgggtttgagtccataacactcttcttcaatattttttctgtatatttctaaaaataacagtcctaaaatttaaatcgcggcctatatattctcaagtccgtcctatgtgtctactacagtaaccttttcaaggtatgcatgcttacccaataatttaagtgtatagttaatttacggtataaatatttaagattaactcgcagctgtaaataaatacttaactttaatttttgacgaaaatgatatctaagttataattctagaacatctataggtatctggctgttgaatgtcaagtaaattgtcatgtgacaattctttattagtccatgacattaaatttttattttttatttaaaaattaatttaaatatactaataagaaaataacaagtgaataaagacttaatacctaatggtcaaatagttatagacgttgcaataagtattattatcatcaaaaactaaacttaagtatttataataataagttaaacttaaatatttataccgcaaattaaattagaaataaattaaatattttatataatttaaatggtgagaatcattcaattattcatatgtcatgtttatattttttttgaacaattaacattcattcaaaataattttagttaaaatgtcatgtttatacattacatacgcactattggtagaataaagtatggtgggctatgcttcgccaaaattgtggatcaaactaaaagaatctgtatccatatattataatctgctatgtgactattttgtgagtaatctgtaatttatataagtgtggtaaattgcagttatgtgaaactatgtataattaataaactacataaacgatttgttagtgtcaatgtgtcatcaatggcatactcaatgatgtaaaaatttcaattgttttcactaccctttctctctccatatatatgaagctctcccttttccttgtatacatttccttggtgatttctagtgaaatttttcccataataattctattagagctagtttggaatgtcgtattagattgtattgtattatattgtattatattgaattggattatacattatatttttgtataatactatgttaaacttta

SEQ ID NO: 310701 - DNA, 777 bp, Cannabis indica
tggcatcccgagttgaccctaaggaagaagacatcaactatcgagattacggactggaaaactaccgagaaggttatgaggacgacaaatatgattataccgagcttctttgcaatggtgggttgtagagcacgcagctgagtttgcaaagtagcgaaaagctaacaaaagaatacaaccctaaaatgagtcctggccactgttgaactagatgtggagtccgcgactaacccaaacttacctagtgaagtcagagttggtcattcccaaccttaagaaaggaaaaaaccaaaagagtggataccaagtaccataaggtgcccgccaaaatacctctgaatgccaaggtgaaccccactatagtacctagggggcatagttaacctggatccgagaaagatacgctctaataacccacaagggaataggcctccactaaggaagcctcaacctcaggatggtggccaatgccgaagcatgtctgtcaacaatgggaagggaaacgaccaactcattgccaagagatttggtgaaaatgctcattatgaagaattgagagaaaagttgaacgcctcgcaagaggctctcaggaacaagattaacaactgaagaaatgacctatcaccttagagagatgtcataaatgagggaattccggttgagttggctaccctaaagaaggatctatatagttatctgagtttctatataggtgtatgacaaaagctaaggaatgtacagagaaattttcacttgaaaacattgcaattgaactgg

SEQ ID NO: 310702 - DNA, 2302 bp, Cannabis indica
atctaagatcctggtaaactaatttccaacagtttctagttgtattgatttcttgttctgaaattgaagcggcgagccttgacaatcaaggccgccgatcacaatgaaactcttaagctggaatgttcaagggattgggaacccttagacattacgagctttacaatcccatgtgcgtgatattggtgcggatataattttcttagctgaaagtaaattatctcgggatcaagctaaacgtgtttgttgtgttctaaattatggaaatttatggacggtagatagagtggggttgagtgggtgactgttattaatgtggaaagatgatatcaaattgcaagttctgtctagttctcctcggcatgtccttgcaactgtggctggaagtggattctcaccatggtattttattgggttttatggtaatcctgaagcaaaccaacggaggttctcgtggcaacttctacgggatttaagaaaataagtataggggtcgtggctttgtattgggaatcttaatgaaattttgagtttatctgaaaaagttggtggccgagatcgactgccaagggctatggatggatttaaagaagtcatagacgattgccgatttattgatttcaattccatcaagcatgaactgacttggcgtaatgaacatagtaactctaggataatggatcggctggactgagggttgtgtacagaggagtggttaaaccaatttgaaggggctgacatttcgctacttgattggtgggagtcggatcatcgtgcgttggtggttgacatgtcggtgagagtggatggagcaaagtgtggtaaatctaaacgtaaaagtcgctttcactttgaagaagcgtggtaccaggaagaagagtgcgctgaaattgttgaccgaatgtggaaagacagaagtggcaggggttggccttcttcctttaggtgtaaagtgaataaatgtggcaaggcattacatggttggaataagaagaagaaacttagattaaattactgagattgagaagactaagaaagctcttcatgagctaactatgcagcagcaaccaagtgtgtgggagatgattcaaaaaatggaggataaattaaatgggctgcttgagaaggatgaacaatattggagacaaatgagtcgggctttgtggttgcaatggggggatagaaacacaaaatattttcatcacaaagcatcctcccgtcataaaaagaatgaaattaaaggacttcaagatcaaatgggtatttggcaagatgataaggagttagtgtgtaagatagtggatgattattatgcaagattatttacgggatcagatgttagcgaagttgtactacaggagttcattgaggtgatacaaccaaaggtgacattggctatgaatgaacatttattggctgactttatggaggaagatattgttcaagcagtgaaagagatgaatcccactaaggcacctggtgcggacggactcccagcacttttctatcaaaaattctggtctaaacttaaggaagatgttattgctgtgtgtttgaatgtgcttaatcatggggctaatttgaagtttcttaatgatacggtggttgccttgattccgaaagttgataaatcgcaaagaatagaggatttttgacctattagtttatgcaatgtgatctacaagatcgtttcaaaatgcttggctaataggatacatttcactctacatgtagtttctgattctcaaagtgcttttgttaagggtcggctcatacatgataatgctattgtggggtatgagagtttgcatgtgatgaggaaaaatagatttcggaatggatcgaaagttgctttgaagttggatatggctaaggcgtatgatcatgtggaatggaggtttttagaagctatgatgttgaagttgggatatgactcggtttgggtaaataagattatgagttgtctttcctcgatgcagttctccttcctaattaatggagaaattcaggggtgagttattccacaatggggtctccgacaaggcgatcccctctctccatttctttttctattgtgtgttgaagctttctcttgtctcattcagcatgctgaattaagggggcgagtacatgggattatgtttggcaggcagggagtgacagtgtcacaccttttctttgcggatgatagtcttgtgttccttgaagcaactgaaaaatgagtgtaggtggttcaaggagttgctggaaaaatactccattgcttcgggacagctggttaacttccataaatcagacatgt

SEQ ID NO: 310703 - DNA, 649 bp, Cannabis indica
aaaaaaaaatgtattgtgatatataaatttggttttgcgacaaatgtgaaatgagatctataaaatggtttgaaaataattaaattttatcaactatgagaaaataaacatgaagataattttatcattattgatggaaccagaattaaaacttaaaaaagtgggctaattttttttcaataaacattaactaatgtacatacaaaatatttaatgtataattcttttttttaaaaaaaaataaaaaaaattagaaggtaccaatatatacatctttacatatgtacataataatatttttccgaaaatacattataaaaagtttgtagaaaaaaagtttgagggggcatgcccttttattacaattaacataactaatattttttaaaaaattaatgaaaaaatggttaaaaattactaaaaggtctattaattataataaagatgacgattaaaaatgttttactaaaataaatgagtaaaattaagagattatttcacaaatacattaaaataataaaaaaattataaaaattacagtttcacagaattttaaatatttttacgattttttaattttatttctagaaaatacagtctttttatgtagtactcttgttgattttttgttatctgtatgttatatttt

SEQ ID NO: 310704 - DNA, 1910 bp, Cannabis indica
ccatcctggtattttctgaacttgtcttctagttttatcactcgcaactgtattggatccataggttgttgatctgcattttgatatagttggttacataaatttggtgcattacagtttaaatgctcacgtaggtctggcttccttcgatttaattgttcactgagattaggtttgcgacatatctgatcgtaattactcataaatctagttcttgagtaactttaggatttgtaactacacgagttactcatactttcttgatcactaaaataatattgtgacctatccccgtcttgcattttccatgagctccagttgacctactgtgcctgtgagtccttgatcttgactctcctgaattcatacttgagctagtttcacgtgactcatcttgcatcgacctacttctttgaaagatttttgacacacgatctctactcaagtatgtgtgtgtgttttctctgtctttgcaagaaggcctttgtggatgccttggggtcgacctatcccaggttagtttccagcatttcttccatcatgttgaggtatttcctagtttccttgtcgtaactgccttgcatttgcattcatgcaagatgatttcggtatattaggttgttcattcccctagtttgaatatccatgggaagtccttaaatgtcacgctgatgctcttgaattcttgtatttctagtatttggtggattttctctatccattggaatattccttatattcccaggttgttcttcctgagtattttgggattcccttgattattttcttatctcctggtcgtggaccctcaaggccatccctgtagtcgcctcatagatggatcaggttgagtttgaggagtagtttcctatgcagccttggctgccatagcttctcgttctaactcggtatttctctagtttgactcagccaggcattgtcaaagttgcctattttctagttccactagtgggacatatctggttggatcataggcgtcttcactttgcctctctgggattttttcaccaattggattgaaatttccatcatttcttccagaacgaggagttttagttgtgttgattctctgtgatccctgaggttcctttctagggtgatgggttgtcttctcggatgactttcttcatcgcgatgggtattgtgcgccataaatatagatttttagttgtgtctatgaggagggtattttctgagtttttattacaaaggctctcaatgaaagcaccaaactgttaacgcagattttcgttaaccaaaaatattagactgtttgtaataaatgcaccacaatattaactactgtaataaatgaacaacagaaagtttttaatgtggttttgaaattatttcttcatagtccacgagtccatcttattagggataataatagtaatacagaaaaataatagtagtaaggatatctttttttttctctctcaaattggccatcccttttaccatggattctatccctatttataggtgtatagggtgacagttattcccttgggatttaatcattcataattgttcattaaatgtggacattgcccatgtttatttttgtgcacatgggataatattgaataactggccaaccattcttttgttattatccttaaacggttatgctgaccatactggttgttcctcactagatttgagttgtccttcttttactacctttataggaaaaatgctaagtgtagtgatacaatgctcctcatagttctctaccatgatggtattagcgaagtggttactgttgggttttatgccctaaataaaactccatttcaatataatccattttatttaccatcaataaagaaacagaagtatttttcattcatttgtgtatgttttggttcatgttatcaattgct

SEQ ID NO: 310705 - DNA, 1239 bp, Cannabis indica
tgtgggaggcatgatttctcccgctttcatgtcagagttttaaatgctcacttctagactctttcacacgtgctggctgcgtgtcttttgggaactcaaaacggcagcgattggacatgcgcaatttttccttcgagcattttctacgatgcatgaaatgatgggagccatctgttgggaagtgaggtatccttttaacttctcacatccaatcatcggacatctcttggggcgaaccgaagcgtctgctttgtgtgaaatgtgccccttatagtcatcccgtaaatacttacaatagtcaatccatttttcactcttctttccctctcctccacaaaagagtctacttccatcagtatggagggatttagagcatggagctggtcccatatttccaatggttgcaaaaattgggatttcccctttccagctaatcccttcatcgtatagacttctagctagatggtatttgttctgcaagatgaaaaatctagaagtaccctttccaaaagaggtctttacttctatagcatgaatgctaatcccatgaggaggaataaaaagaagttggggttctttaggctggaaaagcatctaaattattctagccccgtcagccacacagaccgtaccccgacctgcccgagtactggttcttctcctccagtccctacaaaaatggtgccttctctttgcctagactttcatcttccaaatactactatatttaacttgaatcttgctctttctattgtttttttgttattatttgtaaaaacctgctaatgtatgtgatatttgccaaaacatcctcctaaagcgctaagagcgtggagatagccaagaaggaagctcagtacacgactatatctgaggagcagctaaaggttggggacttagtgagaaatgagcttctccgtaggttttggcttaatcacaaaatttcaaagtgttaatactatcaacgtctgagggcaacgccagcctcttaaggaggtgaaggaagccattgcaatagatctggctatcatccttactgaggtggctaaaaatgagaggctcttggatcctaactagttggcatgttaccaagaccctttgtctacggaagagcagatctcaaagaggtttgctgctgtcacaaaaattattaattactacgcaagtgcacgcaatcaagtagtatactcacgcaagtgaggtcgaaccacaaaatttgattaatcactactaaactat

SEQ ID NO: 310706 - DNA, 655 bp, Cannabis indica
ttaatttaattattaactagacaaataaagtccattaataaataaataaacctagaatctcttttctttacaatttcgccctctgcttagtgaaaattcataaattagacatagtctaacttcttatgtgattttattaaattaattataaatttgaataaaaattcgctatgaaaatgataaatttattcgatttatgattgtcttaacaacgaattatttctttagtaaaaaaataacacaagattattaattattgaaagatatttagtattataatattataaaaaagaagaaagtaaagtgtacaatataaaactttttctttttattaggtttctttcagttgaggacttgaatgaatgaataatttactgtttacaattttactgctgactttcgacattatttaatcttgccccctaaaataacttgttaaaaattttccataaacttttgtatttacaaaacttcagttttgatgttagatctcatcccattattatgtttaaatgctgatgtatatttgtaaattattaaatttattgcttaaactttaacaactatcaaatcgtaccactccaaataaaaataacaaagattcgatatttaatttccagtaaatcttaaaaaaaataatttagatcttaaaaaa

SEQ ID NO: 310707 - DNA, 559 bp, Cannabis indica
taaaaatatatttaaaataaaaactaaataagtataaatgctaaaattgaactctatataataaacaacacaatcagcaatacaattttaaaataaacaaaaatattggctgaatatttaaagtagcataattgagaacggatgcatttgaaaaagtgtcctcaaacatggcaggtgattacttgcctcaaatgtttcattgctgtcaccatcaataaataagagaagtggtcttcttgtaaaaggaaccaagtcactgggaaaaatgcagtttattcctataaaatgattcatttagaataaccaaaaacttgagaaaattttcaagccagtaagaaaattatgtctgcatctcattataaattcaatactaaagatgccatataaatcacatcgttaatgtcactgagtatatccattaagttcttcttaatgtatttcatttgtataggaggtttttaataataataataatcaagagaaaaaaagcaaagagcaaagaatacaaaaacaataatacaaatacaaaagtaacaatcacgaactaaaatgattttta

SEQ ID NO: 310708 - DNA, 872 bp, Cannabis indica
atataatatgttttaatgataattaattgtgtatgtatatattagtaattacctgaacagtttttattcgaactccaaatttactttcataaaagtcagctctgtctacaaatacatctgtgacatgagcttctgagtttcctgaacccaagtctccaatgctgtacattagaattgcaatataagttattcatgtcagtcattaaattaaagtcaaataaatatagttatataaagatttatcattttatatgtattaccttatcccataacctgttccacatgttatatctgatgctcttacttttttagttccacttttaattgagatacagtccgcaccttaaaaatttataataaaaaatagagttacacattagtgattacatcatgtatcttttcaaaaaaattaaaagagaaaaaagatagagatatattcctttttaaaaaagaaatgaaagaaagaaagctcaatattaagtactacacttcttcccatttttcaaatttgaatagtaacacaataattataaattataataagaataatataaataaatatgtatacacacctgttccaataatagttttggagatgtcaatatcctccgtatgtgaaatataaattccattagtatttggactattttctgatgcatttatcgtcagatgtgaaactttaacatttttatagtgagtaaaagacatatgtgtttgttgtgcatttcgcacttttaaatttctcactaccaacttctcacaattatgaaaagttatagcctgtaaaatacacaattaaattaagggttatttgcggcaaaacctcctaaagtggactggtttttgcaactaaccctctaatctaaaatttt

SEQ ID NO: 310709 - DNA, 770 bp, Cannabis indica
aagagttatgcacgttttagagccaaaaaaataagatttgccattgccctgttttcgaccttccgttttctaaaaggtaggcaatttttcccaaaaatagtaggccatttacaaaatgacaggccgtttagaaaacagcaagccatttagaaaacgacaggtcatttttcttatgattctttttgaaaattgtgctaacagctataaacgactatatttcactccaacactatataaactcgatttttactcaaaaatagaagttggttgagtatttatatcatatatctaacacattcaagtgagtttaatgagctcctaagtctaaaatctaacaaatacttttcacacactttgagccaaaatttttgtttaattccttaaattgtgcttactcatcactctaggttttctattgtgtcatcatacttttagagtgaattttcttgtaattccaaatacatttccatattgtgattgaggtgatattagaactgttattgtaaataacccggttagagtgagattgtcactataataatccgagaaagaggttgatagtcgttggcggttcaaaactattataagaggtttggaaatatcttggtgaaaaattttcggttgtaaggattagtcaagcccgttaacttggctcgatattggaactcaaagctaggtccatagctttgaagaccaaggacgtaggtggcttatgtaacaccctaactaacttaggcgtattacgtgattttcaaacgtactgtgcagct

SEQ ID NO: 310710 - DNA, 1423 bp, Cannabis indica
tcttttcaattagaagaaagatatcatgctcctctcacaaaaatctcaactaacaatgtgcaaagattcttggaccatcaaaggaaagtacaaatgaatggccatatagaacgtgcatgactacttgtagaaacatcaaatgacttcaataggaactcaccctgatgattagatggagagttatccatatcagtagcaaaactaagaccatttggctcctttttcttctcaatatttagaagaatttcatccatatacatgcagaagcttttcatttgagaatgaacattttcttggactagcttctcttgatcggaacaaagggctttactagccatgtctatgatctcctctatatctgcctcttcagcattctttcccaaacgtttgtagctgaaaattacatataaaataaacaaaaattaagaaaatgagatcttggcttcgaattcatgggaacataattctgtaatagcatcttttagatcttgctagcaatattctcttttttgtctaagtatgtttttaatgaaagggttgtcaacaaatacaataggaattgctatagtttcatagtcctgaaatattgtagggtaagaaaaaaaaaattacagatgttcctaagttgatatgctcattaaagatgaagacaaacactactaatattactaactttcactaataaaaactgataatagttaattcgtatatattcaacataaattaataaataataaaatatataataattccagatatttttacgtggttttgtagttaaaatccacctacttcacgagtcattcttattagggatatttatttgagtacagaatacactctctaattttgaataataaaagattctttctcaaatttttttcccgtctccctttctcatggaatctgccccctatttataggagtataggttagacagttgttcattttgggatatatttaaatataactgttcataaaacgtggacaatccctacatttcatttaaatcacatatgagacaatactaaataactactcagccattctttagttttatccttaatttagatggttattattgacgtgaaaagttatatctatactgatttgagttatcttccttatccatcttgataagaaaatatactaagtgttgggaaggttctcatcttcctatattctttttgtgatatttgtaatgcgaggtgatctttctcactgtataaaatgcgagacatcttgtgttgatacactcactttgctcagatggatgaatattcctttctttgtcggtatgttccgaggcatgcatctcgttaatctcaaatcaatagttactattcttgtctcattattgactataaagtcaatgagttttgaatattatctatttaacctttaattaataaacgagttattt

SEQ ID NO: 310711 - DNA, 2245 bp, Cannabis indica
gtaagtctcgccttttccaatctattattgacagagtgtggaataaattgtttggttggtaagccaagtcattttttgttagtggtcgtagatttttactaaaatatttggtttaagcgattcctacttatgttatgaatttgtttagtcttcttgtgaaacttgttaatgagtttcgtcatctttgtgccggattttggtggttactaggtggtggtgatgatgatagtaggtaaatgcactagtgtacttggaaaagactatgttggcataaaagtgatggtgggatgagattttgcgattttttgttttaaataaggctatgttggccaaaaaagcttagagatcgtattcttatcctaattctttggctgctcaagttgttaaaggggtgtattttccttagaagaattttttgtctactgaagaagcctctaagggttcgtatatttagaaaagtattctctagggttgggagatttttgttgatggtacccgttggcttattggtgatggtagcagggtgcatattcggtctaatatttggcttcccaggttgttacagctcaatgatagactcatttggcactacaacacttctggtgcttatacagtaaaatggctattggaatgctatttgtttgttaggaagggggaatttgcttcttcaaatgggcccttgtattggtggaactatgcataatctcaccatcgtggtgttccaacgaattagaggtactcgctatttaatttgggtgaggaaactatttttcatgttctttggggctgttctagccttaaatctactactgctactattttgtttgtttcttagatgaataatcagtctgatatggatttctatgctttcattcatgaccatgaagccattttgcataaagacgagctttgcttgttgttgcttgtggtcgcattggctgttcttcaaggattattactttgttctcggttggggcttaccaatgttctagtagaatgagtctgtcaacgagtttgtgatgcttttgttggattaaaatctctaatgtgggttcatatgtatttgtgtgtattgctatataaagtttaacccaagtgatcattttagtaattgtgggtcattgggtattaaagtgtcatgggctaaatgtgtagataccctaagcgatatttctaatctattgaggggccaaattagaaatacttaaaattaataacctagctatgaggtaataaattggtagtggtccccaagaaacaagaaccaatttctattctcatcttcccccatcaagagagaaaattagaaaaccctatgtcttgctttctttgaagatcgttattcaaaattactacaaagattatttctacaagatagattaagattatcactatctatagattaaagtacgcttctactatttggctttttctctttgaatcaataaaggtttttttagatctatgataatatacttataattatatgtaatatatttatttataaaattgaatattgttattacatattttatgagtaataaaaaaaataagagctttaacatctaaggataagctaatggctgagtttggaatgattttaactgacattttctctatatgtaattttgtttaggtaattgattttaatcattgttctcgtattgacaataccatagctcatcatcttgctaaaattactttaaccttagattatttggtagccgagacttccaaatttttgtgagtcttggactcatttttagattatttgccctttaatgggaaaaatcattccttttacaaagttttagactcacaatgctttgtaaataaattattgaatggatatacattgagcataaaagactataataaaatttttaatctagtacaatgtcctttataagttatttccgacaaccttcctacatccaaattggataatggagttatcaaaattctatccttctatatatataataacaacaataatatataattatttatatgggtgactatttaatggttacatttttattgtaaccatatggttacatttttctttgacaggttactaataggtagactttccttttttagaattaattaattaaaattaactattttcttaaaataattaattaaatagtaaacattccttttttagaattacttaattataattaactattttcttaaaataattagttaaatattcaacaagacctcttttagcaattaa

SEQ ID NO: 310712 - DNA, 785 bp, Cannabis indica
taattttttattctttttccttcttctataatgtaaatacttttgttacaaagattaagattaggattttgttagtatttcgttttcagcttagtttgtataagtatatctttagctatatgcaccagattagctaattaaatttaagcacttgtttccttattctacttgtacttatttaaatatctgatttttttttttgtgttcttgcgttaattcactaatagctatcaccatataaaatatttgtaaaataaataagggaagtagtttataaaagcttcaaataaagaacatttgaaaagtagtgtagaattagctatatgttagtgagaaatgtagagagagatatgagaaacaacatagaaaagaatgagactacgaaaataagggtggaatatggaaaagtagtgagtcaaagtccattaatttgcatagattttgaaaagatttgagaaggaaagcagagtgtccattattcaaaatagcaattactttattctaatgatacctcttgttcttttgtaacatgttaaagctgaaagaaattttttggctgaagttggtagccataatatctttgatgtcacacattttttacttttgttttcttgagccgtgtaatgtgtgcactttccatatcaacgattttggttgaaattggctatttgatttgcatttctaaaatgattgtgtaaagacactacaaaaaaaagactttttgcttcagtttttaactgatatataaagaattttcttcggttggtgtacccgacgttataacc

SEQ ID NO: 310713 - DNA, 595 bp, Cannabis indica
ctagcctcccaaatatagtacactaaacacttgtcacattctctatgaaatttagataacttattatgtacgtgtctctgcagcttggtcacaaaacaccaaaccgagataatttatctgtgggaaattttaatctagtgtgaagaaccaaactaacttaaattcaaatcaagaaacaattgacaatgacaatatcaacaaaatacaattcaaaaattgaggagaaaacatagtagaacagaaaaattatatgaagcaataatttcttaaaatcaacaccaaaaattatacttgttcaagtctgataaattgatttgattcatatggctctactctagttctgaaattttttttggtaattgagcaagaatacaggtacaatgaaattgagaagattctctgtttggtttctctcaaagtgtttatctctctgaaactcttacccaagaagaattctttatctatagaaactttttcttaaaaatttcaaaacacaatctctctcctttttttgtatcactcaatcaatcatcattacaagaaatgtcatttttgccaacacatttttgtgctggcaaaagttagtattgcgctg

SEQ ID NO: 310714 - DNA, 1511 bp, Cannabis indica
aaattgggcattttgttgatgagtacttcatggtggaaggcatgggcactacccatactcagttccaacagatccccacatatgaccgccctcctttcacacttgctcttagagataaagctcaaaggcctcctcagcttctggggaatgactgaaatatcattttgttgaccaccgaggacaaatttgtgaggtacgggctctatccaaaggattttattcctaagcctatgaaggagaggaagaggaaatcttgtgctggccgggctgagggagctcataaggagaatgaactcatccaacctaagtgtgaagctaagttgaaaggaggtgcaaggggcaaacagtatgctcatgagcctttgaatcctgaagatgaggttgaggaagagcaggtgactccgctcaaaaggaggaagaaacttccggcccagcccaggcctgttgaacatgccattcgaattagggagcccagtatacctgctcgccatcctctcccgtactatgaaaagggaaagctgtcatggcggagataagaggcttgtttggttatcatggactcttgagtcttgctcagacaaacgcttctcatgaagcacaggatactccgtcttgtttttaaacttctttgattaacatgcttttatgcttctaatgccttttttcttctaaccatgttgtttttatttcgtgcagacatgtctcagaagatgctcgatgctctgaagaagagagttggaggaagctcaagctcatctcctctagctaagaaatctaggggcggtgaggtgaccccttctaaggaaaagacaccggccggggaggttattgatctttccgaggagctaactgtcacggacccttctactctgaaagttgctaagtccaaagattctcagggaggaagctcgaacaggcctgaggagtcaaagggcagatccgagctggctaagagcgaatctgagcagatgtgggctcctactccaccctctccactgcatctagaggccaagaaaggcaaggagatgctcgcccattacatgaagcgattggttcctgaggtgagtgagcagctggccggctctgacaacgaatcttcactggagctgctgatgggaggagtcttgagggaatttacaagggtaagtctttcttgatagtttcctttaatcctttttacttggctcagactctaaagtttcttctctgtgtaggctagtctaaagttggcttacacctattctcgagccaaatttgatgcctccaagaacgctgccatgtccaacaccatgtgggcggaggtggacttgaccaggaagaatgatgatgacgccagggtggaactcggagctgtccaaatagagctagctgaagtcaacaagaagctttttactggtgagaggaaaatagccaagttgactaaggacctagaggcctccgatcaacttgaagctaccatcggcaccttgtcggcagaagtgaatagtcttcaagaggaaaggggagttctt

SEQ ID NO: 310715 - DNA, 1105 bp, Cannabis indica
ttttggcacctctccagatacgttccctgagcacgcgcaaattgcaatggtcggcatttaaagttttattagtaaatagaagaagtgataccttctgccaagtgacacctcagctggtggctacttgcatgatgaaaagctcgaatttatcccacgtgtttggaaccaatcacgaggaagcactgcaagctcccggatcgtgttacgtcccgaaagtttaggggtaaatgttgtccagatttttgtaagcttgacacgtggatcctaatctggacaggctaagtgataagtagcctatcaactctcttcaccactgttccaagaaggtggaagccttagcttgcggaaagggccaccatgaaaggaactaatcccctgaatggcgacggtgagggaaaattcttcaaagagaactcactcccatcaccaaaactgaagccagctattctcgcagaattaaagttgagtgctctcgtaaagggtatggatttctcaccaaatgcttgaaggtgtcttggaatgcgattagctgagctataaacccatttcacgaaagctctgcttgtacatgtcagactacaaacttagtagccaaacttttttaggtacgacgtcagggtttgtcccccacgatatgccatagtatagagcatgcgagtccaatcgtaccagcctgaatgatccgacggccattgacaagggaaattcaaaaaggaaaatcctgggacgacacatgtatgatgcccaatctgtacaacctgacacccttaaatgccatgtggtgaaaaggccacctattaaaccaacggttggatctcgcccaaaggtgatcaattccagctagcgcatggagggaagttggcctataaatacccctgcattccataagataaggaaagagacattttaaagaccttttggaattagaaaaaatactatactacttacataaaaagaatccacaaaaaattcgtataaagcttcttcttcttcaagaggaacaggaggaaaaagaagttctagtccattgtatacacatttgtactcatgttcaccggccgaagagcttaataaaataaactcgtggactaaagatagttaacgc

SEQ ID NO: 310716 - DNA, 751 bp, Cannabis indica
gaagggtcagagtatttgggatgctgaattcaaacaagatgctagctggtactacaagaaactccttcgtctccgatcggttattggtgaagctgacattatgatggcagagaagaaacgtaaatttcaacctaaactattttatgtctcgttgatccatgggcaaagtgctgaatatgcgaggaatatatggaatagattgatcttggcaaaacacaggttcataggttggcaaattgtgaatgaacagctgttaacgagagacaaaatcagcaaaatcatgcctattcctactgatatgtgccctgtttgctgtactgtgatggaaactcacagccatgtatttactacttgctgctacacgcagagagtaatataggaagttatgtcctggtgtggtgtcttttgttggccgaacaacatcaacttatggttgtccaggccttcgaacaacttgagggacataattctgaatgctgttgtgttagctacactgtattcagtttggaagaaccgcaatagatgcgtattcgagttcaaatgcaaagctgctgggtctttaagcagggaaatcaaagaggtagttaaacaaagagttgtaagttgcaacattagagagaagggggctttggacaatcacataattaatgtaatagaaagttggtaatgctgtttagcatcttgctggttttgtagctggttgtggttccgtgtaaaactctgctagtttgaataaagatcctttcttgtt

SEQ ID NO: 310717 - DNA, 575 bp, Cannabis indica
ttaattatttaaaaaatataaaaatattttacaaagtaaataaaaaaataattttaaaattacaaacaatattatcattttattttcttttattctttttctttattgtcttcttcttcttcttcttcctcttcttgtccactatccggccatatccctcaccatcaaaatcaccaccacaaccattacccaccaccatcaaaatcgtcaaccaccgaaattaccatcactactgtaaacacaatcaccataaatatagatttgaaaatttacaaacaaaaaccagatctaaaaaatacttaaaaaatcaaacacaaacccatatctcataaacacaaacaaccaaacaccaacccccatatctcatactcaaatctcattaaacaaacaaacccacataaaaataaaataaaaaattacagatccaaaaactaaattacctacatctatcaacaccgaagtcattaacacccattaagaagaagagtagcgagagggatcaagaatcggtgagagtcaggagggacaaaggtggtgctggtgtgcgatgagatctggagagagagagagagaga

SEQ ID NO: 310718 - DNA, 3856 bp, Cannabis indica
atttgacagcttcagcatctttagtaaaatatgcataactttcacatacaaactccaaatgagttgaatcaagatgcgttcgaaagaagaaaaataaatctaaaacttttatgctttgactttttccaaaatctgatgagaacatagtcaaatttaagcttgaagtttcaggtttattttcttgcagaattttctctattctatagattgtcgtttttcgaaatttgatcaatttatacattccaagtatgaaacctgaaaccaaagaaaacaagcgtaattctattccaaatataataataaagaaggaaaacaactacaaaaaatggtctattgagacttttgacgagatactagcaagtggtctagagagggtgtccactgtgagataccctcatgtcaattagatggcatggtcaaagcgtcatttacaacagggggcggtgttgtcactacacccatacttcaaagacatcactgcttacttcgggatgtgtccaacacaaatcactccaaaatgtataaagtacctttcaatgatgttgttttgtatgcggagttaggttgacctcaggctactccatatgagattggatattccttcgatatgaagtctagcccaaagtaggaccgaactggatacttctacttcaatcaggtcagtcatcagtggttaggcgacaccaacaacatgcctacatccaaagttggtgggtatgcctagaactactttatttcttaggacatccatgagatttgacactgttgtttccagcgagtgccattttacaagtgctccatccctacattgcaaatgagggatagggtgaatcacatcatgtccctcactatagagaagaggaacatcatcaggttggccagtgtggccaagtttcagagatatggcctgtacccttctgcctttggagttattaaggcccagggcccattagttggtgtggatggaaccccaactgttgaggtggtctgtcctggtaatggataagtccatgacatggatgatgatgtgcctctaactcggatagtttgagttctgaagaagagagagagagggccctccaccaacgcttgactcgcggggggcacagttagagatacttctcttcagattaggcctggaggctagagacaagggcaaggcaattgttgaggacttagatgaatcctcttctgaggatgatggtatttgataattgattgcaccatcttttattttcttgtcttgcatcgaatatttttgactttgctactttctttttgtagatatgtcttcaaggaggtcatgttggtggaccttctgaggacccttcaggtcatctgagggccaaggtggctcgaaccactcgtggtagagatgctgcaggattatctcttcctcttcatcctccagagcctgtgccagtcaggcaactcgtgatggatgaccctccagccaggagggaataaccttcgagtaggggtgccctaaggcctagtcggggagtagactcagccacgaggcagagagccatggaggcagctcgtaggcatctagagagagcctttctatggatgatgagctttaagagcttgatgacaacgagccagatagactctattctgctagccttcgagatttatctgcggtgagttgcacacttaactttgctaatatatctaggcattattacaggctggctagctatagagactgttgcatgaagttggtcggccaatgttgtgtctttgaggggctggttggccttggcaacttcatagaagggctgttggctagtgttgtcttctgacactgattttgatcttgttttgctatcaggcctttatgaagttgagctttccacgtgacaactcttgggggtctccaagcactcttcgtgagcagataaagaccttggaggctgctctactagcgaaggaggctaatcttctagcaaaaggccaggctttatctaagataaaagctcttagcctgcagaattggagcatgatttctggtttggaggccatgcttggcaccaggaatcaggagaaaactatgcaagatgctaacatctccaggttggggactgacctcacgaggtgtgaggagaagctgagggcaatgcttgatggtcagcaggccataagggacaagtacgtcaacttgtcttcaaaaattatctatgagttcaagctgcgcaactccaatgatgatctttcatacatgggcaatgctgctatcctgaaaagtacactagcccaaggaagagcactattcgagatcaggttggaagcgtaatagaccaccgtctagccagaggagtcttctttggagaaatttgatgaagagatggctgacccacctgcttaggaggtggctggccagagccttgaccaggatgttggccagcctatagaggctatggccaccccacactccggcgatccaaacttcgcagcttctgattcagccccacctgcacctgcacacatgtaaattcagcttattagttttcaacattatagttttatagtatatatattgttttcatgttctgtatggcctatgggccttttactttttgaaaactacttattttcagtcctagggccttaatattcttactcttggcctataggcactctatttttaaacattactattgtttagcccctttttatcatggattgtgcaactgaccagacggtctttaatcctagctatctttttatggccttgaaatgtaagtattcagatttactttggatttgctttctatattttggattttttgggatttgattgctttctctttgagatctacatcttgatttgagctgattttcctagtttttgaaagaaaataatggagatttggaggattggggtgtttcggctgggtcacgaagaaggaggagtttcctccattttttgtggttaggttggtatttttgtaaatagaaatttttgttttctatttatgtttatttttactttctagggtataaatgtaaaatgatgtccttatttgtttattatacaaaaaaaatccttttctaaattctcctttttcatgtttccttgatttttagggtattcatgctatttatcaataggaaaatttttagttttgagtttatgtccttaaaatttttagaaagctgtttacccattttgcgtaattgtgacacactactaaaaaactcaaaattcctaacatttttacactgttgagtaaagaactcttggcggttaataaaaccatcacctaaacgagcgtcgcaaatacttggtagaataggtgacggtggaaaaatgtcagtataaaagaattctcgatagtttaaaattgtcagctatagtcaatactatagggcacgttttaaaactgtcgactatactatagctgacgattttaaatcgtggtctatagtgagccgtaaccgtcgctatagtggattacccaaaaaaaatcgccttcatcctcctcgaaaccacttcttgcatttgtcacagctgctctaaaaccttgacaagctttatcctcctccactatcattgtgcttgtcttcatcctcctccaccgtcattttgctcgtcttcatcctcctcaaaattttcttttacaagtttcaggttacttttcacttaacgatcctcgaaatttttttcgatttgcaagcttcagatttatttgaacacacatagatcaagatcaataaactaaatcatggctaatagaaatttaaacaacaaataagagaatgttatgcttacctttgtgcttccacgagagagtggaggagagggatggcgtggctcgtggtcgcgaaggagagagagctgagaaataaa

SEQ ID NO: 310719 - DNA, 1110 bp, Cannabis indica
cttgaggttctcattctctaattggacctggataaataagtctctttctgaaaaaaaagcctatttggccacaaacaactgagtctgagccttcgtcatcaagtcgtggccctccttcatggccttctaatctcgttccctccacatgttctaggccaagacgtcatccttcagggtctccacctcctccttttctttttcaattcggcttgcatctctgaaagccctcctaaggcaacagctgcgtgaccttggtcaaccaggttcttggggagtcagccatccttgacggtagcctaatcatagtgaaaaaaatatgataataagcgttagtgaatcagaaatagaaaagcaggtgacaatgaggacaataattcaacttactgaagccaacaccaagtttatatcttgagcttgatagactatgttagaggatgcacaagctgcaagtctcttagtaggaagctggaccaggtcagctgctaaattgttgacaatctcagaggcaaattatattatatatattatgggctaatcaggtaataagtagaattatgatcctactaatgtgcttcagcatatattttaattttgttataagttaataaataatcgtaatttattaattacgaagatttatatagcatgtatgaataaaatatgagttattggtggaataaaactattttcattgacaaccttggacactcgatcgggggccacaaatgtcacaatagttttagttactaatattaatagaattattgagataaattgattataaaattaccggagtattttagggtattcggagttgattaaatactctaagataaaagattttttagtgattaagaaataataaaataatctttattattattattaatgttgttgttgttgttgttattatatgttgttttaaaaatgatatatatatgtataatttaacaaagaaagaaaaaaaaaataacctcaaaatccattccttctctcattccaccatatcactttctttatttttttgcccaaaaactagctctccaacctgctatcagcatctaggagtgaagcaatttataggtggaagctaaggtaagaagtttaact

SEQ ID NO: 310720 - DNA, 631 bp, Cannabis indica
ttagggcataaaattccaacactttggggaagtaatcttcatcaaggatttatgcatgaagtttcctatgacaatggatttactggagcgatcaaaggaaatcaaaaaaagtgctaaatactcttttaacaactcgagtcggattgtgttcatggttctagaaaaactattacaataatttattttttatttttaaactataattactttccataataattatttttaataaaaaaaccttatagaaattatatattgcatttgttttacttcggtctaaatctcacacactactgtaatatctatcagtctatgtatttatgtaaatatttaatttctatatatttatataaatgaaagtactaaagaaaatgaggtagcatcctacaatattttaaactattttaagagaattttagtaaatttagttcatttatatatttgtagatgttgagatatatgatttagtaagttctttttttttattatttgaaagaattccacatggattaagaactacattattaatatacttttatactataaataaagtattcttacatttattttgatttgtccaaaaatatatgggtgattgataacttgatcctgctcaattaattataattta

SEQ ID NO: 310721 - DNA, 2433 bp, Cannabis indica
tactcgagagtataaaaaataattggtaggaataacattaaaaacacactgtttcatttaaaatgagaagttgagtagcagactagagttgaaagagcgaatcagagctcagatatcaagaggaacgaagcttaaagagcagaacgaaaaggaagagaacgaggaaataagaagggcaagttagcgcagattagtcgcaacaaaggaagagagttgtttcacatctattctcgcctataaataggggatcccatcattcaaaaacaactcttgacacaccagaccagtctaaactctgccggaatacatctcctacatactacccacctcggaaataggaagcaaagaagggaaccaatatgaacctaggagaaattttgtaaactagcataattaaaatctgtgactggattaatcctggtgtaaataatttgaagttgaaataaaaaaaaaattgagttaattttagcatcaacaactggcatcgtctatgggaatcacaagaacaaaaagttgaggactagcctacagcctaggatgggatctaagaaagtgccaaagaatgcacataaatcaaaagctccaaataaaggagataattcaaggcggatcaatgatcctacaactaatctggttgtgaaaatgaaacaaatgagtcaaaggatgattgggcgggataagcattgttaactcagaaacattccttggtgatgtggacatcaatgtttgacacgtggcatgaaggatgatatcacaaagctgagtagacccgagtcatagcagtcgacttaggagaggaccctagccctgcacccaggctgactctgggatcttcgggatggaagttcgaacttcaataactttccaacccactatctttcagtaatttgtaccatgaagacattgtgcaatctaatccaaggctcgggagctgaaattacacgaacatgcaaactggaagccaacctgggcacctagggtttccacccggtgccaagttaacatcctcaattagggtttcagtttttgaggctgtcttagtgcaaagtggtcaaaacttgcattgagacatcaactagacataccacaaacatatttgaggcattagaatcatatttagagaaagttgatttttgagaacccaacgcccaggttgaaaacctgacaatctaggcactttccaagtgtccgatcaaaaatttgacttttccattgaatctatcttcatcaaaatggggaaataggttattccaaaggaaaaacaataattcctgggcataaataacaaggcccagcgcccaggttgacacttggggctggccctgcgtccaggtttacaatttgccaacctaggccacaaaaatagagtttttcaggaattttttcgagcatcatctccatctttagaaaatattgagattcaactatttccggggaccaaatggaatttccaaaggggcaaaacttccaattcggttcaacaagaagtgctccagccattttttatcgtcataaaaataacaaagatcaaagtaaatttggggagaaaaccacaaacctaagtcccttaaaatagggcccatcgcccaggttgacctggtgttgggcccactacccaagttggacaatcaacatggggatgctaccttcaaatgctcaaatgccaaatccgatacgaccattgaatccagcatggtcaaaaatgggggaagagaccttgtcctcaagtttggtagccttagaagtatcaaaaatagaatcttgaaagcttggttcaaagggcccaacacccaggtcaataaatggcctggtttgctgggttttgctttatccaaatctgatgtcgttttgaccgttcgtctggtatttcacaagacaatgatccatgaagttagaacagtcaaattcccaacttcaattttttgacaaattgacttattcagaaattagaagtttcgagtcttccatttttgtaaaacagcaacatctttgagaactggtgacttgcttccctaaaacatataaatggactaagtggtgtcaaattatcatataggcatcttaaaggacacaccttagatgtttctacacttatacaatgttcaggttgacgtagatgtcaacctggacattgggatgtcaacatgggcactggttgtcaacctgggtgctaggacctaaactaccttcagtataattgacataactcactcaatgtttatctgattgacgcggttcaacttgcattttgaagctatttaaattctctatcaagtcatgtctcacaccccatgcgtaattctaaagctatcattgtcaaaatttacccccaagagagttatgataataagctctaggtaacacgcagtggaacccgtcaggcaccaaaaattggccatcgctaccagatgctaattttcaccgttaaatcat

SEQ ID NO: 310722 - DNA, 1762 bp, Cannabis indica
ggtaaaataatttccaacaccagatcccttggattcatttgcaccgctgcctgcttctcatctagccaaactttggctttcaagtcctgtgcctggatatctgagaatccctgctgatttatttgcttaaaaaccttctttagagccttcaacttagttacaacttgaaacatattcgtccccggaacattgaccttccatacatcttccacactctgcttgaaagaaggataacttgaccacattctgaaatatttgaatggtttcctactactagaagtattaggatacaccgtcaataaggcaggggtgtgatcaaatagcccttcattgaggaacatggcctccgcattcaggaaagtagccaaccatctctgattttccataatccgatcaatctttgagtatactctatcttcccctttttgcttgttcttccaagtgaagaagcttctactttgcttaacatcttctaattgacattctatcacacactccttgaacttggaatgactatagctttcttttttcccaattctttcccctttctccaatatgtcattaaaatccccaagcactagccatgattccttcactttaattgttgtcatttccttccatagtaagttcctcccatcaacattgttataaccatagacaaaagaaacatagaaattatttcggttgtccaaagttgtaacatgaagatgaatcatttggcttgaacagaacaagatattgacattgaaacttccaggattccaagccactataattcttcccccttttgcccaagcaatatttgaagtgaaacaccaattagcaaacattctaacatacaaggctccaagtttggaagccttgactctcgtctcgaggagaccaacaagtcctatcttatatctctcaatgaaccccttaacttcttgttgctttttaggactgttgattcctcggacattccaactcaagattctatccattgaggagaggaggctgtccccctcctcttggttctccaattttaggccattcttcgttattaagttccccctgttctatcaaatgcccagcaacttcctgaagcacattgaaggtattggaagtttgaggatcagtcaacgaaatctaatttttctacttccaacccttagaaaccggtttgaacccatccttatcaacttctatctctttattctccccttttctctttaacaacccattcctgcttcttcccttctttcttcctacattcatcagccttgtgtcccatacctttgcaatgtttacaaattatgggcttccattcataatgcactctaaccgacacattagtgccatactcattctcaaaactaatcatatccgggaactcttgactcatagtcacctcaatcaacaccctcgggtatgctaacttctccctacccttagtaacctcatctaacataacaggtttatccaattgacctattatcttaaacaaggatctttggccccaatacttaagctctagatcttcaagctgaacccatattggtactgttctaatgtcctctttcttgagattcaaatttggatcccaagccttcatgataaccggtctcttgttaaagaaaatataaccccctgacaatatttcatcccttatttcacaattatcaaatctgattatgaaaattccataggaaatcatacctatcttgtccactttatccttccaaatacaacctattttttaattttaaaaacaaaaacaaaa

SEQ ID NO: 310723 - DNA, 1424 bp, Cannabis indica
atattttctgtgtaataattccaaagggaaggggaattgagggtcagagtgattgaacataaaaagtcactttattttgctacaatcaatgtaagaatctaaaaacaaatatgtgtttatcaaatcgtttgataataatattttaggatgttagattattatgttaatattcaaatatacataataattaattaaattctagtaaaataagttctaacaacaagcctcagagccttagtaaaatttactttcatgttaaataggttttaaaacgatacttcatgttttgaatgtgatttggatggtttcatgttaattgtttatgttttgatgattttctgtgaaaattgtatatgtttctatagaaattaagtttattattcatgtttattattttaaaattattttagaaagtgtgtttgattgagatttatgcatgaaatttttttaagatgagatttgggtcaaaattgacccaaaaccctaattttgggttgctggccaattagtgctcgcattcataggtgcaaagctgagttttctcggctaggggtgtatcccacacgcgcatcatccctgagaaaccctgtcactttacgtgtaactcgggatgttggccgaggtttcttggcttctccttgatgctttcactcgtcagttctcggtcctctagtcctttttctcgcgagtgatgtgtgttccaggacagatgcacattggtgactagtaaccagtcacctcgttaccagtttgtcactaatgaattattgtggtatattttagttaaaaaatcatttttgattaaaataaatataaaaaatgttagaaaattaatatttcatttttgaacttaaatatcaaatctaaattcatatatttaattttttgaataaattattattaattttaaattttaatgaagcttagaaacttatttttatttattctaaatgcatttgaattgtggtatgaatttaaatttcattagtttatcatttaattcataagatcaattatcaaaatattagatagattttaattaattggcaattttaatcttttatttaaaatattatatttttatattccaattaaatactaataatattgaaaactagtctaaatatttcataaatatcctaattataattgttcaatttttaaattttgtatatttattattatttttatgtatttgagttacaagaaaaataatattggcaatatcttgaatttttattacttttaaattttagatatcaattttgcttattagttgtttaaaccattaaaatataataaaatagcctagataatttgtagaataattgacagaaagtatttagaatttataaagattttacatttagcctcttcttgtccacctctacggactaaagcaagcctccgcaatccatagcatt

SEQ ID NO: 310724 - DNA, 1461 bp, Cannabis indica
ttttaaacagtcatttaactttattagggaaggttttctaaaaaaactgttttgaaaactgacgggaataagctattttgtagtagtgttgggaactcttttcaatattctttgttgtgtggtggtgatttaaataaaattttatatgctcatgaaaaagaagggcgagtgtgagattgtcctatcttatacataacttctaaagtgctttagatgagtgtagtttcatgaatatgagtttttctagaccaaaatttacttggtgtaattgtcatgagaattcttcttttacttaagtggatatgaattacgaattttgccaaaaccgtctctaaaagccctttctatagtagtgtagagaaattagaaagggaaacacaagagaaaaaggaagtaagaaaagagaaaaagttgaaagatttgtggatcctggcattcgaaatatggattgaaagattagaccagttgtaactccaccatttttgatagtgcatactctgagcatctctgaggcaagatcaccaacgatgtaatatggatttttggtgaaccttgtaaaatctggttgtgtctttcttttctcccatttttcttttggctatttctctatctctctgtgattgaatgtgtgtgtgtgtgcatgtgaaaccctagcagagctgcgtgcgtttgtgattttcttgaacattcaagcttagtaaggaagaagaaaactatacctaggtttaggttttagttttgggttgggtcgagacttttgtttgggttgtgttattggtttacactgtggacgcatagtgttttcaataatagttataattatatcactcaatataagtgtctcataatcacattaaaacattattataaatatgatatgctaggtgggaggatatgactgaaacaaaaacattacttcaaattgcatacaattttcagctacatagctagtactcttggataagttcttcattagtattaatagtattaatagtatctccttgttcaaatctttcttcactcatttttgtggcagaattcaacaagaatgccatctcctttttcacttcttcaactgttgacacatagtcatgaaatttataatcttctttgaacaattgacttggaggaattatttttccatctctagatttttggattttccatcttcttatttattctcataggtatcagctcttagaaaaaaattgatttcaaattctttccattccaatttttgttgaatatattttgatcttgtagcttctacaaccatttggtaacaactagaagattttggcgaagttagtttgtaggattcgcgctatcaaatctcttaaatgcttagagagagttgtctaatgactggaattgtaaattagtttttctctgtttcctaaaatatcataatttgttttgagattaacttcaacttttttagtacattggtttttttttttt

SEQ ID NO: 310725 - DNA, 2866 bp, Cannabis indica
aaacttcctcaatgaggggctttatgatcactctcctagtattctatcattgtatcctagatggtcgaatgggaagaaacctttcaggtatttttgaatgtggaaaagtttccctgggtatgaacagaaggtcacagaggtttggagaaagaagactgaaggaacaaaaggtatcaagtgattagcaagctcaaagatctcaaggctgttttcatggagatcaatagagttggttattctgacatttacacggcagtaatgcaagctagaaaggagctaaacaaaaaacagaatgaggtgcaccagaaccctttagatgaatctgctattgctgaagaacaccaagccagaaccagattacttcaagtgtagaaggattactcttcttttctgcagcaaaaagcaaaagcctgttggattcaaaatggagatagtaacactgctatttttcatgcgagcatcaaatagagagtaaggcagaaccaagttttctcaattgaacatcagaatggtgtacgggtgactgaaccgaagtagatttctgatgcttttgtggattattatcagagtttgttgggttcaaaaatggagaatagaaggaaagtggtgaagagcatcatagcaaggggtccggttctgagttcccttgaagctgattcccttacaaaaaggttcaccaaagaagaagtgaagcaggctttgtttgacatacctggcaacaaggttcctggccgcgatggctactctagtttcttttatcaggacaactgggatctggtgggagaggacatggtggaagctgtgacatcctttcttgaaacaggtaattgcataaggagataaataatacagttttgactttggtgccaaaagttaagtgtccaaatacattaaaggattttagaccaatagcttgttgcaatgttatttataagattgcaaccaagctattgtgcgctagaatcaaaacctttcttcctaatatagtctgtcaaactcaaggaggctttattaggggaaggttcattgggcataatatcatgatttgtcaggatattcttaggcattatggaaggaaaaataataaggccagttgtatcattaagcttgatttacaaaaggcctatcataccatagaatgggattttattgaagaaatgttgcatggcctaagctttcctactagattcattagtcttgtgatgacttgtattagaacaccaagattctcattgatgtttaatggaaccttgcatggattttttgaatcgaaaagaggactcagacaaggagatccaatgtcacctctgttatttgtgttgggtatggaatacttatcttgaataatgggtaaggtaggagaaaagaatgacttccattttcaccacaggtgtgctgaaattaaactgaaccatcttgcctttgctgatgatgtaatactgtgttgcaatggagattttgggagtgtccattacttattacaagagctcaagttattctctatgacctctggactgtaccctaatgcctcaaaatcttccatatatttgagcaatatgcctaatgatcaattgagtaaactgctgcagatatcaggttttataaacaagtccctgtcttttacttaccttggtgttccaattggagctaagaagatttcgggtaaagaatgtgaagtattggctaagaagatgattgctcgaagcaaaacatggagtacaaggaatctatcctttgttggatgggtagtccttattaactctgtgttaatggctatccatgcctattggtgccaagtcctaatcctacctagcaaagtggggaaaaaaattgaagcaatttgtaggaattatttgtggaatgggaaagaaacatatcaaggccatggagctttatctcgggaatctatttgccaactaaagtcagctggtggaataggtttcaagtgcgtagctgcttagaatagagcgacaatgggcaagtacgtgtgggcaattttaaataaagaggatacactttggctgagatgggttaatagtgtttatctccgtaatgaggactggtgggactacaaattaccaagccaaagtagttcgtattggaagagcttggtgaggctcaaagatcagatgaaagaagtttcaggcagcattgttttgcagtagaaatacacgattgctcagggatataatctgttcaaaccagcagggaaaaaatgcattggcctaagcaagtttggagtaggttgaactcacccaaagatagctttgtgctatggcttgctatgcaccagagattgaaaaccagagatagactcttcaagatgaaaatcgtggaagatcaggtttgtttactctgctgtacacatcaagaatctgctgaacacctcttttttggttgtactgaaaccagcaggtgcttgcaggaattgacaacttggctaaataggaaaacttctcacacttctctccccaatctcatcaagtggattgggagaactaagttgagtaagtttaagaaaatgacatatgctgcctagccagcttgacatacaatatatggagattgagaaataggtgttattgggtgaaagcaaatccagaaactgatttgctgattaaagagttaaaggctgaagtaacacatcgaatacatttgttctggccaaagaaaatttcagaggaggataaacaatggtttttgactttgtgaataacgtaattgtgtagaatgaattgtggttttatggaatacatgtatagatgattatttaggcccttgatgggtgctattagactgtaaagacctttttatgtgccaatacaatttctgattcataaaaaaaaaatcaacttaaaatggaata

SEQ ID NO: 310726 - DNA, 839 bp, Cannabis indica
aatttatttaaaaaaaaatatttcgaaataattgatactacatgattctgtctagatccaatgatctagaatctgggtcttatatgtaccttgtttgagacaataatagagtctgtactgataaaattagagaaaaattacagttttataattattgaatatttatgtcgctaaaaataaacattagatttatgtcacttaaaaacttaaaagtactttaggtacttatgcttttatctaccttaaatattattatattaaaaggtatcaaattaatatttttttataatgaaaaactttattgaaaattaataaagattttaaatgggtaaaataaaataatgtgtaagtatatattatgaatattataacatgtctaaatcactcagatcaatatcattgtatctccttttattttatgagaaaattgcagtaaaattttcaaaaattttattttgatgcagataagtcttcaatattgaaaaatagcgataatagtccttaagctcaaaattcttgtaagtccgttggtccggcctctttttaacagatccattaattcaccttaaaatatcacgtgttgatattaaattgcggtataagtccccaaaaaatttactttgatgcagataagtcctattctaaaaaaaaaaattggttatagtccctaagcttgatattctcgttagtttgtaggtacccaatttaacagctctatttgtagttcttaaaattttcacgtgtcaaaaagtttattagttcagaacataaaaattatttaaataataaaaaaattatgtaaaactttttattttttttattttcttttattaaagatt

SEQ ID NO: 310727 - DNA, 834 bp, Cannabis indica
ttagttgttcaaatagtagaataataaatagatgtttagttttttttatcagttcatattaagattctttgtatgttgtgcttatatttttttaaagttgtcgacaatatttgttgatatttgattgattgacatatttaaattgtggagtagtatttttgttattttttagttggtccaaaaaaattaaaagtcattttatatatatatatatataattttgatcaaattgttaataataaataaaactatactatttaaagcattttattttacataatttattatattatttattgaagtacttttaagtactttatttctatttttttttccattaagtaatttgtagttacttttgttgttttgtaaatttttcaagctatctacactattttgttgatgttcaattaaattgcatatctaagtagtgttgttatgtagttgttattgttatttgaccaattcacgaatgactatatttttttttgttatgcatacatatatatttatgagttgatatatatgtgttttgtagtttttttttatttttttatattatttttgtgttattttttaatttttttaattgatgtaatgttttgatgttaaactaattttcatattacaccgagttgttatctagttgtttgtacgctattttttagttatttaaataagataaaaataaatatatttaaatagtaaattattattgtgtgattggatatatatatatatatatatactaggtggatgttacgtggcaagccacgtaaatgttagttttatttaatgttttttttttagattttggtaatttaagtcgttatg

SEQ ID NO: 310728 - DNA, 1430 bp, Cannabis indica
ggaggaagagagaaagatttgggggttgttggattaagtttttggtagatgaggaggttcggtggtggaggagaagaggttcagtggtggtgattggtggtctcaatgcctgagtttgagggaaagagagtgaggaagagaaagagacaaagagagaaggaaaatgaaagggagggtattttgggtagaaattgaaaacaatagcattaaattgtataaattaattatgagtctaaattttgttagaaggtatttttttaagcattaaaaatgaaatttcccattggtaaaggtcgaaagtgaccgtggtttaatactgattatttgatgttggtgtagggcatagttggaaaagactaaaatttcctacaaataataagtttaattatgattatcttataatgcatgctcctatttctattgtcaggatgcatgagtactcataatattttcatattttttcaactttaatagttcttacttcttaatatcttatcaatatttcacagttttttaaaattaaactttggacaattgatttttatcatttttgtaatataaatattaaagtctaaactattaatctcaacccaacccttatatcattaaagtatagttgggttgtgcaattaaaaaaaagtgaatgatttatagtttttccaaatcgcggttattgagttggtccattaaaacatttccaatctagccaacctaacacatgtgcaaccctaatcacaggcaactaaacagtgtaaaattgattcacctaccccatgacaaatcagacacaacaaagaagcatccacatgtttagtcttcaactaaactcttgtaggaagatacccactaaccgccctccatatacaatttttttgtctctaaaggaagttttaattgccaaaacttctttcaaaacgccataatcaccccgtccacactattctcacgttttgcctataataatttaacgcactctcaacggtatactcgtcagaaaattcaaacccccaataccaataatccttagtaaccataaccaaattagaaagggaaatatcaagaatagtaaaacgatcaataattgtttgatttatgagttttcaagacttatatataccacatctcattgtattattgtaggagcttcaagcaacaaatgaatgattggaataaaattttcgaacaatattttctaaatgtatcaaacttcacgttccaattgattgtaattcttgaactttgaacacgaatcctgattttattaatgacttgtacaatttcatcttgtgattatgagccttaaggtggcgtttggttgggaggaataaaaatataggaatgaaaataggaacggaataaaatttaaaatacataaaaaaaattattaaattttttctcaccatgcattggaatggtttttccttctattt

SEQ ID NO: 310729 - DNA, 1077 bp, Cannabis indica
atagtatatatatctaagttgggatacaaagtgattcttgtaataataattaagataagagttggtgccatggaaaaaacgagggctaagaacgtggggaaatcgaaagcttcaactaagaaaatcaagaaaaagggtccaacgtcaactacggatgctaagaaaatgaagtccatagatgaggtgcttggagtcaaacccatggaattcacggatgaggaagatggtgagggcgattcggacccattgcgtgatctgtttcaaccaccactatcaccaaaatcttctttgcaatcgatcatacaacgagaagaggtagctattgattttggtcactttctttctgcaaacaagaagtgccaagattctatcttaaaaggacaaaagactactccaccaatactcagatcagggactgtgatgaggaacctggaatcctcctttgctgatcagagtatggagaagaaggtcagaataaccttggaggatatagaagcagaagttgcttattggaaatcagccattgtttgctatgtcttaggtgctaatccacctctctcgatccttgaaggctttgctcgaagaatttagaaggacaaagtggataaaataggtatgatatcttatggtattttcattatcagatttactagtagtgagatcagggacgaagtgttagccggggggtacatacgtccagttattatgaaagcatgggatccaaattttaacctaaaaaaggaggatatttgaatagttccaatcttgatttagcttgaagatttggaattgaagtattggggtcaaaggtctcttttcaagataataggtcagctagggaagcctcttatgatggatgaggttacaaagggcagagataagcttgcttgcccgagggtgttaatcgaggtttccatgaatcaggatttttttaatatgattcattttgagaatgaacatgggaatgatatttcggtcgggtagaattatgggtggaaaccataatttgtaagcattacaaaggagtgggtcacaaagtggaagattgcaggaaaaaagtgttggaaatttatttta

SEQ ID NO: 310730 - DNA, 709 bp, Cannabis indica
gtcaacaagggatacaattgggatttggaagaaacctaggagctgagaaagggagagaatagggatacgaaaggatttaggtgttgaagtttttgctttttggttttaactaactaagtattaaaaataaaataatatttaaaaagtatataatattataagtattaaaagaatatataatattatatgtgtttaatgtttgtactttagcaatttagtatatacaatattcgagtctcggattcacagttgaatcctatttagcagtcttctcaaaatcctaacccaatacctgattaatgcatttttcatattagacctaaccaacagtctgggttttgtttttttcaattttttcggtagcaagttggggcgggtggtcggattttcgagtttctgttttagtccaaatattcaaacctaactaaaactttgttactaaaaataattttttttagtggttgaatataaatgtcttcagaaaaaaaaaaactgacattattatcattaagtaaaacacgaacatagctgaggggctaattttacttttgaatattattgggggttattttttagaatatatattgggggagaagaatatacatatatgtatattaagttgatgttacatgtaatgcacgtataattaatttttttaattaggtgatgtttagtgcaatatattttttatttaggtaagttatttttt

SEQ ID NO: 310731 - DNA, 1147 bp, Cannabis indica
tcaacgttttgtttagtttttttttttttgctttatacttttatttttgttgtttaatagttattttcatattgtttattaagttgttataggattgtttttagttgttttttattttttttattaaaacacggtatttttgtaattttaaacagtattgttttaaaatttgtacaataaaagtaaaataaaatccatgtgttaattttgtaaactttctcctattttataatagttgtgtaagtttcccaataatcattctatttttttaggaatctaaactgagtaccgcgaactcctcatacccatgtcaatattaataacaacagccctaaaaaggtgaaaagcccaaaagcttaacaaacaaaagtgagaaataaagatggactatatattaattagaggggatatttatagtacacccctttaaagagttgttttgtgggctctctatctatttcgatatttagaagagttgtttaatccatttttttttatcgtgtacattatatttattaagaatcacctgtaaattttcaaaattttttgagtactttataatgccaaaaataagatttaattattttattgtacgcacgactattttttttatatgtgtggtaagtaattatttcaaccttattctctataagctattcagatttttttgaaaatttaaaagtgatccaaatagctacaacatatgcaattataaacaagaaagacaaaaagaaaaaaaaacttttacaagatacgaaatagacatgagtctactagaacactcatttaaaggtgtattataaaaatcttatactatataaagattttatatttatcattattattattatattattattattattagagtattgttataagagtatcatagtaagaatttagtaaatgattttttttttttttttggtagtgagattgaacgtgatagaaaaaacatatttttctataatagcacttaattaaatagtattagatccaatacttaatgatactgataataaaatcatatttttccataatagctattaattaagggaaatttgacataatatacttaaaaaagtataaattgtttttatatgatttttaaaaaatataaaaataataccctctaaacatctttaat

SEQ ID NO: 310732 - DNA, 1418 bp, Cannabis indica
tattatccagtattaatacattcccatccaattgttgtgtagctgattcctccatttgtgagtcagagatctctacactgagattattttccttattagtcttcctagaatcttgcaaaatcacctcctgattcaaattagcttctttttctccacctttatctccacgattattgccaccttcctctccctggctgtcactttccatattggtctctcccatatgattctccaacgatccaccactgctctctccgaccaccgcccctggagtccaccctcgagttctaagccacaccctcgagttctaagccatttcgcaccaatgttttgctttcgttctggaatttggctctcataaactccccataaggcttaacaatttggtctagtggcttgtcaaaaagtttgacacaaaacctttctgaatggccaatgattccacatataaaacaaaaggttggcgctctttcatacttgaaagtagcccaaaatgttgttccatcaggctttgtcagtctcatacgccttctcaatggtttattgatgtcgatggtcacccgcactctgaagtaatccctccacacgcccaaaaaattcttaggatccgactccacaaactgccccattactttggctatattacgaagaacactatccgacatacaaccaggttgcaaatcgaaaacttgaacccagatgtctaacttattcaacattatctcctgtggattctccccctctttcaatctggccagtaaattgcatccgattaaatgtccaagggctccctgtaatcaccctttggatgtcccatgataaaattgaaacaaatacctgtctggtggtagttccttgacaaacatgcccatgcctggtttccatagtgaagcaagtacattctgcattgtttcaaaatcgaagtctctatctgataaaaatctgcccactaagcaccatctcgcatcgatcccatcgtcttcatccctctcctcaatcgctacctcatcctcctcttcttctgctacctgcactctcatcacctcctcctccaaagctttcatattccaacttccggacaccataatactggagtaaacacaaaccaataatacaaactaattccagaaaaaaacgattaacacaccatgtcaaaagaaaagactgtaatataatcattattataattagaaattgatggggtaacttttttagataactttatataattgtgttgttaagcacaatgatgtggcagtctaatcttttagtatttaaatttttctaatttgtggtttaatctaactttttcttattattttattacatataataataataattctaaatagttcagttataagagaatatgtgtaaagcccgcttagttaatttggaaattagcagttatttatgtt

SEQ ID NO: 310733 - DNA, 1798 bp, Cannabis indica
tgagctcgagagtgcccaaaaagaagtcatggatgacctcaaagcccatcaaaaaacccaagaagagcttaatgatgccaaataaaaacttgaagaggctgaggccaatgctaaggctagatgtaattcggttgctaatcattctatctatagagcttggttggagaatccaaatatggacttgagtttcttagaaaatggtgtcgaggagatgttggcattctttgagcagaccaaaaaagataaagatgctacagaagaggaagttgaagaagaagaacagaaacccactaaatctccaactatgtacatttaatttttatcattttaatttctaaacaatgagctttaggccaagaccatggtttgccccttgtggaatttttttgtaatactattcaaaccttttctttgttggatggccaacattgctaatttatatatatttacttgtatgccttttatcctacttttttgagttattaatatttacttattcatttttactcacaacaaaataatcttcaacttagcttaggatattttagggttacatgcgttctattatcattattttgttatttaatagacgagcagttaataatctgctaagttttgtgaggagttaataatctgcttcacatcctgcatgcagtttgtaatatgctatgttcagagaaaacttcaaatattttgaatagttcttttaagaactatttcgaatactttttgattgctcgtgtgaatagctaagcatctattcatactttagcttatgtattatccttcaaaacatgttagtatatcgtttgtaatacatactataatatgcgagccgttatttactcatatcgcatgtaggtttttgttgttttatgagaaaaaatctcacttacaacaactaattcagtttccacttaaagaaaggtttttcaactcttgactttgaactatcttacaatagttttttaatcaatcatcttttgtgaaaaaattttaatttttaggtttttagcattttcgaatatatttctaggtggaatctagttattatacacatatatgtcctccaagtaattctaaaaaaaataaaactttataattacttaaaaaattcaaattctattcagaataataaaccattattacaaagattaatacaacatttacataataaattactggtaataaggccgtaaatgctcgtcattccagtgattctttattagcgatctattaagccaagctaatctataaaccccagttccaactatagattcaatgatgtacggaccttcccagtttgggttaaacactctatacgtgtgtttgcaaatccacgtcttaacaccaaatcttcaactttaaagagcctcttccaaattcttttgttaaaatatctcgtaatccggtgttgataagcagcattggtcatttatgactcgttgcatttttgttcaagaaaatcagaggacatattcaatagttcttggttttgttcttgattgtagaatttacgtctgtgtgtcgcaatgtttacctctacaggtaacattgcttttgagccaaattccattgaaaatggagtgtgtccagttgctgttttctccgtggttctgtgggcccaaagcacttgtggtagcttttcaacccatctccctttggccgcgtctaacttattcttgatagtatccttcaaggttttattaatagcttctacttgtccatttgcttgaggccttgtgtaatatcccgaaaaataaataatatttaaataaacatattttattaaatatgt

SEQ ID NO: 310734 - DNA, 579 bp, Cannabis indica
caattgtgtttaagttggtttatttaaaattgaatgtttctttcttttcaagaaattaataaaattgatcaagttcttcatacttaaattgttgctctattcaaatttagattgaagctttatgatgttgtatgtctcacaattcatttttattatgttcacagatttgtttaaacaataatttaatgggaacttttgtcagtaaaagtggttgagctttatttataatattagtatagttatcattctttttccgattggtcttgcttaggtattttataatattatttatggaagattttgattaaatatgaaacctattcacttaaaacaaaatcaagagtgcatgatgcatctctctacatatcttgaacagaatattttcaaactatttggcaatattagattgtattcatatttgactttagcataaatcaaattacctgatgcttatgataaattattattgttaattactcaaacttgagttagacaagacacttatggttcaagtctgtctaacaatgggctgagttggagaaacttaggcttctcatgattgtttctggataaattact

SEQ ID NO: 310735 - DNA, 986 bp, Cannabis indica
tactttctcagcatggagatatgtaacacactatacactccgaacaatgcaagagttaaagctagctgataggctatctggcatgcttactccaatataaaaaggtcaaagtaatctagggtttaacttccctttctacgtatcattctcatagacgatacccggagaaaaatagaatctcccatttggaacttgattttcctacgctttgaatcagcgtagcttttctgtgtactcaatgaggcgagcatacaactcgaattcattatatattcttataagttccttggatctttccggttcatcataatctgttctcacatgcctcattctagtgaacaggtgtcccatatttttctcgtaccacacttattgaagtacctaaccaatggtatatttaattattacttttaaacaaacactccgacaaggggagagattattccaagataatccaacatttatcaaatatgtccgcaacatgttttctaatattccaaaaatcctctcagattacccatttcaagaatgaaacattgtactatttttgctttaatccccatggttctcaataaccttctttaactcttaatatcatagccaaagatatcaactttagaatttcacaagattagactattccttcgtatgaactctatatcctcatttactgtattaattgtttgcactggtagatagcatattaacttggtatgtccaaccactactactcggtcaaaattataagatcccacagtacatagttcataattatgtcatttctattcttcatatgggatctcctaagctgatgtactgatttaacttattaacaagctaaatatttatttctgatagatatccaattatagcattccttacatccatccactaatatatactaatctcgatgccttataaatctttacttattaacatattccttcctcttgataatttctagaatgactgttgattctgcatcc

SEQ ID NO: 310736 - DNA, 737 bp, Cannabis indica
attaaactttattttgacaaaaaatcaattcagagttctatttgtactattttaaaaaataaaagatctattttatcatttaacaaaacacagtgcccaatcggtaacttttataaaacagagggtctaaaatggtatttactctatttattattttatgggtgtaaatataacttaaagttcctttaagaaagatattgattagtcatagtttgccacgtaatgaaatcaattttacctatggataagttctcagtattaacgagtatcgaggtgccatgtatttcggttgtagatattgagtttcacgttggccacactagatttccgcttcccaaatttaactttcatgtaggacgaatttaggttgaatttctataaaatttgaccaaaggacactgttaaattattacactgaaataaaaaaaaaataaacaatgaaaaaagctttaatttatttgtctatttattgttcgtaatgttaaccaattagatttcatcacgttgagtagccgacaaaatgaatttacacatatacccctgatcatttttcaaaatgacaagattatccaattacagtatgacgtgtcatgatataaatggtattattatgtaaataagtagaagaatattcagaacccttctattcagtgcgtttatctgtttttatttttactttgttatttattcaaaaatataaattaataattttatttatttatttattttgtaattag

SEQ ID NO: 310737 - DNA, 3045 bp, Cannabis indica
attaatactttgtcacacttaattatttacaacttaattatttaatctaaatattatattatataaaataatataacattcccccaatagattaaataatatctcatttgtaacaaataattttgtagcaaataatataacaacaatctttagatactaatattgcaataatctgtgtatttggattttaaattctgcagatgatgcttacttctttctttttttttctctgcagaaaggagggatagaaatacacattcactatgtgcattctgtttgtgtccttaccaaagatagaagtgtatctctatgtggtatttttgagtaattctttccactccacgatctgctaagaagactgtcttgagagcacctagcacgccccacaaaaatgtcagattatatgtcatagtctattacttaaatgcttaacaaaacatgtggaaaatgacataggaaagccaacttactttactttggcatgatctcaaaattttggttataaaatgacactgcctatgaaagtctgttattagatttctataatctgtaatatcataataatatatatgagtaataataggatcaatttgcttttctttttgttctatactatttccatctttatcttctttttatcatggataataatatgaaatgaatctcatcttaggtgcttataagtaagtgtatttttggttgcaattgaaaacaatggaatggcgattccttccaaagtgagaggagaggatattctaatgcataatgaatatatgtaacttattttcctcatattaaatgtcattttattctcattcttgtttctttattttcattttaaatcaacccatattgtaaatgcagtaacaacaatcgaaagtgtttatgagattttcagaataccaattataaataattagaactgaagaaataaataattaacagagaaagagtaagaacaacacaaacattttttacttggttggggtgttaacgagtcttagtccacgagtcaatgttattatgtaactttaagctagaaaaacctttgggaatacaatgagcataagttctcaagttttcctgaaaaatattgtaagagaatttagtccttaattcgaaggattcattgggtatttatagtgttaagagaattgtacttagtttctcttttcccactattagggagcttacattgaattacttaacttgggtcgtctcgtgaagtccaacccacgaaggagacaatcttctgactaggcagattagatacaattaaatttgtcaaaatcgtatcttataatcgtgggcaattaatcatgaattaattgtttaatctttatttaggaagttttcccttttttcttgatataatcttctgtcaaaatttgggagcatttatttccttatttgtgcaaatgaataaaaaggaaaactagactggtcttctaggaacattcgtgcttcccccttggcacacttggacttggagctcttcttgactggtggctccacttccaacactacctccttagaaaggtcgatgactgactcaccaaactcttctcctggggcggtacctcgtccaccttgggttgtttggccaaaggtacctagccaaagctgtcacccaacctcttcttcaaggcttgaaacaccttctgagacatatctgcatataaataaaacaagaaggttaaaagtgaatacactataagccaatgcaattgaaaattaaatgcaagttaaggtaccttgcacgtaggcaggagcattctcccgaacaagcagagatggagcatcatcatctgaggaatcctcttgttcctgctccaccaggatgcctttcccttttccgctattggggcgaacgaccgagcaactctttcaggtccttccctgatcttgatagatcactcaataggacatactggcttttttggaggggccttcctcttcttcttcttcaagctcggggcttcctggttgggcacagtctctttagatgccatagcctttggcacaaaattggacagaaacaacttgtacttgatgaaattggcctcggtggccaagagagagatgttctgttcagtaggagaaagttgaagaatcttctacgccctcttcttaagctctagtgtgaatggagggcggcaataggacgtcacctgcaggaagctggtatggtcggtgtccatacccttgacgaaataatactcgtccatgcagcctcctatttttgtcacctcggtggccgtggtgcccgtcaaccatttttcccgatttgagaaaaatagaagtaccctgacctattttgcttagggcttgacttcagatcgaaaagccaattggtgtcatggggggacgactcaccccatccttgcgaggcgtagagtatgaacagggcagacaaatacttgaggcccttgggggtgaactgagtcgaacttatgtgatagtagtccgcaatcttcttgaaatatgagagcaagggaaacatcgcaccctgcttggtgtgagctcccgaccaggcataataaccttcttttgggttagtcgccagttggtcgggggagggaaggaagtattcgacattcccgaggtaaccacaattgagcaaatttgtcatctgtgtcatggccaccacgaatggtggagaaatccattgatctcctaatgcacctcacctcctcaaaggaatagcctcggtgtattcctcaacaacatagtccttgtcgacctttagcacgtcgcctacctcagaaattagctctccttcttcattgcagccaccaaatggtagcacctgagctacgccctcttcctcatctcttttagcatcaagaggagtagcaggacggacctcgccctggtcctccacctcttggacttcaacgtccccaacaatatccctctctttagtatttggtcgggcctgttctgttggaaatattttaccaggatctagatttactaacaagtatgtttgattaacatcctaatatgaattctaaaacaatgaaataaacacataagagttta

SEQ ID NO: 310738 - DNA, 525 bp, Cannabis indica
ttagaagaaaatacaaagccatcacatgagtgtcaaagaaggctaaatccaaacacgaaataggtagttagagaagagattcttaaataattagatgtgggtattatataccctatttctgatagttcatgggtcagtccgatccatgttgttcctaagaagtatggaattaatgtagtcaagaattcaaacaatgaattgattcccactaaaatctaaattggatggagagtgtgcattgactataaaaaactgaatagcctcactagtaaagaccatttctcctaaccgttcattgaccaaatggttgaaagattagctggtcacgactactactattttctcgacggttacttgggatacaaccaaatcttgatagcacatgaggatcaagaaaataccacttttagatgtccttttggaacttttgcttatcgacgtatatcttttgggttatgtaatgcacttgcaacgtttcaaaggtgtatgattgcaatttttttatagagtgggagctatctgaga

SEQ ID NO: 310739 - DNA, 826 bp, Cannabis indica
gacttctaatcttctattgatagcaaaaaaaattatattgaaatgagttttatttagggcataaaatttcaataaactcccacttgcactaacataaaacaagaagatcatttcaattaatcttttgtcttgatattcatatcaagtgtagtgtgtttgactatacccaaataataaaaactataaagttgcatcaagcaatagctttctccattattacttctttttgtgttcataaaacattatgcaacatcctttttcaatatgtactactcctctagagatatggaatactttattgcttaatattacaaatgcttacaatataaaccctagatttgatttcctattatttttcttgaaaaagaagaaagcttgtaggaatttcagcataggttcaacaaatatcgaattgctcaccatttacacatgaaaaatcagggtagtttagatatacatgtgggaaagggcataccctttacctacctagggtttcgtactcaacacacaactaaggctaatattacaacatgatgatctgaccgttttctagtaggaagcttttgttgggaatattttacaaagatctagatttactaacaagtatgttgaattaacatcctaaatttgaatatctctaaaacaatgaaattaaacacataatgatttaaaaaaaccttacattggttttagaggaacataatgactccttccgctaagatctctaacccttgttcctttctgtcgcagagtattatcaagatctgagcctggatctctttctctccttcaattttgattaccaccgtcttactcactatgattg

SEQ ID NO: 310740 - DNA, 917 bp, Cannabis indica
atcttggtaaagaatatgagccactgtataaacattttactaatcttgacataattcaaagaaattcttgcccacctacacaccaacatcagggttgagttgagaggaaacatcgacatgttgttgacactggactcacactgctgtcacaagccaaaatgccattatctttctggtgggaagcttttgcttctgctgcctacttaatgaatcgattacctactcctacactcaattatcaaacacttttcagcaaacaccatattacaacctgctcaaagtttttggttgctcttgttttcctctttgcaaaccttatgcatcacacaaacttgttttcaggtcttccaaatgtgtcttcatagggtacaatatcaatttcaaagggtataggtgtcttcatccctcaggtagaatctctgcggcaagaagtattacttttaaggaacaagaattcccatatactaatctctttcctcccattcagtccactgtcaacacttcaaccaataatcatcaccccttcttcataccaagttgaaacaccattaatccaccaacccaaaatcacatttcaccacctcccagtcctccaccacctccaaacagaacatcaatacaagacagatagtctcctgttaacaccagatcctcttctggttcagcaacttcaccagttgccaatccacccacctgtcccaacaccaatcatcaccctatggtcactaggtccaagttaggcatctacaagccaaatacatttcttgcataatccaatgatgaaaaggaaccaactttatttaaagaaccctttgccaatactaaatggaatgcagccatgaacaatgaaatgagtgctttaaagaaaaagaaaacatggactcttgtgcctaaaacttctgagatgatcattgtgc

SEQ ID NO: 310741 - DNA, 617 bp, Cannabis indica
ttccaataaaaattgaaaaagttatgaagatttgcatatcgggtgccatgggcgtcgaagcttggtgcacgcaagtccggggcacattgtgtctgaagacaagggatgcgcgccttcagacacgcaaggctgcaatcccgtctgtgtgcatgctgcacccgctgaggtttctcgacgcgtcaccctacagtcctcttgttccgtgcgcgtcttgggccatttgcagcctcttttggctacaagtgaagctctcctaggcagcacacccaaaactgcgatttttgttggatttttccccaaatttcaaattttttcgaattttccaaccctaatttcaaaataaaatattatttttaatatatttaaacttaaatatcaatttcaaattaataatatttaatttttaatagattattattaattttatgatattttgaggtttaaatttcaaattttgatttattttattttttttaaaattatggtccaaatttaaaatttttttaatttattttaatatttatatattatttaattataagatcagtatattttaatattagtctatattttaaattaaaatataactttatccttttaatttgtaaatattatat

SEQ ID NO: 310742 - DNA, 1576 bp, Cannabis indica
gtatattaaaaatatatcaatgcggacacataattatatgtaaaatttatattatatttatcttaaaaattacttttaagtgaataatattttaaataaaacttattcgttattattatttatgacataagtgtttgttatatatataatttaatatcatgtatcattactcattgtcaacacgttcatattaaagaaatgttaaaaggcaagatgagtgtttagtattattctatattgctattaaaataattaaatattaaatttcatatcttataaaaaaaatatcacatcttatataatataataaaataatttttacaaaatatctttaaccaattatcgtaaaacaattctggtaccgtattgtaagataaatattaaaaaatatgaatggagtgtctagcactttcctaaatatcatttcataaagtaatggtactattaatcatcaactcatataatttaaaaaaacgctacctatatagataatgttaaacatactcaataataatgttctttaatagtatagcattaccacaagtcattacggtgaggatgtgtcatattaatatatcattaatgcaatttagataatatgaatgtggaaacatttagagttaaatatccatttaaaaaaaattaaataattattatagttcaaagctagattccacatcattaaaatcttaattaaattaatgagtctatacaaaaatattaatgtagtatagttcacatattaaatataataaaattaataaatatatttaaataaatgagtgattacataaggcccgatattatttcagtctagcatttttctgttagaaaataagaactttagagagaatacttgaatggaaaaagccacattttaatctcaacttgtgtgatttgtgacttggtacataatgatgggattacatctctatttataggactctatggactaatctcgcaatattattaaatggctagtttctacattgttctacataattccctctactaacacaagtgaaagataattctagaaaattcaagagtactcaaacaaacaagaaaactctagacactttagtaattataagaatagtctagaaattttagtagcaacaagaaaattctagaaattaactatattaaatcaagtttaatatttcaacaccccccttaaacttgatttgtgtaaagcccgcttagttaatttggaaattagtagtgtttatgattaattatgaaaattatttatagctatttaaataatttattatactgttatttatggaattcagaaatgcatgtttatgtcattcagtagttttctatattttgtcatttccggttgcctggtattttggtaactcggcgtttggctcagtagaaatcacaacttaatatgttagtagtttgggacgagtttttagtacattgggaatgtcgggaatggccgggaatttagaatttcccaaaataccccttacgtgattttattgtggttttagtgtggaggggcattttggtctttttggtccccattagtatgttgtcttttagttgattttattatttg

SEQ ID NO: 310743 - DNA, 677 bp, Cannabis indica
atatatatatatatatatatatgtatatatctgtaatattcagatacatgtggtaacttcatctctcttggttaatgtttatatatatgaaaatgaaattgataaatgaaatgatcgagcataccaaaatttaatgacatatcaatagatagtataggttctcttatataaatatatatgtgtataaacatgccactctatcattaatatatatttatatttctatatattaatcttatcatgattgagagtgaagtgatcatagagaagttgtgtcaaattttttattattattattattattataaatataaatattttgtttggatagtactttgattccatcatactattaatgcgtactaaaatatcagattggaataatggaacaaagtagatagaggatcaaatatgaagtcatcctcatccaaatcaatgaaacttaaaacaagaaatattttctcatcacatccatgtttacagaacttaatacagaatctattgaatttgcataaaataaaaatattattaatgataaatatttaaacatgtgtatctaacaaagtagtagtgggaaaattcaaatctcatgtctccgtattatacgacaatgacacagcaaatacatatatacatatatatatatggggcaatataatatgtatatatataatata

SEQ ID NO: 310744 - DNA, 2412 bp, Cannabis indica
aaataatttccaacatgaagtccacgtgcactaaaggtcctacacagacttgcgggcaaatgttatcctaatttttgcaccaggatgtggcacttgactggatgacacgtgtcttatatttctcaatctaggcaaatggttttactcctagtagcccataaaaattgatatatgaagatccaagtcatacagacatagtaggatgtccgagcagagtcattggtggacatccaaccagctcaattgtgtgaaaaacttgcatgtaccagccatgggatgtgagttggcaatttcaaaagtgatcatactatctccaaacttgcatgtcacgaagcaatccctacttttgtgggattaatttttacattcagagaataaaagcaatcagcctagattttctgattttctcattggaaacatgttcatttcctattttatttcttataaattaagggaaaccattactatgtaattagctcctatatatagtggtctcatttcgctatttagagggacaaaattaattagagagaacactcaagagtggaatcatgatctaagagaaaattactcagagatctttgtaagagctttcaagaaggaatacttcattctttatctcacaagttaatgcaacaaaaaatgggagtaggctattaccactattacggggccgaacctctataaattctggtatttttttacttattatcttttcttttaattatttatttaatcttatcattttaattaagactcactgtcgttggctaaaagtgaggtcaacactcagaatatgttatattttaccctatcagtagactttttgtactaacaagaaccctaatgggtctgggttaacccgatttatcaacaacttgcctataaatatggcatgaaccccatgcaaatggttagaatttctagtgtccaaaaactagaaatacagtgtaaaacatcatagccaagagcttaacagtgacacatggactaaggcttgttaatgtcccaaccacgtaagaattagtgtcttagtttcttcttaatcatacctttttagtttaaccataaattttttgtgactaaatgtgacttttaattagtcacaaaaaaatattacttgtgactaaaatatagtcttagttacaagttgtcactaatttagttttagtcataacaagtattgtgactaaaatacatttagttacaataaattgtaatttttgtgactaagacctttagccacactgacttttaatttagtcacaacatagaaataaataatttataattatagtcacaattattttacttttagttacaagttttattgtgactaaaagtaagattttttgttgtgtaacaatctttatcaattgttttatttagggctaatctaatctaattcatatttatcaattgttagtaatattagactaggccatatattgttatgaaattattcattaatttttttaaaagtctaaaaaagaataattttttttttcttttgctttcttgcaatggatgatgtttgttaagactataaacatatgaatatatatagaaaagaaataaagtcaacatgtgtacataagttggtctctccaccaccattgaaaaataacatatatatctttattacgtggtgtgaacaacacaattacaccatggatgaagtgtgtacgtactatactcgattaatcaagtgctgtttggcagtcaaaatagggcaataaacatcatggtaagcaaatatatataaaatccacaactaccacaaccacatgcatacatatatatatatatatatatatatacatatatgaatgaacatagatgaatatctcatcatcacatcacatatccatcgatctctttctttgatcttaaactttttttcattattactatacgatgatgatgatctctgccgccgtctctccccctgtcttcttcacacgaataaatatataattgcgcatgccccaccccactccccccaaataagagcaggtacgtttatatctagagagtaattatggtatatatatacttgcacaaatatgcactaaaattatacctagtaataatatagatctttcttaatatgcgactcgtcattttaacgtgttgttgactgataaatataatgtaatattattatttatataccatttcatttctcaatctcagtgcatgcgtatatagatgggttcttcgctcttcaatctagctctatcttcacggttgattagagatcgtatacaacttatatcaacatatgcatatatatatatatataggcagccgattttgtgcccatatatgcaaaacacggattggaatccgttgtacggcaggggggtcccaccgtacttttaaatattttttaattttttaaatgtaagt

SEQ ID NO: 310745 - DNA, 1375 bp, Cannabis indica
cattccaaatgaatcactatcaagcccaagaccccattttgcaacactatgcgccaaggtattatactccctattaacatgaaccactctgaggtttgggcaaggagataacaagttcttgatacaaacaattaaatcatccagaatactacaaccctgagtacaagaatataatttatctacaatagacttgcaatccgttcttaaaatgtccacaggcaggtgaatagaagaagcccactgtaaagcaagcacaacagctttagcctcagccaccattggagaaacacagcctgtaaaaggcttagccaaaccagcaacaacctggtgagaatgattcaaaacaacagccccaatactatatttctttctctgcacatcaatggctgcatcagtgaaaatctgaaaagctccctccgatggaacatgttgcaaagctacctgatccaaattggaaatactgggagaaataggaacctgctgagcatccaaaaacttaaagaaaaaagtgacactccaatcataaacatcaaaaggttgaccatcctgcttatggttgaaaaatattattcctttgattccaaagtgcccaaagaaaacaacataaaataccgatataatctttatccagctcctgagacacactacaaaagaaatcatattcattaagatgcttatacttataataatgggtaacaaaccatgaagacttccaagctttcctcgatctggaacaatctagcaaagcatgcttaaccgtttcaggatgtattttgcataaaggacacaatggagaatcaataacacatcttttatgaagagaagaagaaacaggaagagcattagaaagcattctccaaataaagaccttaacttatggaggaactttagaagtccacagtttagaccaaaatttcttagaactagaaaacgaagaagaggagggaatatcttgagaagaaaaagcaaggtgataagcagacttaactgtaaactccccggaactatcatgcccccaaataatatcatccttaccaaactcacccataacagggacactaaggatttcatcaaccaaaggagcagaaaaacacatggcaagcttagaaacaccccaatcctcagcatcattaatgaaatagaacagaaaaggggaaggaggcctattgtccaaagaaaagaatttaatcttgttacaaggaagccaatgatcctcaagagttcgaatatgactgccatcaccaatcttccataaaagccccgaacttaataactctctaccccaaaggatacttctccaagtgaaaaaagggttgtgaacaagtttagcatcaagaaaagcagtacgaggaaaatatctagccttaagaactaa

SEQ ID NO: 310746 - DNA, 672 bp, Cannabis indica
aaaaattatttagtttttaaaaactataaaaaacaaatcttttaaaatttaataggatgtgcttggccaaatttttttaaaataattttctaagtgagttacaaaatacaagaaaatacattgtcagtgaagatagttagttaggacaagtggctcttttctgttaattgtcagttagtgagctgtgcgattaggaaagagttgttactctgtcacaactcctttatttaacagaattcagttagtattgtagtggattgttttatctataaatatcacaaagcttgtgtattcaaacacaactcatttcatcaatctcaacttggtatcactgctctctcatttttttttctttctttgcttgattttgatgcttgaagaagttttccatggcgtcttcctccgctactggtcttaggcctaaaggctcttcctcttccgctactacgtatactccatatatccctttcgtgcaagtcattccaaatcacatcgttcgtctcaatcttcaccttgatcaaaataacttcttctactggtgatcataggttctgtccactgttcgtgcacatcagcttgaaggatttctcagtggaaatcatccatgaccttcggcctgttgggttttatgtcctaaataaaacctatttcaatataatcagatttactgat

SEQ ID NO: 310747 - DNA, 1304 bp, Cannabis indica
gcttcaggaaaattacactttctgaatcagaaaaacctgagccttcactctcttctctagccgccactctctctctctattcttccttcatatttcgaacctctcttagtgggtaaaataatttccaacaaggcgatcgtaaaatcattgttgggttgccaaacaaaaccgctttcaaagaagacttcttatagacaagtgctctctccccaatcaacacaaccacctttcggataatacgtaagtaaatctgctccaaacttggttttagattattccatgtctttaatgttggcctcgctgactttaattttactttttttcgacagttgtctcaaaaaagaccaacccctactctcgagatggccgagcgatgcaagcttctacttggtcttcccttcggtgtccgatcagctgagtttctcctgaacggggccaacctgagatttgttggcctactcgccgaaaacaagtatacttgcgattataagtatcccaagtatgtgtcgtgctagcaggttctagtgccagctgacgaggagactcaggactacgtggctcgggcgcattacctccaaaatgcagtccctcaagaagctgaagaaggagcatcccgaggtaattaatttggatggtcacccatagtgcttagggcagagcgtaccacactagtgtctttttgagatagtcagtataatttttacacctggaatccctttctcatagattgcattgcacataggttcaatagttggtacctagaattccacgtttagattagctgtactaactcctactatgaaattgccgagcagtatggaactctgctggataggtcagatcatatacattcgagttgggatttagaactaattaacccctatgacatattcatgatcacaagatctagagaatttagtgaatactatagtcctccttcttcatgttcttatgattatggtaaatcccttaagtgtgaaataatttctcattttcccctttacctatttttaaacaagtgttaacacattgttttgtctcgcagatatggatctagaagactttctccactcttcaagcaaaaaggggaagaaaaggttaattgcctcgaagacctcctcaaatgtcaacgtggagcccctaaaaaggcccaggaagacgacgaccaataagaagcgagcctcacagaccatagacctcgaggctcctgagaaccaagttcaaactcatcctcctaccctcgcacataccgaagagcccattcccaaaacaagttaggttgcagttgttgggttttgtgccct

SEQ ID NO: 310748 - DNA, 2031 bp, Cannabis indica
tgagacttactgtaaacaatagagcagacagagacataaatactaagaaataaaggaaaaaacctgctaagatgatctctcgtagtagttgatcgttcacaatctgctaccctataaacctgtgttttggaattatcatcttgttccaaatgtttgccacatatctaagtttttttggattggatgaacgcaaagtagaacagtttggccttgaatttacctcttcacacagcttccataagatcacttacccccatagtcaattggagtctaaagattttcttgaagtaccagcttaagatttgtttgaactcaaactcccaaaagctttgacccttcaaatagatggaatcaatctaacgaacccaaagattgtcttgtttgctcgaaatggcccaaatataattggctattagagcaatgttccatttcttatcctctcgaaacccatggccactaaatttctttggaagacacactttctcccacaatgggatgtgaaacttgcttcgattaccattagtacccctaagaaagtccctacaacatttgtcaatagtcgctgtaattttttgagggagaataaacaaactcatccaatagtttttaacccccaaaagaaccgagtgaatcagttgcgcccttcctgcaaaaaaaaaatattcttctagcccagttatgtaagttcttatgaactttgtcaattataatttcacaatcagatgctcgccattttgttggtctaagttgaacaccaaggtatttaaagggaaacttccctcatccatttgcagcacattcaaaagtaattgcttacagtcatcatggacccctccaaagtacacagtggacttcgatttgttggatacaagacctgttgactcactaaagacaataaaagcctcatgaacaagcttaacatatttttcattacctctacaaaagatgatgagatattccacaaagtagaggttcaccagccccaaggtcttgcaaagagggtgaaacccgaagtccatcaccttagatttctagataagtaatctagtcggatacgccatgataagcacaaaaagaaggggggacatctgatccccttcacaaagacccttttcacctttgaatgacccttgtagttgccgattcaacaaaagagaataagaggctccatgaagacacactgctacaaaaataggctttagtgacacgctgttatacttaaaactcgacgagcacattagaagaagacacgtgtctagctgggaagaatgaagaactcaaacacgcaatcgtaagtacacttgacgtgcaataactcgttaaaaacataattagtagagtatgtttataactcggctgactagacagttttatgggagataaaaatgtactaactattgacttgtgtctcaatgagaaaccatgtaaatgcaagtgtgcatgacgaggcattaacctcgtcgcgtggaggagatataatcacaataaaaatacttaatgtatatgacacagtatacaaactaagtataaacagaggagtggatcgaggtgacagatagcaaggtgtctatctcgctgtaagatggcatgcatgtaaaaagatcatctcgacaccataaactgtagttattagaattaaaacaatattaacctcgggaagttatatgacaagccccagctcgccatcaaagttaacttggctccattcccagcgaggcatccccatgagataaggcttaaagtatatctttaatatgcattcatctcggcccaataaaagcgggatattcacagctatgtgaattctaaataaaaaccgcatttacttagcgtgatttgtaatcaaatctcatgatttgagggaataattgttgtaaagattacagtgaactttgtaattaactgctcactatattattataaatagtggcaagcaagatgagaggagggacgaaaaaaactgtaacgccccaatattttgccttattttacaaagtgctaattttgatgcattaattaaaaagattcaaa

SEQ ID NO: 310749 - DNA, 4288 bp, Cannabis indica
taaatctagattctggtaaaataaatctcaacataatgctcctcacttggtctgcaaattgaataaggctttatatgggctcaaataggcaccaagggcctagtttaagaagttgcaacaatgcttgatgaattttggttttttctcctccaaatcaaaccatagcttgtttattcaacacacttccaggtatgtaacttaaatacttgtgtatgtggatgacataatcatcacaggtagtaatctagatattgtttcaacattgatcaaagcattggactttaagttttcactaaaaaaatcttggtagtcttcattattttcttagtattaaggttcaccacattgaagaaggtttgcatctatcccaggcaaaacatatatgttcgagacttactgtgtagagctcaaatgcatgatgcaaaaccaacaccaactcccattactagtggtctaaaaagctttctacatttgatggaaatcaagtggacaaccctcaacattataggtctatagttagagctttgcagtacttgactataactagacctaaaatcaaattgcaataagagggtgtctagaattctcgtagacaatggaagctctgtcaacattctcttcaaataagcttttaaagctattaacgtaaatttttgttaaccaaaaatattagcctttttgtaataaatataccacagatttaattataataatatataaatgaacaccagaaagtttttaacgtagttttgaaattaattcttcatagtccacaagtctatcttattatggatagtatttataatatagaatacaataatattagtagcaataatatctcgcttttttcttaaattggtcatcccttttatcctagattatgtccctatttatagatgtgtagggtgatagttatttccttgggatctattcattcataaccgctcatgaaacgtggacattcctcacgtttcattattgtacatatgggataatattaaataaccatttaaccacccttttgtctttatccattaacaattatgctaagactgaatgatctgcgctaagtgtacattatccttctttaccgtctttgtaaaaaaatgttaagtacagaggtaatgcttctcacaattctcttttatcaccttagaaggtattagccaggtggttacttcaatgtataaagaacgagatgaatgaatgttgttattctttgtacatacaaatatgtaggtcaatgagttgcaagcttttattcccgagtatgtgggttaataaactacaagctctttttttacttgtcttgaacaactttcattatgtattttgtttatcccaagataaacttgtcatctcgccagtcttacttgttaataatttttattcttatcttggatctacctatgtggcagcgaatttgaatatttctatcaactgtaattcctaatgcaagttatttaatgtgcatttaataatgcaatgcttagctgattcatattccttctctgatacacgtactagcttctgattgttagccaaaattagggtatatcaaaagccataggtctggtggaaacaaatttaacctcttgtccagttcagctccaaggcttcaatagagatacacttttgcttatgggaaaaatgtaactttcaattacactaaatggagttgtttctgagagcaataacaattttggtcttcaaataatgcacttttatagtagtggattgcccaacagcctaaattgtcatcctgggatgaccttttttagttaattttagagttgttacttcaatctgtcagttatgcatgaagttctcgagtgattctaaaagcattggaacaattaggggtaatcaaaaaagtgcaagaaaatgttacaatgtcttgaccaaaactatcttaatggtctaagaagaaaacccaaatgaatccaaaatattcgctcaactagcatgggatagtctggaaagaagatgagttagttttgtgtgtaggcgcggaaaaaataatcaacctatggatgagatagaggaagtatgcatcaatgatgaagatcctaccaaagtcattaaagtgggaaagaatctagctccagttgttacagagaaaattgtcttcataaaaaagaataataatgatgtgttagcttggattcattttttacatgactcgaatcagtcaccatgtgatttttcgtgctttaaatacagatcccatggtggaatcagtccgttagaagagaagacctttagatccagttcgagcaaaagcagtataagtgaaagtagacaagctgaccaatatagagttcctttgggaagccctatatcaagtttgacttgccaatccagtattagttccaaagtctaatggaacctagagaatgtacatatacttttcagacctaaacaaatcttgcccaaaagactcttttccacttccataaatagatcaaatggttgacgctacttcatgatatgaacttttaaactacatggatgaatactctagctactttcctagtaagatgcatgtggctgatcaagaacatactagtttccaaactgacaaagacatctgttgttacatggttatgccttttggattgaagaatgttagagccacatatcagcatctagtcaacaaaatgtttaaagatgtaatggggaagaatatagaggtctacatcgacgatatgctggtaaagtcaaagacttctgtaagccataacaaaaatctagaagaagctttctccattatctgaaagtatggaatgaaactaaatccaaagaaatgtacttttggaattttcttagggaaatttttgggtttcattgttagttccagatgaatcaaagcgaatctgaaaaaaaaaaattaaagctcttctaggcatgccttcacctaggaagcacaaggatttctaaagtctaacttgaagaattgcaacactcagcagattgtttccaaatcaacaaacaaatgcattccattctttaatgtcctccatggaaataataagttttaatggacaaccgagtgtgaagatgcctttccagaaactcaaggaacatttgactaaggctccaatattgtccaagacaatcggggggcattttttttgtacctgtcattgtcagatcatgccataagtggttccttagtgtgagaagaaggaagggtacaactttcagcatattatgtgagcgaaaaattgctgggcgcaaagtccaaatatccaatgattgaaaagctttcctatttcttactaactgattcacggaagctaagaccgtacttttaagcccttgcaatcagggtactgataaataatcctctccattaagtattgtagaagtcagagtcatctggaagactcttgaaataggtaatggagctaagccactttggtattcaatatcaactaagaatctctatcaaaggtcaagccttggcaaattttattgtagagtgtacagggatgaacaacaatcctgaagaactcatcctgaagcttgaaatctggaagatttatgtagatggagcgtcaagcgagaaaggttctggaggtagaatcattctaatttctccgcaaaaacatcggcttcaaagtgcactccagtttgagtttgaagccttcaataataaggcagaacatgaggcaatgatagctggcttacaattagctaaagaagtcggagcccaaaacattgagctctatagtgactcacagttggtattcaaccaaatttacaggtagtaccaaaccaaaggggaaaagatggctaattacatagcaaaatctagatagctattgcaacattttaagcatcatttcgtcaagtgaatccccaaggatgaaaatgctttcgcagatatgctagcaaaattagcaattgatttagaaatagaaaaatacaaattagtccccatcgcccatctattcgttccaagcacaaaaacactggggtaacagtatttgatcatttaacttcctggatggctccaatctaaaagtacctagaatttggaacacttctggatgatagagaagcttcatggtaggttcaatatcaggccccaatatatttgctcatggatggaaatttatataaaaaaagggttgtcaataccatacttgagatgcatcgctagataaactactgcttgtcctcaagcaatgaaaaagaatgaaactaaaactaaaatctaaaaaataaacaagtcaattattggatgacaaatcaagaaacttagaccaaaggtaatttatct

SEQ ID NO: 310750 - DNA, 1295 bp, Cannabis indica
aaaaaaaatgatatataagagtagttaccagtggtggggtcaagtacatactgccagaagcttgagcaggccaatggccatgtggtgattgaagagctgaccagaacttaattgatcttctcatggctgcattggctgctttgtatttattctcatcatcatcaacatcattattcatcttcacttgctcaatagtttgtttgaactttctctcattaagcatctaattaagataagtaatataattgtacatatatatataatatatatatatatatatattagaagtctgaatctctaatgcatgttttaagtttttgggaaaaaaaaattaaaaatgagtaattaatactattttgaatctaatgttttgcaaaagttactgtttttttttactctttattgtttaaaatgataaatatcaaactttgtattttttaaaatagtactctgagctaaatttttaataattttttttaatgtaactaactagaagacaatttctagtacgaatagatacagaaaatgtatccaattttgtcataataacaactctagaacgggttatttttaacttttattttgataaaaaaatcaattcatggtattatattttgtatcattttaaaaaatacatggtctagtttttcatttaataaaacaaagaatcaaattaataatttttgtaaaagacagagttcaaaataatattttagtttataagttttttctaactaaaatttatattaagtaaacaatatttataaatatattaaaaatttgttacaaatacctgaagtcggctaatatggtcgctagaagatttaacgttgtagcgatttgtgtaaaagttgtgacgagcctgttggatttgggctcgttcttcaggtgtgcctgcattcgggtcgaactcgaatgtttgtcttcctaagaaattgtttgtgctaaacaagtattcctcttctttttcctttgatgaattcctaccaaacttgatcttccacattttgtagtaccttttaactaactaatatcaactacttaatactaaaaaaaggaaaggatataaatagaaggtttgtaccaattaattttttgtagattttgtaggtgagtagtatctttcattgtggtcgaattgatatatatagggatttttttagagtaggtaatacaatttttaattcatgctatagggaagaaaattagaccaatcaaaaattaaagataattgattgtacaaaaattttatttgacacatgtaggggattatttcatatattttttttttttgt

SEQ ID NO: 310751 - DNA, 1717 bp, Cannabis indica
aaatcaattcagggtcctatttgtactattttagaaaatacagggtccattttgtcatttaacaaaacacagggtccaattggtaacttttgtaaaacagagggtccaaaatgatatttaccctttaagatatcttacaaaattttgagaaattcggaataatttataatatagaaaataatgttcaaacaacctattttacatgggtataaaataaaatagtcacgtgaatgtagttttcggcgtgttaaatttttccgaatttcttaaaattttgcaggatgtctaaaaaaaatttgactaaaaaattatttcggatactaaaacagatagaactacattaatatatctattttaaaagagtgcattgtaaaattttctaaaattaaatactttgaagaaattaataataataataataagtagttactaattaaatggagcatctcgccaagtcgccatcatgcacgaaatgcggactgtccatctgcgtacaaccacagatagcaaccgactatgaacacaaaccaccatgagtcgacagtaacatgaaacttatacaatccggaggtagcggcgatggtgggaaggcaactgaaaccgaagaagaaaaaatacaaaaataaatccagagccgtttcagatctagataaaatcatcgttttcatcgaatccaaaatctctgatactcctaaacattgggcgaaatcaatccgctccatcgcgatgtctctgaaatcatcgacgggactagctttccgagccatcttcgaatctgaaacattacattttgggaccggcaaaagagacagaagcgaagcgaaggctttcccacggaactattgatgatgatctatcttattcagaagtaaaaacatgagttggcacctcagtacactcattgtagtgtcaccacttttatttattatttccgttggcctttattttaataattcttgttattagtctatttcttaggctataatagactattcaatttttttaatgaaatttttatttaacaaaattaaaaaaaaaaaattctaaattaacgaataatttatgatccaacataagatacatttgcttttgctttccatacaactgtatgagtcaatataggtgtaaatacgtgcatgtcggaccggtccaacctacattttgaaaaacttgaaataatatgaattctgtcctgtcgacttataaaaagatatgaatcgtgtcgtattgtattaatattttaaagtctaagcctgacatggcccgtaaatctatatttttgtgctgtgctcaaactcatgctgtactttactcgagtcagcccgtattattttctaatacgagctcgaatcaggttttgcttttccattactttttaatatataattaatgaattaatattttttttataattttttaacaatatcttaatcatacaaaaataatcattaatatttattagtaaatgtatattattattattgttgttgatgacaacaatactacttgaattacacaatttatgatacttaactttacaaactgatttttttggtggtaaaattttccaagctcacattctattgtgttttttacaattctattagttaaaagctgttaagtgttaatatggatggctaatatgtacacaaatataaatgtggtataattttagcggtccatgtcattttaactatttaaatacaataaaaattat

SEQ ID NO: 310752 - DNA, 1865 bp, Cannabis indica
acttttccttatctgaaggaagagttagtactggagcggtaatcaagcgctgctttaactccaaaaaacttttctcacaccgatcagtccaaacaaacttcaagttctttcgagtcagcaccgtcaagggtacaacaatctttgaaaaatcctcaacgaaccgacgataataaccagctaaatccaaaaaacttctaacctcagtagctgattttggtgttggccaatcccgaacagcttcaattttggccggatccaccatgatcccatcttgatccactatgtgccccaaaaatgagacacgagataaccagaatttacacttttcgaatttagtatagagcttatgatcccgcaaccgttgcaaaactgctctgagatgcaactcatgctcttcttctgactcagagtacaccaagatgtcatcaataaacacaatcacacatctatccaggtaatccttgaacacctgatccataagcttcgcctagctgtgcacatatttatttatttattttcaaaaaatattccgtatatcattcaatttattcaacttttacatagttatgccttttgttataattttttcatcaacttgttaatataattaataagtataaaatataataaaacaaataaagattgaactcattatttttactcttttaatgataatccttttattttctatttttttttctaaccatcaactctttcaagattaattactctaatttaagactaatttatttaatattttacacttttactcaatattctatatatatatatattatgatttttaatagtgaggctattatttgtgtactaagatgatttgaattataactataaaaaaaaagttaatatattaaataattatatatgattacatgtatatgttattattccattgattaaaaaaaaaactattcaaatggaaactaaattgatgttgttttattcttctcatcttattttgattatttttttttataattttaggtagggtctaatttctcctaacatgtatgatgagatgttcttcgttgatttatatgctgagactaaaactaatccaatttactcaaatgaaagaggaaaaaaaatctatatttcgatgcatcttgaaataaaagctaataaaaattataattcctaaaatacctcaaattgatcacactttgaaataaacaaatcatataataagagaaattgtacaattttcgtgcatatagaataattggagtcgattccgtgccaaataaattctcaaagtaaaaggaactatggctgcaatggttaaatatataataaatatgacaatatgaatgctttattcataggtaaggaagtatcacaccatcatcaaataaaagatgtccattttattgaaggattttctataaagtaatgtatatatacatacatatgaaagtatcaaatcaacagaaaataaaagaaattagatttgagttagagacataataaaattaccttcctcaaataaaaaaaaaaatgcaatatctatgacatgagaaagaacatgaaatgtgaactttggcatagcaaatatatccatcaaaagatagaaataaagaaataccaataatatttctatatatgaaaagtctgaaatttatatttggataggaatataaaaagacttatagtatatgaaaagtctcaaatttatatttagtgtatgaaattagtatattagtaattaaaatataatagttatcaaattcaaattgaggttgcataagttataaaattataactccacaattgtaatatccagattaaaatagtatttaatttttttttctccttggaatattaattgtgcgagaataattatc

SEQ ID NO: 310753 - DNA, 2222 bp, Cannabis indica
atgatctatttgatcagttgcaggaaagaccatcttcttaagattgatcttcgatctggttgccaccaattgagaattcaagaggaggatattcccaagacagctttttgtactcggtatgggcactatgaattcttggtgatgtcctttagattaactaatgctccgacaacatttatggacttgatgaatcgagtatttaaagattttctagacagtgttgtagtttttattattgatgatattatgatcttccttgattcagaagaggtacatgagaaacatctttggatggtgttgcaacgtctccgagagcataagctttatgcaaaattcaagaaatgcaaatttttgctgcctcaagtaagcttcttaacgcacgttgtgaacaaagatggtatcttggtgaatctagtaaagatttaagcggtttaggattagcctcgatataagtcttcaaccgaagttagaagtttcctgagaatagcaagatactacagaaggttcgttgaagggtttgccgagatttctacacctttagcataattaacccaaaagaattgcaagtttgtttggacagacaggtgcaaaaataacttccaggaattgaaatagaggttaattaccgcaccagtgctaaccttgccgattagtgatgagaaatttgtgatatactatgacgcttcaaaataagggctaggttgcgttttgatgtagtctggtaaagttattgcctatgcatctaggcaactaaaggagtatgaatagcggtatctcacacatgatattgagttggcagcggtggtttttgctttgaatgtttggcatcattatttgtacggcgagaaatgaaaatttacacggatcacaaaagccttaaatattttttcacttgaaggatttgaatatgaggtagcaacgatggttggaattggttaaggactatgaatgtaagatcctctaccatcctagaaaagtaaatgttgtagtggatgctcttagtcaaaaagatccaggataagtttataaactgaaaaaagaaaaagatctcaccagagttggctgaggatatgaccagagcaaagattgagtttgtagttgggaaactagccaatattaccttacaatctcatttgttggagaatcaagacaaaccaaaaaattgatccagaactacaagagtataaatagaagcttgaagttaggtcagtaaaggatttctcaatttcatcatatgagttattgtggtataaaggcagggtttgtgtaccagctgacgatagtattagacaagaaattctagacgagtctcataccacgccatacttcattacattcggagacaaataaaatgtatcaagatgtgaaatcactgtacttgttgtcaggtatgaaaggtgatattgtggagtacgtgtcaaaatgcctaacttgttagcaagtcaaggcagaacatcaaagaccagcgggattacttcaacctttaaagattcctgagtggaaatgggaggaaataactatggactttgtggttggattaccaagaacattagggttctgtgattccatctgggtaaatatgaattgatatacaaagtcatctcactttttcccaatgaagactacatatacagtgcatcagtacactgatctatatttctagaagatattttgacttcatggtgctttaaagtcgatcgtctcagatcgagatccaaagttcacatccaagttctggatagtttgcaacaaccaataggtactaaattaaagtttagtacaccatttcatcctaagactgatggtcattctgagaggactattcagatacttgaggatatgttacaggcgtatgtgttggactttgaaggttcttggaacaagaaccttcctttgatagtataataatagttatcagagtactattggtatggcaccgtatgagattctttatggaagaataagtcattcacccagtcaatgggatgaagccgatgaatagagataccttggacctgatgcagtccaaagaacacgtgaggtcgttgagaagattcgagcttatatgcttgcctcacaaagtagacagaaaaactatgttgatatgaagcatggagatattgagttccaggttggggactttgtcttcttgcgaatatcaccaatgaaagggattcagagatttggaaaaaaaggaaaactaagtcctagatttattggtc

SEQ ID NO: 310754 - DNA, 821 bp, Cannabis indica
tttttttaaagtgttgattgagtggttcctttatccagaaaccattcagtctctaattttttaggtatttttggtagtttgaggaatgattttggttctgaactcatgatcgatcttatgatgtttgtgaatgaagcttatttttaatcgttaatggagtttttagtagaaaatggttttcgatttgtgaattattattttacgagaagtaaatttataggtttccattttggtttgtgtttcatgcattgattcaaagtcttgtcataattaatggaggagacccttaaatagaaattagggttatcacctctgaatggcgaaattccaaaactgccaaaaattcacatatttagcccattgtcgcgactccataaagtctagtcgcgaccataggcgaaaaccaaaaatcatgctttttgcctacgcctcgtagtcacaaccttagttgtgactatggaaaagggttgcgaccatggatgatggtggttgtgactactgaagcgtttttgtcagcttcagtagatttttttccagttcgccttatcttttcaacaatggatagaatttgaactctcatgccttggagacctgaaacaaaagaaataatcaaagcgcaaaaccattctaaaagataacattgacaaagaaaacacagatatggggggtctcgaggttccattagatctagaaccatcagaccaccccttggagctctgtcgtacgtggtgggagttattggagatattggcggctaaactacctgaactttacggtttgtaacacttaaccacaaaaactaaatttttggcggctaaact

SEQ ID NO: 310755 - DNA, 1401 bp, Cannabis indica
tttttttttctttttttaattgggtttttttaaaaaaactctatcgatcttatgattttttgcagaacataaataatgggagataacaagagaatgaactagccactacaattactgtactaggatttccttaaagcttggagaaaataatttggatccttgatcggataaaagattctgatggttttcaatggatattgaaactataccccttcgtgtattccttacctatccctcatctaccgatctaagtgacaaccactgagttcattgttcataagaccccttgttctttttttttactagtaaacaaccctagcatattttctcttcatttattaagttactaggggttcgtttggtataccatgttgtattgtattgtatttgatttaattgtattgtattaatattatttaatacagtactatatttgatattaatttgtattaatatattatataaaattatatcatctttacaataaattgacctcgatcttagcccaagactcgaatctcggccttagaatacaaaccctgctcgaaccccatccctagacccagaccttggacctgaaccttagagtttggttttgagtccaggttcacgtccgacttgggtttgggtccaagtttgggttcaggtttggggttgggttcgagtccgtggtccagggtttggggtttaggtgttggtttttattgtccaaatcagaatagaaagcataagctgtttttatagaaataattttagaatatcataatttgactcataaatatcaagaccttaacatttacagacattagatatattgagttaagaacaatgctaaaatattaaaaataaaaaaatttctgagataaatagttaagttgtttgatttgttatgtaaaaatttggtggcaataatgcctcttgttacttatttggtgcatcagttagttggctgttaaaatcttagcagagacctacatggcaaccacctggctgcatttaattggtttaatttttttttttaatttattaaatattataaaatcattaaaatttatttttaaattaacttatttaaaatataaaaaatcaatcaaattagaaaataagttctgaatttataagtaaaaaaagacaaattaaaattctatactattaaccaattattaatagggaaattatagtaaatggccctaaatcataggagtatgttagtttatgtcctcatttcaaaaaaatatagcaaatgaccctaaatcataagactatgttagtaaatgtcctcattttttttttttgaattagaagcaaattatttaaacattatggtatatctatattagttttgttaaaatcttttttattttaaagttatgtcaatttttttaggtggcgtttggtaac

SEQ ID NO: 310756 - DNA, 1567 bp, Cannabis indica
cacgaggcaaacctcgtaactcgcaaaccaaggggcaggagacaacccaaagatattcccagaactctcaggagaggaaacatgaggaaactgaggaaagtctggggacacagcctaggacatgtggaacatcagccggagattgccaaccctctctccaagctcataaaaaaggagctcgtgcaaatccctataaggggaacgaggtgaatcaaaccttaagaagaagagcagaacgagaagaggcgagggctaccgtgaagcatatagtacctcataatcgattaatgcaaggagaagagaacactcctcgcaacgatgataaaaaaggcataatgcaatatataggaagagcaagatccgacagctgtcataattggtgggacctacgagaacacttgaacttgaaaaaacctgatcttcgtcaacaacttggtccaaagcaaattaagggatttgttccatttgtgaatagacgagttgagcataagttcaggagacatcaagttagggaaccaagaaagcaatcggggtatgattctgttgaagaattcgagtcagaagcttcaagatcaaagaggaaagacgattccaaaaggctatccaaggataagaaacagaagaaacacgacccctttatgttgactacactaagcttaatgaaactcgagaaaatatctacctcgcacatgtacatgaagtcgattttagcgagccaaaacctatgagaaactcgagacgtaaaagggacccaacaaaacggtgtgaataccatggagatattggacatgccacgaaagagtgttgttagttgaaggatgagatagaaggtatcatagcgcgaggacactttcaacaatatgtaaaggggcaagacaatgcccatgatcaacacgatctgcccagtaactcaagcgaccaaggatcataaccttcctctatagaaggaggggatacctcagttatctcgagagggaacgcatcacaagaagacaaggggcagttaatgcggtaaagcaattacataaaagtattgcgaagtaagtaaataccggctcgccacgattgtcgtatcaagctgctatgggaaaagtgggtcgtcaactataagcagtaaaagacaaacaacaaaaaccaggattaattcacctggaaccccgggatatgacagggatcgaccctgaatattgatacaattgtgggaatatgttagggattgaccctgaacatcaaaacccgttctatcatggaagattgataaaataaataattgattggggaagtgcttatgagattaatgattgtaaatcgcatcactgatgtaatattttaaacttcagttgtgaataaaataatcatttctttcaacaagtaattataaagcgtaaaccctttaaaattacttgaggggcatatatgtatgatcaaccagaattaatctagaaatacatgatacaatgcaaacccaatacttcaaaaataaattttttttgaagtattttaaaaggtccttgaccaacttttttgacggaagaggggtcgaacttgttggaatatcttttaccag

SEQ ID NO: 310757 - DNA, 975 bp, Cannabis indica
cattctctacataaatctaaaaatgataaatcctcaaaatgtttggttctaaagacccaagtagctgtccaaaactccattccatcactgtagaaccagccgacgtggagtttgatgaggtgagagggagaatcattggaaggggctccccttgcctccagttggtgaaatattcacggaggtcaaaagagaggagagtcggaggaatgttatgctgaaaaataaaggcaattaggaccactgttgaaggcttggcgctggctgttggaggaggttacagcaggaaaaattcatacccccctaaatctgataataaacctgcaatacctgcaaattggaaaagcaaggctaagagattaggttgtatccctactgccactgaagctaagtacccaatcctttaactgactctatcttcatgcattgctaaaatccaattcaaactcatctggtattccttatgcttttgttgcaaatttggtgatgaaatacatgccttaaaccgcttttttccatcttatgctccgtggataattgattccaaagcttccaatcatatgacaaattcttctaaattctatgattcctatacaccttgttcaggagataaaaaagttaggattgcgtaatttcacacccatcgcaggaaaaggtttaataaaattatctaagggagtaaatcttaaatctgttctccatgttcctaatattacctgcaaacttttgtctgtgagtaaattatcaagagattctaatcgttttatgaaccataaatctaattgttttttttaggatagagttcaggaaagacaattggcagtgttaggatgattgatagtcttcttattttaagataatatttctaagaataaaattgctcaagggtttagtagcattagttcttttctctgttcatgatcaaataatggtttggcattatagactggtcattctagtttctcttatttaaaacat

SEQ ID NO: 310758 - DNA, 676 bp, Cannabis indica
atgggctaccgaaaaacaagatgcaacttgttgatataggtagtaccaatcaatccatgtaagccctcttcaactgtgtagtcccatacctacacagtatcagaatcatcacacttgaccttccccaggcgatgtgggattgcacaacttacccaatgtttccccttacggatcactggaatactgactgtcacactttcagttttgacaaactaatttttcataaacgattgggatttaacaaaccccaactcagcaagactaatctgtctaaaattttggtcctcctcaaaaattaaagaacttggattgagcattttcacattcctctttagactctcaagatcttttaaaatcctagaattttcctattttttaaaattaagatcagtttcgaaatttttgcatttggattcaagattcttattttctcagtccaacttttgatagtctaggacatcaacttgttctctaaataaaccttcaaccacttgccatgcattatcttgtatgattatgccaatgattcttcattcagttcggattcatcaaattcagattctatagcatcatcagaatatccaaaatagtgttgtttagtgttatacccgaaattcggctgatacttcagaaggtgacacgtgtcaatctcagagaatatgaaccagcaaatata

SEQ ID NO: 310759 - DNA, 841 bp, Cannabis indica
tataaaatgtcactaaatattaggaacaatgacattttaaaaatgtcactaattagagtttttggtgtagtgagataagaaaagtttttcgtcgacatcctgatccgtttcgtcagctttgaacaaacctagaatgttttacagccaagttcaatctaagaatttaccttggcaaataatagaataaattatatagataaatatcaattataaggaaatgttgtatctagatataatatttatttcattaatataaactattttattctttccttataaaagcaaatcaaaccctaaaaattgatcaggctatttcacaataaatgataagaaaatcagacaataatcaaatataaataaatcaaattaattgtaaaatgtttgtctaataaattagcagactttacatgggaaaagactcggatggcgattgtcacaattgcatggaatcactgtgttgaaatcatttaggttgagactcgaagccttcctttttttttttaatctgattgttaaggaggtcttggcttgttgttagtcagtgcatacttctcataattttattattaccattgagagtgactctttaattgttgttaagactcttgctggtattcaacttcgatgtgatattggtaactttattttaatcttaggcttgattggtatgaaatttgaaaataattttatatttttgaaaacatgaaaatgtggagtctacataaaatattttggtagaatattttcaaaaattaaatctaaataagtattcgagttttaagctaaaaaaaaagggaaaaaacaggaaaatacaaaaaaagaaaaaaaattacaaaattac

SEQ ID NO: 310760 - DNA, 1704 bp, Cannabis indica
gaggagtttaaatttttgaaatgattatttccctttttgaactgcttataaataggatcgaaaacctccaatgatccttttagccattttcattcctaaaaaaccagagcaaaaaattcttaagcgaatttttctcttaaattctttgaaggattcccaggaacactctcgacaacatcatccgagcaaaacaagaagcttcaaactagtgagtaagttctttatttccttcttttatacattttcaatgaaatgcatgcttaatttttgggtttctggccatgaatcttgcctgttctagaactgttctaggatacccatagaaattctaggttcgaagtttagaaatcttgaatgtgcttaactaccatgacgtctgattttaagtgcgcttcatttttaaccttacaatatccattttcacttatccattaagggtttagtgaaaattaaactccaattcgaagttttgaacaactgggttgaaaattccatgtctgagtgaaatttttgttcttgattccccaatcagaccgaatcggtacattcaacctgttttattcgttgctccgacctgatcggtttggagaacatgttcaagagtcctcccacagtcgacaagaagtctaagaaaagagctacccaagttggtgatgccttgggttctgccaagaaacccaaaaggaccaaaaccacgaccaataagaagaaatcatcaggccaactcaccatcgacccaacccaatctccatagaaggaggtcccaactgcgatgagtgtcaatgaacaacccactgggtcaatgcaccaagtgaagttctttggccctcgtctagagatggttctcctcaaaccctcatggtcgggactgaaggcttgcagctctgctcattgcacgcttccaatggttggcgtcacttccagagtcttaggtctagcgactgggagcttctcacgcgaggcagctctaaggatctggcaaaaaagggttatgaactcatgcatcaagttagtttccttttctccttgttctcacttttcctcattttattatctttacttcttttaatatgcttccttctcgcaggcatttcttctttcctttgctacccatcataggtcgtctcagcggtctgaaatgcatgaggttgagcttcgccagagcagggagcacagggacaccctggccaaaaaatggaatgactctatggccgaggtgtctcgtgcaaaggaggaggctgaaaggcaagatcaggttgaccagaagacaatcaaggaacttgaggatgcaatcaagtccctccatggcgatcatgacaaaaagctcaaagaggcggaagctgaaaccaaagacagggttaatagcattgtcagaaggaccatttatcaggcctggttggctaaccctgacatggacttcagcttccgggtgaaggagctgatactatgcttaccttatgcgagaagaccaggagagaagaacttggcgaggaggaagaggttgaggtggaacaagaagatttatccaagtcttctacaatgtaggcttggtttttaacccttttttttatttatgaaaatggccaagtggctgagacaatagtttgccccttgaggcattttctattgtaaagacaaatttgtattgttggatggccaactttgcttttattttatctttttatttattgcctcgcatcttta

SEQ ID NO: 310761 - DNA, 938 bp, Cannabis indica
gatatttatttattaattgatttttttatttctaatactacttaaattgttattttcttttaccaataagttagtaacatgtattattattaattatgtttttttatacatttgatttaaaattatttactaatttgttaactttcatctttacattaaaaattaaacatgtctcctctaattaagtgttagaaattttaatatgaaaattatttcatatatatttgttttataaaaaataatttaacatttaatgtgtattttgattataagtgtgttaataaaatatttctcaatttaaataatttaaagtaatttttgttttagttataaatgattttcgacataaaagaatcgtgttctaaattttaatgttgaatataatatataattatgcgcaatgaaatttttgtttgatactaaagtttaaatttggcccccttgcaataaaatcctggctccgcccctggttgcagtggtagtggtgttttgcatggtggtggttggcggtggtggtggtggttggcggtggtattgcagtggtagtgttacgggtggtgactgtaaaacagtcgcctatactataggcgacggttttaaacagccgcctgtagtatatataggtgactgttttaaacaatcgcctatactacttcgtatccctgacggctttgtacagttgggaaaaaaaatttcgatagttttttaccgttgcttattctgcttagttttcctgacggtcgaataggcgtcgatcttagagactaatgagattactttaccaaactgtttaaatcaatcaaaaaatttaattttatagagaaatgttaattacaacttcttagtcaatctcgacgtccgaaattatatgtcgaaatatttttttcaatttttttttcatatcggtattcgttatagttacaatatcatccctgtaa

SEQ ID NO: 310762 - DNA, 1806 bp, Cannabis indica
tatttttcgggatattacaatgggggtgtgtactacgaccatatgcatgagagtacgtactacaaatagaagcatgagagtatgtactacgaccaaatgcattaagagtatgtactacgactagatgcatgagagtatgtaatacaaccagatgcatgagaacatgtactgcgactagatgcatgagagtatgtaatacaaccagatgcatgagaacatgtacttcaactagatgcatgagagtatgtactacgaccatatgcatgagagtatgtactgtgactcaatgcatgagagtatgtactatgactaaatacatgggagtatgtactgcgactaaatgaaaatatgtattgcagccagatgtatgggagtatgtactgcgaccagatgaaaatatgtattgcagccaaatgtatgggagtatgtactgcgactagatgcatgagccttgatgtttcttttatacccaattaatgggtcatgtttaaaatattggtctactcattttctaaatgaatatactcacttttgaacaacttggaaggccttaatctatttttcatttattcttcatgaataagtgattagtttgattctcttgaatgagtatatgaataaacaaacacaacatcttatttttaagttgttctcatcaatcaattcattcatcatcattttttgtataccttatatgcccctaggtgattgaaaaatctttagttcttggtcacttgttgtgacaaagagagactaagcatgatgtatgaccaaaatcaaatatgcttatgacatgtttccagcataaaaaaagagatctttttgacagtaattgactcaaaaattatcttctttttttgatttacaatcacaattgagaagttattactatctattatctttctagtctttcaagatagtacaagctgttcattgaaccacataacaattataatatgctaactgtgctatctgacctttcaagcagtattgtcagcttgtttatttagttatcacaagttaactaatatgcttatttaaatttataagcatgaggagtttgtagtattacttaaaacttaattaataaataatttgcaatacctatactctaaggggggcatttggaatgaagtattcaaaataatttgactataggatatattatgaaggagaatatgattgtaggaaaatgtgtaaactgtgtttggttgtatagggtaatatgtaattatattcccgttgattaaattgtactgtttggttgagtacatgaatcttatatattattttaaaaaattaaaatgaatttttttattatatctgtttaattatacataaaaataaaataattattcattaaggcaatatactttttatttagtaaatattaaattttattgtatttattattaattaaaataaatattctatatattttatcactatattatttatttttgttcgttatgtcatttatgtacactatccatataaaatttatgtataatgcatatatatatgctattgcttataacatagaaataactcagtttaaaatataaaatcgatctcacagactaaatatatatcataatatatttttgtaataaatcaaaatattaatggtatttaaatttattttttaatttaaaaattttattcaaattaatataatagaatggaataatccaatcctatcctttttaaggtatcaacattgccctcttatattactaagggaataacattacaatattaaatcctcaaaacaaataaggtaatgtttcacattaccatttcctt

SEQ ID NO: 310763 - DNA, 933 bp, Cannabis indica
ctctctctctctctctcctcatgttgattctgctattttttttcccttaaacccttttatttatcttttgtcttgatattcttcttcttatgcttgttcattactaggagccggggaattttgtgatcacttttcccagatcttaccatggaggatttaaccttggtgagtatgaattttcaaaaatcaataccttcagtctatagaaacaatatctttggaatttttatttatacacgtgcagtagttagacttggaattggtcttttcaggtttaaattgtgccgaggctgtcaatttcgctcctgccgactggttacctcatggcaggtttggatcagagctgtatcagttatatcataaaactgctgttctgtctcatgaggagcttctttgtgtattagctaaggttataccttttgtttaggctacgagtttttacattaaatctgcttttgattgacattatcaatttcctcttaatatgctcttcatattgttggataccagcctagcctatgaatagttattctgtcttcattagcagatgcatgctttttttactccttcctattggatagcttttggcataacagtaatttttattttgtatcgggcctaccttgatagattgtgttaaagatttgaaacctagtgtggtttatactgtgccaagttgcttaatgttctggtagtattgtatgaaatgagtattttggtttatatttacaattgattattaagggattagaacccctcacctctcatacacacacaagtgactattagattaagtttacttccacacttgtgaaggtgtgaaatttcattttatgcaaataacaagctttgttaatgacgaagaagttacaaaaatgggaggatgagttatcctatagaataaaacaatgtaaaaaacataacaaagttagt

SEQ ID NO: 310764 - DNA, 1999 bp, Cannabis indica
ttttttcaaatgccgattaggcttcatgcagtgacactagaaggtccatttctggctattgtgtcttctttggtagatcctcaatctcttagaaatcaaaaaagcagtccaccatctctcgttcattcgctaaagcaaaatacagggctatggccaatgccacttgtgagattacctggctatgagccctccttcaggactttggcatccatcacaaagatcttgaaatcctttattgcgataatacatctgccatccacattttcgagaaccccgtattctatgaacgaacaaagcacatcaagattgactgccatgtcgtccgaaagaaggttcaagaaggcacactaaagctaattcatatcactactaaaaaaatattactgatattattaccaaacctcttttttcctgacttttttcatacacttgtaaccaaaatgaaacttaaaaaaacttatatatttcgtcttgagaaggggtattaggtttttgacccaatacattcggcccacttcttctttcatgggcccattccctttatctcttatatatatatatactttatctttgtaacttaatatgcatttcagccgtgaatattatataacagatacaagagttccttcatgcgaataagactaaatattaatttacatcaataacaacataccacatcttttggtgtcccttagaatttcacttctatttttctcttaaaaaaatggatttgattaagtaatggccttaaatctttcaatagaatgtagattgcgttccatcttgaaaaacaggcacctaaattgaattgttatattttaagtaatggccttaaatctttcaatagaatgtagattgcgttccatcttcaaaaacatgcacctaatgaattgttatattttataatttgattgtaattttgatttggagtgatagaaaaagttgaaattgatgatgacgaggaggagtaaccgtataaggtaatttcattcctatttgattcttaatcttagccagtttggttccgtacgactcatgctgaaacatctatggtgtgaaaaatattcgtatatacgtgtagcaatgtaatactatactgcatctgcatgtattttctcattcagttacatactaaatatctcatatctaatatttattttaccacaaaacaagttataaacaaattggaatatgccatcatcaaatcactataatttttttccaaaaaaaaaagcaattaaaaatgagagggtgaaataggtggatacaatgaatattctacttctgaatgagatactttcttgtaaatatctcactataaatgcatgtgatgtgaattttttttctacacctccattaaatacaaaataaggggtattatagtcatctcaagtcatgactactataacttctaattagactgtgcctactagtactgccctaacaaagggagtagttccttctatcagatttgatattgatgggagcaatcttagccgtccaagactattatcaattcatcaatataataacaatttttaatgtatattgactcataataaataagcataagcatagtagttccgaaaaaaatataaatatattatttttaaatttatctcctgaagaataaaaaaatgtgacaagcccttggcacattgtactcgtagtaaatttactaatttatttatttttcatttttaatattaatataaataattattctctttttttttttttttttggaaaatataaataattattctggtgattgatgtttttgtatatttgtttgtaatatagtgctgtgtgtgtgtctcagaacgaaacactgagagagagcacttggcttttaacttcagaggacgactcagattgcccaaaacttggcgtctttgaacggtttcaaataaataactcagaaagagagagagagaagagagaagaaagaagagagagaagaggagagagagagatcgaatgccgaccctctattcca

SEQ ID NO: 310765 - DNA, 1538 bp, Cannabis indica
atttttaccattctgaaaaatatatagtctatttgtcatttaacaaaacagatggtccaattggtaacttgcaaaacagggtctaaaatggtatttacccttttagtttttattttagttaagtatatttttaattgtataattaattttgttatgttattcaataaattatattatttttattaaaaaatatttaatttaagtgttatttataaaaatttatttgtaccatatatgcctaaactatataggttctggtaagttggtttccaaactttatattttaacaaattagtccctaaactatatacgtttggtaagtttatccccaaacaatatgttttagtaaattggtctccaaacttttattttattagtaacattaagtctccactcttagatattaattattttttaatttattttattttacttactttaatttattttgtgtgttaaattttaatttttttttaattttaatactttaataaaataattatattaatatatatatatatatatatatatattttactttggagctaaaaatgaaacctatgaacttcccttaagaaactgtgaagtgtattttttagggttcaacttcattttgtactttctgatgatcgaaaaagcctcttccaaatagtcactatgctcctcgaatgtttttgatttgactagcatgtcatctacgtagacttcctattttctttaaaacatcttggaatttattattaactagacattgatatgtggcatctagggaatgtgatttcaaagatcattcccgcgaggccttgctttatcgcctttggctctttctttctttgcattagatgttcccggaggtcgtttgctgagagactgctacctaaaactagttgaattttttctatttcttcatcgctccagtcaacagaattactaaggtatttttgtttccccgaatggttgacttttatgcattagtattaggcctatcctttcgcatagcccttattctcaaataaatatgatcaccttgccctagagcattgactacctttgctttctacaaagtttatctggtagtatttgctttgttacgcgtagcgatcatagcagtctttctcgaaggatcccccatgatatattttcctttgtccccattgggatcaaaaaatgtcaggatcttcagggtcttttctttttttttagttattattatcataaggaataagatcattaggaatttcttcatcatgagccatgttctcttgctcatgtttatctttcatgtcatctataggatctttatcttcaggatcttcttctcgaccctcattgatgagattttcatcaacatatttttcattacgttgagtcttttttgcaggacaattggttagcactgttggatctccatcgactcctaactacgtctgggttgtaggtgttggaaattattttaccaggatcttagatctactcacaagtatgttgattaacaccctcaatatgaactttctacaaacgatgaaataaacacatat

SEQ ID NO: 310766 - DNA, 541 bp, Cannabis indica
ctctctctctctctctttctgtgaaatctatccgtatttataggaatataggttggcagttatttatttggaatcagtttaaaatgtagttgtccatgaaacgtggacaatttccacatttcatttaattgtatgtaggataattatttgataacggcttaagtgctttttgttcttatcattttcgatggttaatgctgatttagacaattgtatctcgcttaacttgagttatcttccttgttcatcctgatgtggagaaaacgctatgtgttagcagatggttcatctcgttaagttttattagttaaaatagcgagatgactgtctcactatacataacccgaggttgcaatatgtgattgtattaattctacttcaaaatagatgaatattttttttttactatgtactttaaggcagccgcgtgtcttgtcaatacaagttttaataaccttatatcattatctcgtttaagactatatagtcagcaagttatgaatattttttattaaacctttgttaacgagttattttatct

SEQ ID NO: 310767 - DNA, 715 bp, Cannabis indica
atatttttcatattttatgcctagcacattagaacgcaacgtttggccgataaaatcagattttcttatagtttagtattttagttctagcggggcaacatagatagacattaaaaatgtcaacactattcaaagtattatttttaaccaaattacccctaggtggtaagggtgcttttagccctagcaagggtgatttatttagtttaaagctagggctttgcatgatttaatttctacggttaagatgttgtaggtttaattttgtatggattatgttttatgaagtatttagactttatttaaggacgtttggagctgtttgggcgtttattgttgtgttaaagcaaagttttaactttagagctcaaactttgctctcacatggtgatttttgtttctaaggttgtttcagggtgttattgcttgaagtatgtttgttgtgtcctaattaggaggtctggaaagtttggtttgatttgggttggatttgagttgtttaggagggaatttgtgttttctgcactgaagcgatcaaccgattcagtgggacctgtaggaatcgaaattttggttggtccccaggcaaaccccacagaaccagtcttctagttggggaattggtctaccggttggggcattttagggcaccctagattttcccattcctatgatatttatggtatttacatgttatctatcaatagggaaactt

SEQ ID NO: 310768 - DNA, 1430 bp, Cannabis indica
gaccctttttcctagtcgcgaccaggggtttaattgaaacccaataaatttagattttcaagctagtcgcaactagcccaaaggctagtcgcgaccaactggcgaaaccctataaaaaaaaccccaattctcacccatttcaaactaaacctaaaaaaaaaccattctcagccgcccttcatcccttctcctccaaaaaaccaaaaaaattcacccaatcttcaattcttttcatctctacaccaattccttaatctcaatccatccaaaacctaaatttcatcatcaatcaaattttcatcaaaaatcataccctaaaacatcaatttcaccccaaatccgaaaataccattgttcttcatcttcaacctcaagctttcaaggacattgaacaatggaggtggagtagtggcttcttcaggtttgtaattatcactctctattaaatttaagaaattgattgaatgatttagggattttagtgaaaatattgaatatttgaaatttttttggtgatagtggaattattgagttgatattgtggatttggactgttgttattattatctgtactgttcttgtgaaaataaaaatttgggaaagtagaaatttaaggggaagtgctgcctaattttttttcaaaaattattttttgtgaaatttttttgtcattgtgctaatatgggtccgaaaagaacaagaaataatgaggaagggggttcatcatcaaacccaccacctacgggtttttatcgaacccggtttgtaagtgaggtggcacaaatacggttcacgaggcttaaggttaggccgtacatcgaggactgggtattgaatttcctaaaaatcctttgaggcatcaatcgaggtttgagacaattcaggcccaaattgaaagaataaaatggggcaattttgttgatgctaggggtcgggccaatgttaccatggcatgtgaatttctcgccaactggcccgagcgacgaaatggggaagttaaggtgcggggtaagaaggttcccgctacagctgacgccttcaacgctatgttcgctgtttcgaactattcaagagaagaacaacgcctccaaattattgaggaggaagaacattttaacatggtagatgtgctgaaactgtgggatttctggggctaagattccaggataatgatgggaaagacgggtcgcccaatattcggctccgatgtgaaatcaacccggtggcaaaaatctggctatactttgtgagcgctcagttggtgtcaagcaaacatttctctgatgtccagatggatagacttaaatatgtgtacgccatcatgaaggggtacaatataaacattggactaattacccgaggaagcattgaacaaattgttcaaggagccacgtgtaacaccctaactagcataggcgtattacgtgatt

SEQ ID NO: 310769 - DNA, 399 bp, Cannabis indica
atcacgtaatacgcctatgctagttagggtgttacagttatggtgtcaaatatgtgtcgttagacacaatggaggttttccatttggtggtgtccagactaagaggttcgaaattattcaaggaagaagaagagggtgaaggtggtggctaggtttagagagagaaggctcaggtttttctctgaaggaaacaagaagtgaaagtatatatttcatgaagccatcactgtctatttatagcataccacatagggttaggcttgaattatttggcattaaaataatgaaaatatcagatgatatttcctataaaagtggtcggccatggctttatggatttgggcctcacttttgcaaattttgcagttttatcaattctgcatctcactttactcaaaa

SEQ ID NO: 310770 - DNA, 658 bp, Cannabis indica
tagaatagagaacatctcggtaagttctctcattagccaacttgtatattagttcctctaacattttgccatgcaaggacccataaaagagctagtacccatcgctcttcacggatggcatcgcatcactcatcagtgatcgtctttgcacggtaagccctgcaatggtagcaaaatataaaagagttagtacccattgctttttagcatggcttcccgtcactcttcagtgatggtcgttgcgtggtaagccacgcaagggtagccacaacatgatttcaaaagcgacacaaagctataagattttgttacacgtaagattgactgtgtctaaatcacttgctaacaaagataacttcttaaagttatcctttggagttccacatgcgtacattagatagcaccccaagaatattcccatgcaatgtctatgaaacttggtcaattgcaagtgactaagagaccgtaagtcttcgtgctcacttggtgggcacctacactatacaatggatcaaactagcatgaagaactaatgcagagaaattttaacgcttagaataagctactaagcctttctctaagtcaagtgcaggcatacttcggctttacataaagaaaagtaaattcagatacttacatgtcaaggccataagaagat

SEQ ID NO: 310771 - DNA, 1218 bp, Cannabis indica
gattaaacatccataacacaacaagcaagaagaatgcctaagaacaagcactttcaaaatatcaagaaagaagatattaagtatatataatagcaagaaggacaagatcctctggtggccctacatcatttaatcaaaatcctaagaacgcctccctagccacaatttcaagcatggaaaagtatttaatttttaattatatgatatacccttttgttattattgaaatttgatgcaagttcattttgtttaccattgggcacccttgaatttgatgcaaggtctagccaagagtctgctgcagctgtgttctttggtggccattcccgagaatgagtagacagattttgagatcatgcctttaaatcatataaagtgtgatatgtccaatgtcttcatcggcagagagtaggcatagcggagctagccgttgaggaactcaatcgctagcagctggcaagaagacactttttgatcgggcttctgggcactcagtcgtctaaatcgtatcgacttctttatgggcataatcgattttagtttgaatggctggaaaaaactcactctcttgcgatttttcctaatcgatctcctataattgaatcaaaaactttgaaatattttatatagaatattttatataaaagaagatttgaaatattttaaaaattgttaaaaaaaaaactaacccaactaatttaatcataaaccaacgaaatactgttatataggccattttatatagagtagatatttatgtattgttccatataaatatatatatttatttagaaaaaaagtatacagatagaggcacagagctaattatgttaaataatatatttgttctatgcaatttttgactgagttgtgtttaggaaattttctgtatacccaagtggggacaagagcatagaagggaaagatcatatttctttgtatctggaaatagtggaaacaagttctttgcctactggttgggaagttaatgctatcttcaatctctttctctttgatcagattcgtgacaagttcattagttttgaaggtatcttcttccttatcttttaatatgagatgtgataaccaaaaacaaataactttaattgtcttttagtaagagaaagctacaagaaacaaacttaagtttctctattttatttttcataatacatcaccatttttttttttgtaagtttttacatttacatcatacat

SEQ ID NO: 310772 - DNA, 587 bp, Cannabis indica
cattcaacaaatgccccctcgagcatgcgcgtgggaatttatatggacacgtgtgatgctcgagcgactttgagaatttgatacttgaattttctatctctccttatagatttcttctttatcactctcatttgaaaagaaatatctgagcttagggagaccagtttgaacttttaatttggtggctgcatctattattatttagattgcctacgtacccttgacgggatcaaacctatcgtagttcgaaaaaagcactttgtgcatttgtgcttatttactccatgcttaagctttatactttaaaatatttttctgaacgcattttagcttcttgttttgcgtcatggttttttgcctttagttcttgctttgtgctttgatctttgagcttttttctactctcattttctttgagcttttgcttctttttttgttggacttttgtgtttgctttgcccaacttttttttgagcgtttgctttttgctttgctcaatttctttttagctttagctttctgcagtgctctatttttctaagctttagctttttgctttgcttattattattaacttccgagcgttt

SEQ ID NO: 310773 - DNA, 827 bp, Cannabis indica
gctcaccaatcttgaatcaccttatcacaagtcaagcgtctttgtaccatctgaatctcgtgcggctggctaaacatctggataggtgtggatcaaaagcccgctaagtatatggctctgataccatgatgagaattattgggttctatctcaaaactaattggtaataagtggagtagcccatgttcttatatatagctcaatacttttacatttaatccatgtgggataatgttctccaataccatctatgtaaggaatcctaaactatatatgtgttatatgtcgttttatgaaatttatattttaggatgttagattatttatgtaataatcaaacatacatgttagtaaattaagatcctagtaaaacatgttccaacaggggcagcgacagcaagacaagggttgcacgcccctttgggaaaacccacgccccctccccaccccccttaaatgtcaacagaactccttgagctcaagagagccttcatgcacgggagccaaaacgccaaacaagaaccaccgataaccaaccaaaaaagggagacaacgagacatcccaagctccgccctccatcaaagactgtccatcatcaaaactaaaccaccagaccgtgactagaggggaggaaagatcgaaaccaccaccactaacccctaatcatccactaagaacccaaatgttgacagccactgcctcttccaacaccaacccttgccaagaccagaagttgttgggttttatgccctaaataaaactcatttcatataattagatttacttattaataaagatcagaaataacattttatgttgtatggtt

SEQ ID NO: 310774 - DNA, 505 bp, Cannabis indica
aaaagtgacgtttcttgtagtgcaaacctctgcccatacgcacggaggaggatctataaagaaaacctcctcctagatgctctctctctttctctccctttcagatttttttatttgaaaatataaaatcccgtctctgaaaccttatttttcagatctgacttttagagttacggtgaacacgtgggagaaagacgatgcaattgtgatgggtgcgttggtgattcgatgcctaagatctcaggagttgtgaagcaaaatgtgtcgcagggttttgataacgccgatgtgggtcagaggatgtacggaccggggtgctatagaggagagtcattctttgtagccaaaagtattagtggtaatgatgaagaggaagatgatgatatttggtgtggtaattacataattagaatttgggagattgttatgggtggtgatggtgtgatctgaagaaagatacagagagaaagagaggagagagagagatagaaagagagagagagag

SEQ ID NO: 310775 - DNA, 1108 bp, Cannabis indica
ttgtttaactccaagtattaaaatgaagctatttgtaatgaaaaacaaaaggagtttacacaattagttcaggacgaatcaatgtcggtgacagagtatatgaccaagttttagcgactggccatattagcctcaagtatagtgcctatagattacactaagaaggaaaagtacctgggtggggttaatgccaagatctatcatgatttgacaattatgcctgatgatgctactgcctatgcactgatggtacagaaggctctccgagcagtacaatttttacatgagccccgagggactcaaggttctactggagtcaatgctcctcctccttttggttttggtaggagttttagtgattcagtttttgatttggagaggaaggctcctttcacattgagttgttctagatagaacaagaggttccacgggtactaaggtcggagttgtggtcgtcagggtggatttacttacatagaatgtcctcattgtaagaaacatcacctgaagaatgtcataagaattctgtcttctagtgtggtcagatgggacactttaaaagggagtgttgtaagttgaagagggaagagccaaacaaggatttcatatccactcctgctcaggtatttgcaattttgcatgtagatgctaaggcatgtccatcagttgttacattagctttttacaaacaactcctattatattgtattatttgactctagggctacacactcgccagagcacagacaaggaaaaaagaattcccaagtagggaactttcgaaggcggggatgaagacgtggatcctctacttggggacccaagcagcaatgttggacctatagaagaattagaagagatcgagatcgatccaggtatctcgaccagaaagctaaagatcgaaaaaggtttgttgctcgaagtaaaattagaattgataaaatatctgagagcaaacttagatgtttttgcctggtcacatgcggatatggtgggaatcgatccttctatcatttcacatgttctgaatatcgatcccaacttccgtccagttcgacaaaaacgtaggctattggacaaagaagtagcagtagccctgaaggaagaa

SEQ ID NO: 310776 - DNA, 1486 bp, Cannabis indica
ttcataaaaccattttgtgcaaaatcaatcttggtatcagagcggtgaaggcttgacgccatggaagatccgaatacaactccagctcagccccacgacgtcagtgcaggaaaccctgtatccgaagcgtcacaccagagtctagcagcaccaagtgcttcgttcactcccacaggtcagacgacccccattgctgcaccgttcagcagcaccctgagccagccgttctctctgaggctggacaggaacaatttccccctttggaagacgatggtctttacaataataaggggacacaggctcgaagggttcatcaatggcaagaaaccctgtcctgaacagtttataaccacaggtactctcaactcctcagaatctcaattttctgttaatcccaaatatgaaaattggcttgttcatgaccaattgttaatgggatggctctatggatccatgaccgagggtatagcctcagaggtcatgggttgccaatccgcatttggtctttggtctgctcttgaggaactttatggtgctcattctagagcccacatggatgagctaagaaccaaacttcagactgtaaggaaaggttcaacatccatgtctgactacttgaaacaaaaaaggatgtgggccgattcccttgctctcgcaggggaaccatatccggaaaaacatttggttgctaatgttcttggtggcttggatgtagaatatctctctattgttgtacagatcgaagccaaatctcagatttcttggcaagagttgcagaatactcttctcggctttgacagtaggttggagagactcacaagtttgtctaattccagcaagatgaactactctcttggaggtcccacggctaactatgctcaaaaaccagcaaacaatgcatctcgattctcgaataccaatcaacacagcagtaggggaagctcaaaccagtccacagcaagaggcagaggtgcttaccgtggacgaggccgaggtggaagggccagtggtggctcaaaaccgacttgccaagtctgtggcaagtacggtcactcagcagcgatatgctataatcgctatgacgacaactacatgggacagcagccacctcaggcttcggatcagtcacaggataagcaactcaatgcgcttatagcaacacctcaaactgtgaatgatgaaggttggtacgcggacagcggtgcgagtaatcatctcacggctgatgagacacaaatgaataccaaagctacttatggtggtaaggaaaagataaccattggtgatggtaatcaactaaacatctctcatgttggtactggtttattaaaaactgataattctgaaactcttgttcttaaagatatgctgttggttccacaaatatctaaaaaccttgtgagtgtttctagacttaccacagacaataacgtgtcaattgaattctttcctactgcttgttgtgtgaaggatcaggtgacaaaga

SEQ ID NO: 310777 - DNA, 736 bp, Cannabis indica
aaaataaaaaaaatcagagctgatgacctggtgcctctcaagcgaagtaaattcctatattatgttttcctcagtatggtttgttctattatggtcaagggattaatagacgcggttttgtctgatattaacctgacatcatagattgatacatgatataacatacaaaacctagcgtttttaaaaatgggaaccagtgatgacacacaaactaatcctaaccacaagcaggaaagaacataaatggaaggtgctattgttttgggtcattggtatcactagtttgttgtacacttccagacacttttttcttgtaaagcttctcaattacttcattccagttagtccttccctgacccgactccattgaagtttctgcagagttttcattctgacttgtattttggtcatcatgaggttcttcatctgaatctgaagtggcagcgtgaggtacattcaaactaacagccctttctaaagcatctttgtgctctttttcaaaggtctgcagcctttccagtttttgcacttttggaggtgtagttatggtatctgaatgactttccttcattatctgtagagtaatcaaaccgttaatcagctatacaaaatttcgacaaagaaaaagattctacttcagacacagccatctagagagatgagtaaatgccttctagtattggttttgaaatacagttacgagaagtagctcaagtaaaattaagatatcgcacac

SEQ ID NO: 310778 - DNA, 1316 bp, Cannabis indica
caagagtgtatacataagcagttatagtgacacttaactagatagaaccttaaatttactaccagtttagtagtttggaggatttaactgtcaaaatttaaaattggaaggttaaatacaagtgaaaccacacaccacagttgagagagtttagccgccaaaaactcatattttttatttttattttggaatagtttgttcaaattcttttttgaacttccaaactgtagtatttggattatgtattttaaaaaaggtaatatgcataaattatatatttttgagtttggtacgaataacctttttaattaaagggatgaatgaagtatctaaaaccagaagccataaaagcaataaaacaataaaattaacaccaagatatatactagttcaagtcctatagatcaatgtgatctatgactctaatctaattctggaaccccaccaaatcctctttattgattgagcatgaacatggtacagtacagtcgcgatcaattctctgttggattctctcaaagtatttttctctcacactcttacctaagaatttttttttatctatagaagattcttcacacaaaacttatctcttttctttgtacctctcaatctttctctctcaagatcacctctcgaaacttgtttatccacttctcctccaaaagatgataaagtgggtggtatgtataagttcaagataaagatcctaaaatcggtggctgccattgttaagttagtaatgacttaaaaaacttaataacctccttgtaacaatatctccatgttagcacaggacaagacaaagtgctttcggatgggacatacacttgcgggactaaggaccgaagcgcatgctgaagggacttctcgaataggaaagagctagctggagttgattattcgaaattcccttctaagaggaacaactagtcatttgaaactcctttcgggaggaggactagcttttatgaaaactacttcaaggtggacatgataaactttcagaaatgcctttctttattattccatgagacttcttcagggtggacaagttagcctacaaaacatactttctagagactactaacttttcataactagaactaggggtgttcatccgatccaatccgcacttttttggtcaaacaacatccaatccgcactaagtgcgaatttcatattttggatccaatttgatccgcataagagttcaaatccaatccaatcccatccgcaatagtgcggattggatcagttattttggatcggttatttttttaataataaattgtttaatatattatagaaaaaaa

SEQ ID NO: 310779 - DNA, 1060 bp, Cannabis indica
agagagagagagagagagttagcattttagacttagagcttgagagctttagggagcttcttagacttagagaattagatgctctttatataggagagcctacctcaagataataacctaatatccctaaaaaataggaagtataaagtattatttacataataaatagtaaataggttaattatctctcaagaatataggaataattgatatttctcccttatatccgtgagttattgaagcccaaattgtagcttagcttgctgtctccgatgaaggttgcgtaccaagtggaggctggggtctggccagccatgtgcctataagggtctggccggccatgttcctgtaaggattcagtaggtcatgttcctaccagggtctggccggccatgctcctactaggggtctgataggtcatgctcttaccagggtctagcaagtcatgttcctgccagctttggcaagtgttggccagcctttccatgtgttggtcaacctttgtacaactttccttgcaaaggttaggtgtccttggtcaaacgggcccattggtctaacagtcaccttttgctggccagcttgtgctcaaactctggccggccatacaagctcctcctagctgacctatgcactctctttagctggccaaacatttttatccaacttcttgatggcttgcttaactcctctcgctgacggttttgtcatgcattgtaagggtactttgtctgctattgacaaggctatattccacatgtcctcaatcttggcttatctggacatgccacatcagatagacaaaatttaagataacaattcataagtcatatgaaagagagaaatatattattttagtgaaaataatattataatcaaaataatcgattaatgagaattaatcaattattatttattggcaaaataaataataaatcttatttgtataaaaatgagaaattaattattggctttaaaacatggtccacacataagaccttaaaccacacatgtagggtgacatgtgttgggattttatgccctaaataaaacccattac

SEQ ID NO: 310780 - DNA, 935 bp, Cannabis indica
gttgtatcagttgtgtattttgaattttttatcgtataaagtcctttttggtaaaactttcatacagggatcttcggaacaaagttttagtgtttttataatgtccgtttttagagttttagtttagtgaagtttttaatatcatcacagattttaataattaattaatctattattactaaactaatttataaaataatacatgtgacgtgcctttagattataacattacaacttggtattagagcacccatgattttaaaggacccgaagtctggtcgaatatatacatttgctgtgaagacgagtcgactcatggtatagtaagtatttatattatttgctattggactacctgcctagactattataaagtatgttgggaaaataacatagagatgattgtgataagaatatgtgtgtgacatatgcatattggtattgatatttgttgaattctgaatggttggtagttttggatcacgggtacattagatcatgcagcggcgatttggtcgtgtgaaccgcgagctggggctcggggtaggtggtgaggaagagcatcctttaccacctcaaaactaggaacaaatgtttgctgccatgcagacaattaggcaacaaggagagcaaattcgagacttgagagagcaacaggctcgtcctccacatatactggcacctcaggtagtgcaaccgaatgtgggggatcgtatggaaccaatttatgagcagtttaagaaacaaaacccgcctatatttgagggtggtatccaccgaaggcagaatagtggatgagtatgattacctctatcttcgactttatgcggattgaggatgatgatcgggtacgatatgttgtttacatgttacgtgatgatgctcaaattgttggaaatatattttaccaggaacttagatctactcacaagtat

SEQ ID NO: 310781 - DNA, 856 bp, Cannabis indica
aaatagccaaaatcagcagctatttcatcttgtctctttaacagcctcagcgatgactccggtgatagaggcggttgttcatacccaacaactcctactctgtcatcctcatcatcagagaattctactggttcaacccccaaggatttcctccatggatttagtcttccttacaccagcagtcgaattcggacctttcttcttatttttcctgttcgagatttgcgatttccccacgttcttggaccttgttttcgccatggcaccaactcagagagagttgcaaggagcgaagagagagggaaaaagttacccatgaatttctcataaacccgattaaaatttaaaagtaatattaatttatttaaaaattaatattaaaatacatcttaataaaaaaaaattattatttttgaatagaaattattttagaaaaagttaccatgaatttctcataaaccaaaaattcagttatatagacacactttatataaaatagatatatattggaaatttctcaaattatactcttttagggtgttttgaatcttttgataaatttttatatgttttcagtatataaaaaaaaattaatttaattatgctacttattaggatcgtatgtaaatttataaaaattttaaataatttaccgtgctgaaaataaaattcaaatatagttacttacttataagaaaaaatatcgtgcgtgcaataaatatttaaactatttaaaattttctaaaaatttacaagtgatcctatattgttacaacgtacgcgattataaaaaaaattaagaataaaaaactactcttgaatgcataagaaatctaccaaaacaaccttttagatg

SEQ ID NO: 310782 - DNA, 1057 bp, Cannabis indica
ttagctaatttgtcaactcaaatgacttatctttatcttggagggaatcaaatatctggaactattgctccaacattagaaaacctggtcaacttaatcggcttagacatggagtataatcttttggaaggtgacattccgacttctttggggactttaaggttcttgcaaaggcttacattgaatggaaacacactatcaggaaccataccctcatccttgggaaacctcacacaagtctcggagcttgatttatcagaaaacaattttagtggaagcataactctaaatattggagactgccaaaatctacagaggctttggctttcccaaaatagtctaagtggaactattcccaaagaagtttttggttttccttcacttcttgagctagacttatcacaaaactcactcaatggtagtatacctgtagaagtgggaaagcttaatactatcacccaacttgacctctctgaaaataatttgaccagtgagattccaaacacaattggagattgtaccagtctcctatcactttccctacaagggaacttctttcaaggaattcttccttcttctttggcttctcttagaggtctagagtatttggatctttctcgaaacaacttgacaggaaatattcctaaggatttacagaatcttaaattcttgaattatttgaatctttctttcaatgagcttaggggagaggtaccagacaaaggcgtctttgaaaacactactacaatatcaattgatggaaatgccaggctttgtggtggtgtaccaaagttacatcttccaagatgtgaaaaagccattgaatccaaacaaggaaagaagaaagatcacaagttgataatcataattgtttgtgtgattgcatttattcttctatttgcatgtttatcattttttttgttttggagaaggaaaatcaataatgagatcatcatcatcaaaagtctggaactctcatcaatcagctttctttcaaaggtttcatacaagagtttacactaaggccgaccaatggattctctcaaagcatgttgat

SEQ ID NO: 310783 - DNA, 1601 bp, Cannabis indica
actaggctgagcatatgaggcttgataaatccttaagagcatttttagagtttccctaagtgtccatatgagggaggaaatgacttttaggacaaaggtccttgagccttggtcaaactttttgtgtgttattcttcttcttcttctctagctttcttgtataatcttgatgaaatactttaatttgtattttgagtattttgattgtaattctcttattctttcttggaatgagaaattttccaacaatgcctccgaccaatgcctagtacgagtggcacaaatccttggtactccctatacctaacttagtactagtggaaccaagccaagtactttcggtctcgctcctagtactaatggaacaaaaccaactaactaacccttgtatggttaacactgacaggtacatgatatatgacgcgtcctgttgtgcgaccattgatggaatctgttactcttgacacattcaactaaacgagccaacgcctaaatgcttctgcccattacttagcaattaatggtcaacacaaatggttagactatttagagtctttactgacgcatatgatcatttaagaaagctcactaattaagtgcaacgatgtaagccctaattaacaaatataaacaactaacaatatacttaggtcataacctaagtcaaataaataattaaatcgtcaaaactgtttaactaactttagagtgctaaactctacctgtacgtgcagatgtctacttttcttacatggaatgcaagtaagatacaactccatgtaagaatagtaacgatttcgatcaacaggatacaactccacacaaacatccaaatgtaatcataaactaatttccattattggatattgatgtagttactctcaagagctttcctgttttgacagcacttttccaactcaaattggtacctaaaaccagtttaaatttctaacctaaaaatagtgtaaaaattataacaacatagccacaaatgaacataaaaggttaataaggaaaaagtaaacaaaagagtaaatgaaaatcataactgataaagaaattaaaaattattcacaacttttggcgacgtcttagtctgtggctaagatttaagaacaaacttaaaaaaaatataaaatctataagattttttttgttggggaaaccgataaaggtaaaaataataaaggtaacaaaaattacacagttaggtagggctcttctatccaaaaaagtttattgtctatcctaaggcatgcggctgacatgagagaaaaatactctaggaaaactagactataaaactttaatatcagaaataataacctccaattcattcaaatacactgtttgaccctccaaagctgagaccgaagaaagtgaatctaaaaagaccctttccactggaaatcccacatcttaagccaaacgcagacctactagtagagcaacctggaaactaaaaaagaacctgcaaacgaaatagtttaaaagcaataagtacttttaattttcaaatccaaaaaatattatattagcacaatattaatgttggtagctaatcactttttaaaaacctattctattaacctgtctataat

SEQ ID NO: 310784 - DNA, 922 bp, Cannabis indica
gtgtgaaggtatttgtctcaaggaccagaacttacaatagaatttttgatagaactcctcccaagagttgaaccttcttggggtcagctttatataccactatagggcagtttcaaatagggttgctggaaaaattctacatcacacatattcaattactttttggagatctgtcgggatctcaaggtattttaagtgtgccacgggatcttctttccctgtgtacatcttccaaagttagcattttgaacttaggaggggaagtgccttgacatatgccattaagggtgatcccctagacctgtctagttctaggtcggacagctttaggctggacatgcctttgatcatgtgtttgagttgatcctactgtgcttgcactgatggatctactgaggcagtttccttttagactgcactgtttggccaaccaaactgactagactcccttggtgggccaagccagcttgtggattgattgaaggttggtcataccaaccactttgatttggcaaatccacctgtctaaggttgtcaattaaggtggaacaaagtcactctagttctctatcctcaagttattgctgtccattgtgtttttatccagcgtagcacctaatctgtcaaaaatagggcccctagaccattattccacatattctcaaacattccaggggagggaattattgtgctactggaccatacccagcgagatggcatggttcctagcccgaggctgtcctcccgcctcctatctcttcctagtgttagaaattgcttattcctgccatatggtttgtctggaaagacctgtccatcttcaggtcaaggaggatctttcctcgtgttcgagggacctagtccgatagtttgtccattgtctgcctattgatagacgctgtatgatctatttgtaagtctt

SEQ ID NO: 310785 - DNA, 1292 bp, Cannabis indica
cgtgccccaaatactgttttccagttccaagaatagactagctggtggatgcaacagtcgggcacaagatcctaagctttatggatgcctatttgacatataatcaaatcagaatgcatccaccagaccaagaaaatacaagttttcgaacatatatgagtttgtactattacaaggtcataccgtttggtctaaagaatgttggagctacctaccaaaagttggtgaatcaaatgtttaaagaccagattggatgaaacatggaagtatattaggatgacatgctcgtcaaatctaggaaggctggcggcatatagatgacttggacgaatgcttcaaaatcctcaggaaataaaacatgaaactcggttggaggttcaacattctgagcagcaagagtttcattgctctggtcggttggaactgtagaagtggttgccttgggtttttctttcgcagtctaacccgcacagtaatcaagatacgtccctttggaatctccaaggtaatcaaaatttcatgtgtgattagccttcccaaattcatagaagtcctcaagggcaatcgtttcaagcctctccacctccttcttgagctctttctactagtttgcttagtctggacatccccctccaactttgagagaagagtgcagagattctccctctcgtctttaagctcattgacctccctagacaaggcgtcattatctgcctgcagctgctcgcaggggcggagccaggtttagatagtagggggggccaatatcaacaagtgcatacaacaagtaaatttcagtgactaaaattacttttgagagtgcgtgtcaattgaagaaaatattataatattttatttttataaatattttatacaatatttaaaaactatgaatcaagtaattaaactgaaaataaaatacaaattctaaggctcatttggaaagccaagaggaatttgactttggtgtaattgaaagtaattatactgttttttatgtttgtttgaccatatagttttactcttcaattttcatacccattgagaattgagtataattacactgtgtaattattaaaaactttttattttaattattaagtattgaaaataattatttttttctatatttactaattattttgttgatattataaatttataaataattactacctcatatttaaatacaccacacatttttaaagtgttagggactcaatttaatattactcgtccacaaaatgtcctattttgctaacaaagtagtactcgtccacaaaatgtcctat

SEQ ID NO: 310786 - DNA, 2815 bp, Cannabis indica
gaaggagattcggactcagatcttggtgatactctgctaaagacaggaaacaagggttagagatctgagtggaaggagccactattattccgctgcacccactgtaagatttttgaatttttatatgtgtttatttacattgtgttagagattcgtatttaggatgttaaatatacatggtagtaaatctagatcctggtaaaacatattccaacaagttgtaggtttagggttttcattttaaggtttaggattttgggtttaggatttaggatttaggctttagggtatggggtttatggttaagggttttgggtgtagggtttgcagtttaggatttacatttacaatttagggtttagggtttagggttttgggttataggtttgttgggtttagggtatagggtttaagggtttagtgtttagggtttaggggttaatggtttagggtataaggtttcgtggtttaatgtttaaggtttagggtttagggtttatggtttagggtatagagttgaggctctatggttttggatttagggtttatggttttcaatttaggatttaaggtttaggatttagagaatagggtttaggggtcagggtttaggtataaggtttagggttttgtatttagggtttagggtttaggttttgggtaaaggaattagggttttgggtttaggatttagggtttaggggttagggtttaggttataaggtttagggtatcgggtttatggtttaaggtttagggttttagggttttagggttagggtttaaggtttatgatttagcgtttagggtttcagtttttgtgtttagggtttagtgtttaggggttagtgtttagtggttagggtttagggtttagggtttagagtttagggtttagggtttagggttagattttaggttttaagtttagggtttagggtctaggtgttaggggttaggggttagggtttagcgtttggatttagggtttagggctaagggtttactgtttaaggtttagggtttagtgtttaggggttaggtgttagggattagggtttagggtttaggggttaatgtttagggtgtaaggtctagcgttttgggttttgggtttgttgttttaggtttaggggtttagcgtatggtttacgacttagggtttaggggtttacgaattaggggtttacgatttagggtatagggttgacgagtttagtgtttaaggtttagggatttaagtttagggttaagggtttagggtttagggtttggggtttagggttgagggtttacggttttgggtttagggtttatagtttaggatttaggatttacggtctacagtatagggcttagggtttagggttttgagtttagggtttcgattttttttgggtttagcgtttagggtatagagtttaggggtttagtgtttagggttagaggtttattgtttagggtttgcggtttagggcataaggtttagggctttagaatttatggtttagggttcagggtttagggtttaggggttagggtataaggtttagggtttcgtgtttaaggttttgggttaagggtgtagggtttagtggttagggtttaacattttgggtttagcggttagagtttaatgtttatggtttatggtttagggttgagggtttcacatttagggtttagggtttggggggttggggtttagaaattagggcttatggtttagtttttatggtttaaggtttagagtttagggtttagggttttgaggtttagcgtttgcatttaggatttagggtttagggcttatggtgcaaggttaagggtttaggggtttaggggttagggtataaggtttaggatttttggtttagggtgtagggtttagggtttagcgttgaggttttagtggttagggtttatggtttagggttgatggtttagggtttacggatgacggttttgcatttagggtttagggattcggggttagggtttaaaatctagggcttatggtttaatgtttattgtttagggtttagagtttttcgggtttgggtttttggtttaggttttacagttgaggattttgggcatatagtatagggtacaaggtttaaggtttagggttttgagtttagggtttaggggtttagcatttagagtttagggtttagggtttaggctttaaggcataaggtatagggttcagggttaatgtgtttacagtttaggggtttcgtgtttagggtttagggtttatagtttatggattagtttttaggaattagcgtttaaagtttattgtttactagggtttagggtttaaggtttttggtttaatgtttagggtttagtgtttaggggttagggttttgggtttagggtgtagggtttatggattagcgtttatggtttagaggttagggttcatggtttaaggttgagggttcagggttcagggttcagggtttcgcatttagggtttagggtttgggtgttagggtttagaattcagggcttatggtttggtatatatggttttgggtttagagtttaggtgaaacaccctaactagcataggcgtgttaacgttattttaaacatactgtgcagctcgttgctaatcaacgagattaatgaaaatcgtgattaattaaaattttgctatttaattaaaacttataatattacatacaaaatatttctagatcccgtttacaaaatattttacaaaagttagctagtcatttacaaaatatttgtcgcccagcgactaacagcaaaagccctgatgtcccgaggatcgtac

SEQ ID NO: 310787 - DNA, 1277 bp, Cannabis indica
gttaatcaaacatacttggtagtaaatctagatcctagtaaaataattccaacacattttactttcagtttttcgtgtccttgaatgaaaagaaaatagagtaattaaagtagtaacatatatattagagaaaatgaatcatttcctatgtgaattttcttcaattgggaaacatagcttctcatatgcattgtgaatttgtggaattttttcacaaagctatatacttcatgaagtgttgacaccgcttagtattgtatgcatgccaatttattcttctttaacaggaagaaaaatggatatgtgagttgaagagtggggaaagagtaataacacttctatgcttcagctttataacaattacttttatcatttttttttattttttttatcttggatgagctatttttggggagcttattagctgaaggttgtgttcctcgactttatgacacacataatattacaagtatttggaagactttactgaaattgatgcagaagggaaacttcaagttgatgggtcactgattgtgtatgtggtatttactatggaaaattgatgtcttccctatgaatgtttaggctaactatgttgtttctgactttaatgtctttttctttgttctctctcgttcttctttatttagtcttttttttttgtatatcagagatggccaagaaattttagtcatatattcttcagaacaggatacacatcaactgactaccaatcagaattggtaagcaattttcaatttaattttcatttcatagacatgcgtgttgcttatttgactaagaacttctgttgtgattatacaaatgcttttactttcattgtaacttctttattatatggtggctgctagcttcgaatgttgtttgatttgtaggaattaagagctaagctattgatggagcaatcatttagtaggtaccaagaagattcagcaagaagtaacaaaactcgatgtgcttgtgagatacatagctctaatttatcattaataagagtgggttaccctgattgaaattgtagccttcaatcttagtgctatcatattctcctttgacttgatttaggcatgtgtaacgccctgtccaacagggacgccacgtgtgcgtgtttttataaaattcttatttaaatactatataattataccaaaagtgtgagtaattaaatttttgataattaaaatcaagcatataaaaaaaacttctttatagtaaaagataagtaatgagaactacgaggacctcctgttttcaaa

SEQ ID NO: 310788 - DNA, 551 bp, Cannabis indica
ctagggtgattttcactttcccacggtcctgctccacatctttaaaggaattttccagatttcgcatcacaaatttagaatgtaagatatgaggaattgagttcttaccttgccgtatttcactattacattggttgttagccatgaggaagtgaataaaatcgttccgagcatcactccgagcctcatcctgccattgaatctctttcagtgaagagttgggagacataggttgaaaatcatgtcgatcttctccctcgttgagtcgaccctccccttgcaatccctcctcatccgagagttccaagggctcgatttcagaaattcgccccaaagcaccagcaatatcgacatcagtaacaccattaccagcttttttctttgagattttagatgcagatttcgattttccatggttctttgatcttgttttagccatagcaccaacctctcagctgcaagagctaaaaccagagaaaatcttgtccgtttagtctccattatgcctatattcactgaaagtataatcatctcattcgcagatggatgta

SEQ ID NO: 310789 - DNA, 2822 bp, Cannabis indica
agggtttaaactttcctatataaagtgccttaactcaaccctaaaaacctaagtcataactaagtggaaaaccctaagccttaagctctaagtttgatgtctcatctctctctctctttctcacacacgcctaccattgcttcactcacacttgagattggccatctttaatttctactttgaatcttaagagagttatcttagatcccacatatactgatctgaatagtattatctctcgatatcaatacaattaaaaggggagtaggtcattatctactaacttagggggtcgaacctcaataaaaatccttgcgttcttttaatttctagttctaatttcgtaacacatggcaagcatcaattttaatacgaatctgctatcggttggccaaatttgaggtgaacaatttggtactttcattcagagcgagttgatatcatatatgatcaaataccattgttaacataaggagaatcctagttgcaccatctgtattatctagccttcctgaagaccttctgactgcagatcgtgatgtccatgttccagccaagattagaattcctgtaaaaactacagatgtggtcaatcctgccacctcggtagacacctcaaatctggccaatacaactggctagagtgacacaaacatccctatggatctgaacaatcagaccttgcctctgagggaggaccctctacaggtgcctcccactaaaggaaggaccctttaggaacattccccaagaacaacaactgaacctcatccttagtactatgcaggagagacgggaccaggaattggcaagccccatgtgcacttgggagaagatattgagttagctagacttagagaggtcgtctgccaagctgacaaagctgaagaaccacgcactactaattgcgatgttttcactcagtagacacacaaattcctgagatggatggatgaccaagagtacatccttcgatctcaccaggctgagttggatcaccgcaactgagaagccatcgacttgatgaggcaattcaatgaaagaactgctggaagaggccaaaatgtcatcaaaaatccacttcaaggaagactagttgacagatcgaggagggtctatcagtaagttatctaattaagttcttcaggaaccaggatagaccttcctctacctgaaagaggacatgccttgccacaaagatctaatggcgagaacaaccatatctcctaaactagcagtgtaggggtcggccagagatcttaggctcaaaaacagcccccatcggctaacctttggcctgatagccacctactagtgcacttctaaccagccaggggagtgcactccctccccgaggggagcgagccacccaaaggccaatcttcaactggctaggaccgagaatgggtggaaacacccaaaataacaatctgagaagtgagattggtcactttaggtatctagattcacctaactccaacaattatgatctacctcctatcaatacaccgacaacatcagccaactggggaatcacgagcggccaggccttgcctagctagtacagggctggcttgccatggatagctgcttagtataggattggccagctagaaccaacatccctacgtaggagtggctggccaaggcctgcaacacaacacagggttagccaacctctaccatacactctcccagagtatggctagacactggcacattcaagcatgtaacccttctaaggagggccaattagtcaagtctctacaacaacggatccctctgtgcaagcgtagttaaaccaagtaagggacatgatcaagggcctagcttgtcaaaaacctttagaccttgggctagatcgatcaaggggatcaccattcttgacatacttaaatccttggccctttcccaagttcaagatgttgttatggaagatgtatactgggtgagaagacctactggcacacattaagtactttaagatgcagctcgatctctaaaagatcactggtgatgtatggtgtcacatattctcggcaaccttatcggaaatggcttagcaatggtacttcaaacttgctccaggaagattcaattcttagactgagttttcccaagaattttacacataattctcatcctcaaggctcataacattagagctagaagatcttatcaaagtcaaacaacaacaaggagaacctttgaaagattacattcagagcttcatggccgaggccaccatggtcaaaggccttacaaaagaggtctgatatacaaccatactgagggcatccttccattgagttactcttggaaagatatctacaagatctcaactaataacatgaaggagttccttgacagagatgacaacttcatgaaactagaagaaactgcccgataagtccaaacagggtaagtcaacagcaggcactcacaaggcatcctgcagccccatgactcgccaggagcacaggtagaaccagcaactctgcccgaacctctagtggcaagaacactatgagcaaccataacaacaacaactctggaagaaataatggcatgaagtttaacacttctcccaccccacaaagatagaaggacaaggaggtgaagtatacatgcttcactctcctgacagagaaaccatagaccatcttcatggacactcagggaacagtcccatacagaaatcctcttcccaacaaaaggaaattgagtaagagggacatgtcaaagttttgtcagtttcacaacaacttcagccatgacaccaacaagtgtcaaaatttgaagagggagattgaattcctcat

SEQ ID NO: 310790 - DNA, 1355 bp, Cannabis indica
ttaaggtccatataaccatttttgcccttcctcttcctccttaaataatgcagaattttgaaagaaaccagaatattatcatagattaaccgaccttggataaaggcactttgatgtgcagagatgatggtgtccatgaagggcttcattctattaaccatgaccttagtgattatcctatacaagacactatgcaaacctataggtctgagattcatcattctttctgggttatactttttaggaaccaaaacaatattagcttcattacaaccattctcaagggaaccattctcaaaaaactttcaaacacaaccaataacatcgcccccaacagtgctccaacacttctgataaaaagccggtgacattccatccggacgtggactcttatcctggtgcatttgaaatagggctttctttacttcctcatatgaaattggttggcataattccagattaacatagtcaggcaccactggttccacacaatcaataacttctcggcaagaagcaccggaagtctgaaatatttcttggaaatagttaaaaacaacatcagatagacccgaatcccaagaacaccaactacccgacgcatcgcccaattcgataatctgattattttgtttccaggttgtagcagctttatggaaatagctactattggaatctccttcctttaaccaatgttgtttcgcccattgtttccagtaactttcacgcctatcaagcgcttcatacagcttcttttttgtatcatggtatctttgcaccgaatcaccatcccgttgtggatgaagagctttcaactcagccttgtaacaatttatacgatgattcaaagtgcctgtaatttcctttccccaccgagataacttctcagtacacaaagacaacttctgctggaattcttgtgactgagcttgctcccaacaatcattaacaatctccaaacaaataggatctttaaactaggtattctcaaaacgaaagcaaacactagggggaaaattgttaattaccttcggctccaggaaaatgggagagtgatccgatgttgaatacttaaggttggtgagaatggcttttgggaaagctaatcgccatgactgggataccaatgctctatccaatcgaaccttaacccagtgattcgaacctcgacctttttcccacgtaaaagggtgaccgtgcatctccaaatcagtgagttcacattgccgaagaatggagttgaactcgttaagcaaccactgcggataatgtctgttgggttctatgccctaaataaaactcatttcaatataattagatttaattattaataaagatcagaaataacatttaatgtt

SEQ ID NO: 310791 - DNA, 1346 bp, Cannabis indica
tagtaagaaaaaaaatctaaaaatagttttaaaaaatttgtgccaaacaccattaaatttttaaaatgacaaaaaaatattttctattctcacttttaaaaacacaattctaaaaactggaaactgaaaacatagccaaataggctctaaatttctaagaactgaaatgcaaaactatatatacctgtacttagctctattttgagttgaaccttctttgtaagagatagacttcaggagagtgatagagagagaaatacatacaaagaagataaaagagaaagattaaaaagaggaacacaagggaaatagagaagaaaaaagaaaagaaatgagagagttgtagatcttaccattcgacttgtgatttggaagatcagatcacttgtaactccaccattgttgatagtgcaaactcagagcatctttgaggcgagctcaccaaggatgttacccagattttgggtaaaccttgtaatctagttgtgtctttccttttcttcgcattttcttttgattttctttatggttttgttgtgttttaatgtgtgtgtgcaaaaccctagcagagcttgagtgtttgggtgtttcttgaacattcaagcttctgaggaagacaaagacgatgcctaggttttaggtttcgattttgggttggtcgagactattatttttgagttgtacgtgctattagtttttactgtggatgcatagtaattgtaataatattatttttaagttttgtgcctaaattttcttgcttaatctttaatgtgaatgagtaggtaagggccaaataaatcctacaatagaatcaaagcaccgggtttggttgcaagaagataattcacaaggatctttaagattagcaaggctggaagaagataatttgcaagaacaaggagatcataatccacataaagttggatttgatcttgagagtttagtggatgttccattaaacaatctacccaaaattcaagacacacaatctcatttacatattgattattgtaatatgggatgtcttaaaattgacattgacaaatttgatggtacaactggccatcgaatttggagaaggatccttgttggcacaacagaaactcctaattaagagtgttagaagagctaattgaatggcctaagaacactttgttacgaaaattataaaacactacgcaagtatacgcagtcaaatagtagctcacgcaagtgaggtcgaaccacagggaattagattaattactacttaattatacctataattctatttggcaaatcaaaagtatttttgatttaaaagaattaaagtaattcagaaaacttaataacacaattaaagt

SEQ ID NO: 310792 - DNA, 3337 bp, Cannabis indica
gaaagtaaaaatataatttttctctatgtaattattccttaaatataagaaaatttacaaatttatatactttatattaatttattatattatatgcaaaaatttatataatttacattaattaattatattatatgtaaaaaaaataaaatttattatatatctaattaactatgagaacatatatttacttttatattattgacatctcttttagtcaatgatgctgagtcaactaaaatgataaaaatcaataataattaagcaataaaaacatagagatttatagagattcggcctcgtgatagtggtaatagcctactctcattttacttgtattacttgtgagaagagaagtgattgagtttcttgatctctctcgaaagtttacaattttacagcataaaaactctcttgaataatataattcgaatccctgaataatgaaatgaattcactacttatagggaagaaatacatcaatcaggtttcaaaaaaaatgagaaataataagggaaaataggaatgtttcctattttacaataataacgtctggaattcccattaaaatatgaattcaattaataaaataaataagaaaagtatctctaaagatttcagtcgcatttatcctagcgggtacaagcgagctagctgcgagatcgacacttgttggacagtgttatttatcctgtttggatattccagcttactcttcaaacaaactatttttaaggaataattcactctagaaggcatcccgaggatggtgccacctgtccaagtcttaaaatattctccacgtgtcacccagaaggatgccacgtaagatttacccctcaagtctgtgtgagaactttttgttggtacatggacttgctcagcccacactctaggtaaataaggtgacacgtcctcagataaggtaggtgaacaaactgtcttttcatacctcaaatttaatgcttcaccttaaaaaatgcatcttgggtcgcatgttcacggttgtactcccctatgcgtactgatcgtaccttttggggggataacccaaaatttgagatgtggaattacgaaaataccctctctataacctataaaaggggttttggacttcatttgcaatcttttagccattttgagactaaaaaaaaaaaaaaaaaatcaaatctccaagttttcttcgaagcttcaaggatttctagatcatttccagattttgactcacatttctacttggttgtaatatctcaaaaaataatatggcatttaattggacatgttttattaaaaatgtaattatttagtaatgaggtaaaattatgatcttactggggttgattagtgtgactttagtaaatgattaattaaagcgtagtttattaattacagagattttattagaataaaagagattttattacagagatttttggaataaaatgttttcgggcccggtgtccgtggaagctcgacggagtggttagaaatgtcacaataataaaggataaattattttggaagtattccggactagtttagaattttagaatgtcggtttggcgaattagctaaaattaccaaattgcccctagggtgggcttagtttagtttttggggagaagggtatattggtcattttgtatggaaggtgatgtgttttatttaactttgggctgattactattgaaaaaaaaaagaaaagaaagaaaagaggatttatttttacaaaggattaaataaaagaggaagttatgaaggaaatctctaagctctctccctcctctctttcggcctagaagaaaaccaaagggggattcaattttccatcatagttcagcaccaattctagctagaaaccaatcctagtggtatccaattcttgaggtaagcttcttaccacgttgttcttgttttttttaaggattagactaggttttcgttagggttttaggtttttaggggttgtgaagttaaattaaggttggggtaagtttctaggattgtttttatgcttttttgagtttgaattgattagaaatagggttgcgtaacttggattgaattaaatgatgcctaaaattgagttttcttcacttgagtatgtgattttgattcaatggttgaattgctgtgttttagagcttggaatatgttgtatttgtggtattacattgttttggaatgtttgggcaggtatggtttggttttggttcgagtttgggggataaagcctttaattttctggtctgccagaaccggtcgaccagttggttctggtgcacccgaaccggtcgaccggttgccctacaggtataaaatctcgagttttctttgagttctgttttgtctcgaggtggcacctagtacctgttttaggtcatttgggtattgtgtaacctattttgtagttgttgggggttaggttcttactcggtttcgaattagggttttattctggaattttagtttaaggcatttattgagtttttggttgccgtgacataggaccgggatcacccatcttgttttccactcaggttggccctcacacttgagttatggactgagctaagaaaagtgttaaatatcactttgggttaagtgattaataattgtatggttatagtctcaattatgatcgagaacctggataatgggtgctaagcctcgattataactaagggtggaaacggtcattactgtattgagtaattactccaaaaaccagtttcttacttatcgtttgctgtatcgggcatcgatagtgacatatacaggtcgaggttaacgagtggtatgggtactttatgaagtaccaagattgtgtgattacgataatgtgtaaatgtaagtttattaatatatgattatttaaatgaatgttatattgatttattcacttttcttgccgagtctttatgactcacgggtgctgaatggtgcaggtaaagggaaggctaaggttgagcagccatgagtctggggtcggagtagcaatgtacatatcagtcgcggtgtcacggcccggtggacaagatgtttcttttgattgtattttgaaatataaagtttatgttgaaaagtattttggaaccaaatgtaaatattttgttataaagggagtccccataaagattagtattcaacttttataaaaataaaatgtttatcttaaatgtaaaattttaattacccacacttttggtataattatataagttataaaagagaattttataaaagcacacacacgtggtgtccctgttggatagggagttacaacatggtatcagagcgccaaggtttttagatcctgaagactggtttgatatgt

SEQ ID NO: 310793 - DNA, 551 bp, Cannabis indica
ctaaaaataagatttttttatagtgttcctctccatatagggccattattaattctaaattattttcttattttttatttttcataggtttaatcctgtcaaaaataatttttattcaattaatgaaatcctagtataggatttattttttattctttaaagttgttaaaatttgggatttacaaatttgatgaaacataattgtaacacttttttgattatatatggcattgtttgtttatttaaaatttatataataattaaaaaaaataatttaaataaaatgtatatttttcaaaaatgtttaatcaaaccttcgttttactaggattaaaatctattttatatattctctcaaagaaaacaagatatctattctttatataaaaaaaaaggttgtatataacaaattgtgattctactagtctatttattattgtattatatctagtcgtgttcatccggtctaactcgcatttttttggtcaaacaacatccaatctgcacttagtgcagattttatatttcggatccaattcgatccgcataac

SEQ ID NO: 310794 - DNA, 553 bp, Cannabis indica
tggagcatgagagaggacttgtagagaccctttactgcttgtggaatgacttagccttgagagagtgatttaatgtcctttatatagtgtaaggctcacaaaagatcctcattcaaacatgtaatttaaaatagggatattaacatctttttatctattatttaatttacaaaaaaaagatggttaaatccctagaatgtaggactaatatctcgagggaatatccctatttttgtgggttgttgggcctatcccacaattcgttagcttatttggagttgtctgcaccagttggtcggccaaccctatttttagagcctggccggcctatgaccttctatggtcggcaaagtatgttcctgctagcctaagtatgtgtttgccagcctagacatgtgcctaccaacctaggtatgtacctaccaacctttttatgtgcctgccagcctttctatgtgcctgcaacccttggtatgtgcctgccagcctttctatatgtcaaccagccttttccacattacttttgtaacgccctaatgctaaggcacgctac

SEQ ID NO: 310795 - DNA, 2837 bp, Cannabis indica
gattattaacttaattaaaaaatcactaaagacaaaatacatatggggaaaaatgacctttttgccctcccactttaaaatgacataaaagggtactaaggggtattttgagaaattctaaaatctcgactattcccaacattcccaatgtctaaactattgtcccgatatactaaaaatactaagatgtgattctaatagccatacaccgcgttccaatgttgccgggaacaaaacatgcaaaacttatgaaatttctatatgtgacataaaaatgtattctgaattcaaataaatcatcataaataattaatttaatattaataattaatttccataatataggcctaattatctgttaatttccaaattaaaactaagcggtttttacatatagagtaaatcaacaaggtaaatctcgttcacatcccttttattttgaattttgatatatgtcagctgcagctcaaattgcttgaactctaagctcacatcaccacaatactaccttattgcttctccctttcttggtcgcttcgtctgttcttcatttgtaaagcgatggtaccatctcatatatcttaatttgaaatgagatgaattgaaatattgtggtaatgtatttgtctgattgaatattatctgattttgtagatctgattcatacttttacagaatcggcaaggcaagactcgtctggcaaagtactacgttcccctcgaggtgtctgagaaacacaaggttgaatatgaggtttgtgatgcttgttcacacatgattcctgtttcaaataacactatgtatctcaaggattttgagttcaatttttgtttgcttatggattcgtcatggaaaaattaggcgcgacagaggtctttccctttgttgatagtgatttgaggaggatggctgcgcgagtcattgagaaagctaacgaagtttacgtcagtaaatcggtatgaattcattttgtgattaaaagatgattaatagtaggtcgtaatggtgaattggtaattagaccagattgagattaacttggtcgcttctgtgattgattttaaaatcatttgtaattggtattattttaatggaaatttataattggtatttgataaatttattttatgccatgatgattagctcagttttgatttctgtcatacaaattatgaagtaatcatggatataattgatatatgctgcctaaaattagttcacactttctacaaccagattatttgataaaagatttgagaaacataacgaaatagggacttatatagaaaatgtaatgtgctttgtttaagaatatgtactccaacaaattccacctctttatctcagcctcatgtactagaagttgtccttacactattagtattttcatgtccttattaccaaaatttttaataagcatcaaggttaatttgacactcgatggttatttgaaggaaacatgcaaatgcaataatgaaaccaaaatgtaatttatctcttgatttaagattctttgtcttgtcctgtcctgtctttatcatttttttttttgtgggctaagtaagtaatggaatcattcctaccaacagtagtaagtgttcgtgtgaatacaatgaaaaaacgtagccttgtattttcttgtctaatttagaaattaacagataattagagattattatgaaacttgcataatatttatgatttatcattttatagagatttatttgaattcagaatgcattatatatgccatatataaaattttatgtttttgcatattttgtgcccggcaacattggaatgcggcgtttggccattagaatcacattttaattttttagtggtagtggggcaatatagttagacattgagaatgtcgagaattatttgaggtagtaaatatccaaaatacccctaggtgacttagagactttttagcataaatgagggtagaatggtcttttgaccattaaattccttgtcctttagtggactttagttggatattatattctaacttttatcctttaattaattagataaacattggctttattttattttaaccaaaattaaaaaaaaaaagctatgaaattcaacttctcacttcattgtctctctctctttctctcgaacccttagaggatcaacaacatttggggatttttcagctacaattcagtagagtatagcaagctttttgtgattcaactctaagtaagatactctagcctttcttttagtaatttcttaagctttaagtttgagattgcatgatttgtaaggtagggttctgtagcttatagggttgtataattttatgttctggggttagattaaggttgtttatgttgatttgagctggttttagggttgtttgtgttgtttgagcaaggtttgaatttatgaactcaaactttgctctccaatggtgattcttgattctgtgtatgttgtggtgttttattgtcttggatatgttcattgtggtctaaataacatgtttggaaggtttggttaagtttggggttgaattaagagagtagtgaaattttggaattttcctgcactaaactggttgaccgattcacggggacctgtaagaaccgaaattctggctggtccccaggaaaccccacagaaccagaattccggttggggcaccggtctactggttggggcaattttgggaaccttagtttttcctatttttgcgatatttaggacatttctatgttattcctcgataaggaaacttctagtttcaagtttaagtccccgaaaagtgatttagcgtgtcacttatcagtttttcaaataatgtgatttaggggcct

SEQ ID NO: 310796 - DNA, 818 bp, Cannabis indica
gataaagtggtcatatattttcaatgatgatatgtattagtttagaaataaaatattaggtatatgtaagtatagaaaatcaaatttcccattgcaatttagagacctacattggttttcaaaaccatatattgacttagctttgggttttcaaaactattgacttagctttgggttttcaaagctattgacttagctttgagttcaactatatatcgagctaagttaacgggtttaactaagccttacaaccaaagaatttttccataagatttttcctaaatctctcacaatagttttcttgaagtgtcaattttactaacctagttgtttttccaccgttgccaagttcacctcaactaataatttttcaaaagactatcaacctctttattgaagtgttaatctcactctcggatggttgtagtgacaatatcaatcttctcgagatgtttacaaaactggtgtcaacctcacctacatccgagttattttcctaccgatgccaacatcacctctcaatacaatagatacccgattttgaaatacaaagtaaactctctctaattagataaaatacaatgtgaaatcctagagagaattgcaagcacactaaagaaaataagaacaagtttgactcaattgtatatgggtggtgtgtttatgaaaatggataaatcgttcgcttagaacacttaaaaatgatgttatatgatgaataaatgctcaaccaacattagtttttatgagaaaaatcagtttatataaagctcatgaagaaactgttggaattttatgccctaaataaaacccattac

SEQ ID NO: 310797 - DNA, 934 bp, Cannabis indica
ctatcatggttaatgttgttgtttcttctgcatccaaaggcaagagtgtcatgccctgcgaactgcctcatgtctcccctcctctttgctctcagagttcttcaaagaatatttttgggatcaaatgcactttctctaagcagaatcaacaagtcggctcctctatgaggagtatgctaaaaagagcttgagcttctagtaattagtttgccacgattccttccatttctaattctaatgttcaagcgggtgttgctcaacaaccccaccaagaaatatgagttttattagctggaatgcttgaggtttaaggagtactcgggcattccaaaatctatcccttctagtgaaaccacatcgaccttagattctttttgtgatggagacaaagcttgcttctcactctagtaataggtttaaagctaagctgtcttttgataatgtttttgaggctcctaagaatggtttaggggagattaatttattttttggaatgatgttgttaatattaatattttaacttactctatgtctcatcttgattattatgttacttttaatgataatattaatttttatctttcatgttattatggtttcccttattaggttaataaaaaggaatcttggactttattgtatgatgtggctcctttgagcctatggttgattgtaggtgattttaatgattatcttggcttaaataatagaaacacttccgacaacccaccctgttatgctattaaaaattttcaaaactttgttaataagtatgatttgtctcctttgcctttcattggtaatagattcacctggaagcatggtaacctcttgaaaaggttggactagtgtattgtgttaggacctatgattagggtggtgttctaacatatattaaataaaagggtaattgggtcattgtattaagaggagt

SEQ ID NO: 310798 - DNA, 2524 bp, Cannabis indica
ggcataaaacccaacagttaggtgggtgccacacattaggccattatattttttggcatctttcattttgtatgtgattcttgtgtttctaattaatttgcatttctccgttgtaggtggagaatcaaggaccgttccttctttgtcatcccagaacaagcaaaagctgtgggagatttttgcaatctctcaggaggataggtggtggaaaaaattgttgaacgaaaaaagatttggcttcaagttttctttggagcaaagtcaaggggcagatagaaggtaatttccttattcaaccgagtggtcggatctctattttcttactgaagcgagctttagagtttactggtgccaagttttctattcttactcatttaatagaggaagaacggattctagcaaaccagtacactaagaggatgtctttcataatgtcgtcctcttccgatattttggcaagagccaagaaggccacgactcagaaaattagttccaaggggcaatcatcaattacggggcgttcaggcgcttttgcgtctccgaagggtgttgtcacttcgaaaaactaataccaggaaagatccaaataagagatgtaaagtcgacttggggagcgacgatgaagagggcactattattccaataaatgtttgtgtgcactcgaatccgtctacgattgaaggacatgttgaggctctcttgagtcctctagatgagaggcatttgcatgagcttggacacgctgcatcttttgatgacttggtctcttcaatatatcgagtaagtttcttttcgaagcttctttcttattgaggttttttatttgttctaatatttgtttgttcttgacaggctctttccgatgcgatttttattcgtcgagatcgcaaatagcttgacaaggagaacaccgcccttaagaagtttaacaaagcactttaggaggaaaacaagagggtcattgaaaagcttaacactttacagaagaagattgaagaaactgataaagagcttgcaaatgaaaaggagaaatcagctggtttgtatgctcagctagatgacattgcatttaaagctatgtgtaaagctcacttagagttgttcacaaattttaaaaaaggtaggtctactacgtggaaggtagatgaggagttagaagtttataggaaaatttttcctgatttagttacctctggtgatgaagaatctaatgtttcagagtttgacactggtgttctcgaggctgaagaagattgcaattaggttgccgagtttgacaaaggtaccattgaagttccggttgattataaggtggctcattggtgtgttatttctacttcttgtatgttcattttatttgagcgatgtattgtcttatttatgatgggaaccttgtcattttttggactttgattttatgtgtaatgctttatgttgagctcttttgatgtggatttgtgttcagtgaactaagccttcatgatgtaggactttgctctatggattgagcttttttgatgtgtattagacctctttgatgcaccactttattctatatgttgagcttgtttatcgttgtttattgatgtaggattatgagtatcattcactgcattttcattggatgggatgttttattcggatggaggatttaagtttttccttgtcttttgtatctacaaggtaatcatgtagcatgaatctttgccacaaatagggcatgtactagttaggattcttatatccgaccaagaattgtcacgttgcaaagagtgtcactctaggactttcaattcgtattggggttcaagcatccttcatagaatttaaggatctgtcctagaattgttacgtagcaaagagtgttactctaggactctcaatccgtaatggaattcaagcatccttcataggatttaagtatttgtcctcgaatagtcacgtagcaaagactaggactctccattcgtaatggaattcgagcatccttcataggatttaaagatttgtcctagagatgtcacgtagcaaagagtgccactctaggactctccatccgtaatggaattcaagcatccttcataggatttaaagatccttcctagagatgtcacgtagcaaagagtgccactctaggactctccatccttaatggaattcaagcatccttcataggattaaaagatccgtccgagagatgtcaagtagcaaagaggttcgagtttctcggattaggattttgacgtgtgatttatacagttatgttatgtgattaaggcatctatccagcacgagactttccattcaggtcggccaactcacttgaattcaggaaagaggtgagaacagcgtataatatgtgatatatatgcaaatgaatgtatgtgtgaaatgtatatgcatgcttgttatggttggtacactaccaacacttgtatggaaatggtacaaagtccattcgtatagtgtatattgtttaaagagtacattacggtgttactatcacaagtacgggaaagtatag

SEQ ID NO: 310799 - DNA, 676 bp, Cannabis indica
aagaaaaaaaagaaaatcaatattagtcaggaattacaagaaaaaaaaaatgtaagcattcacataacagaaagacattgcagatatttgatattttttctattttacatctagaatcctcctttttccttgacacttcccaccattatgagccccatatagattcaggcaatgacttgaactcttaaaatatagattttttttttctcaccacgaaatttttcttaaacatgttaatgcttgacaacttatgtttaaaaacacctttaagtaaaatacccaaaggcacaccccactaacaggagtcaagtaaaagtaaacagtagtacaaccgctccccattcaatacctgaaagagaacgatgctaattgacgataagttcaaagattaatattgtaaatttgtgctaagaaaagttacaaatttattaattcaaaattatttggtattttttaatggctattcacaatttttgcctttggattatgaactatatattattatatctcctaaatttttcagcctaatattataaattagtcattctatcatatcacacgtggcaaataaaacgatgatatggttgtttagccaattgccacatcagtacacatatgtaattaatttaaaaaaatactataaaaatttttaaatttagttttatttaatcttcat

SEQ ID NO: 310800 - DNA, 779 bp, Cannabis indica
aaaaatgaaaaaaccccttatttttacgcataatatatgtatatgaataatgcttttggtagaatattttgtttaatatgtatcattattttattttatatttatatttaatattattttatttaatatgtgttattattttatgtctatatttaatattattttttattttatttttattataattatttgtcaaaaatattatcattcttctcgtcatttctcttttcttcctctcatttctctctttaaaagttcttaaaaatggtattagaattagtttcacattgctaatatgtagaaataaattgtcatatagaggatgaatggagtactcccataaccaattggttttaaaataaaaccctatgcaatcttatcttaaattctaatatgatataagaactgcatgtgatctgttgtgagtccaaagtgctatcggtctaaataagcgagccataaaaaaactatttataatctattgttgtgagctatttattaaagtcttttacctgtttcaaaatttatatcattaaatatggacatatatatatagataaaaaaaaaaaaaatcaatgacatatcttaaaaaaataactctatataacatcattcttaataattataatacctatatataaatatagggatatgattttgtcccgtgatgtactttcacggaatgtatttcatagtacattagatgggtctcagggtacattaaatgagtgtcagggtatgtttctactttttaaccctaattacccctacatcaatct

SEQ ID NO: 310801 - DNA, 1711 bp, Cannabis indica
aagttttaacaacaagtagcatgtggtggttagttctccctcacaaccaagggtagttgttcctcatggctgcttggaagggaggccaagtttagtttagatggtcctcgaatgggctcctccgttcttagctgtttcaaagttaatacaaatgttgcaattaatttgtcgggcaagtgtagtggtttgggtatgatgattggagatgatttgggagttgcttaagctttggcaagtggaatttgaatggttcttttactcctgaaggggcggaagctttggcaatctgcagcactttgatttaatgcctttcttttgggtattacaacatcattgttaagtctgattatttgaatgttgtgcaaaattaaaaataatatttcttccataacatctttgggtattgttttagatgatatcattgttcttcgtaataggttctaagtttttagttttgtccattataagaggttatgtaatggtgttgctcataccttagtcaaactttatttgactgacaagtagtagtattatttggtgatcaaagaatcctagctgtattcagaatttatttatagtgaatgtaatggtagagtgcttattgcttttgatatttgatgattgagccttaattctcttatgattttttaaatttttatcaatttttttttttctttatatattctttttcttattaagaaacggatagcggtaacaactacacaataatttttaaaataactacttagtagcaccaaattaatcattataaaaattaataagtcggtaattggttgctatcatatcactagtaagataaaaaattagtagtggtaacaaattacttgttgggaataaaaacttcaagcgaaacggaaaaataaagaaacgaaacaaagaaatttactcagtttggtaaaattaccaaacccacaaaaaagatatatttcccttataactcaaaattacacactcactatctcaatcacttcatccaaatgccattacacccttcgcttctttctcactctcaccacactataaactcacactcagttgtcttttcacaactcactcttcttcttacacacatcctctctcacacacaaaacacatatttataaagttacaaaactcgggcatcaagataacttagggaccaagacattccaacactttctctagagaagactcttcaaaacttagccaccaaaactttctttttcacacaattaataattacccaaaaagaaattgcaactttacaaatatagataaataaataatttcagtcaaactccaacaatctccacctggactcaaattctctaaattcacaactcaaactatcaatatgagtatatatgtatcgacttcatactctcatttaacttcacttgagcacttgacttcacattcttcaatcgttcactaatgtcttctttttttaaacaaccactaattggaatcagagtcttatccaccttgtcacattccttcactctaactgaataccttttgtgagtttccacctaaaatagtctttccaattaatctatacaaaatttgtcctttcctacccttcataattatcaagccacctttcatgatagttattttaccatcttttgcagaatagccataaccaagagtatctaaagctcccaaagagattaagctcctcctgaatgttggaacatgtctcacatca

SEQ ID NO: 310802 - DNA, 4037 bp, Cannabis indica
tcactaattacttaactattggcaggtctctttgtatgtgttatccagaaagaggaggagtcaatgattattcgttcaccggagctagaagtgaaaattttggtagacagggatcccataaaaacttcttttgaggaaagggccagaccgggtcatttctagctaaactttcaattagggttgctaatggaaattatttgacattttattttagttttaatgtgatttagttcttttcaaattttctatgtgcatctattttatttgtacttaatttcttttaattgtctgatcactaattagctgttttaagatttcaatacaaaatctaagaagtgagtattgattattctatactgaaataaacacaaatttcgatataggacaagattatctatatagtctgtgtagcatttaggatttttatacttaatgcctcttatttgtttaaatttatcacgaaagtagaaagtttgcatataggttgagatttatatgccctaacccgaatataagtttttttagtaaatccgctaccacataaaaattagaatttgtaaattgaattatactaaatcatataaagtaaattcaattgaaattaatcaccctaagctttaatcattgttaaattgcaccttaatttatttttattttctttttcaatagtttttaaactctttttctcaattattattgtcaccaaatagaatttaggaatttaattgtttagtaattaactaccatctttgtgggattgacttcactcttgtaagtctattacttgtaaacgatacgtgcacttatctactataaaatgcataataaacaacatgtattttgacaacacatcaataatattaactaatattgttgagaacatatggctgtatctctcctccccaaccattgtttgtgaagtttgttcatgtattgacatggaaaagaagttaaaaggaactcaagttcaactcagcattagaggtaagtcttgtttaatttatgtttggcttacaacttaactaagtgacctcttcatgaaaaaatgacactaaacaattattactagaacggcacaaggcaagacccaccataattcaaattcttcaaacaagatcatacattccaaaaacaaatgctttacagcaaattaatgcaccaacaatgggaaatatcaagataagggtgcctttattgcattttatcatccacattcacttttcctaaccacctaaaggctttgactttgttctaaacttacgatatcattacaagtgcaaacaatggaaggagtagtccatttactttatatattatagctcgatcgattttggacatctcgatcacaaggtactttgggctcacaacagatcacaaagggctcttttatggctcgtctttttggacctgcaacgactcttttggctagtctttttagacaagtggcactttgaatcggatactcattagagtttagtttggctctgataccatattagaatttggaaagtgtgtggttaaagtgcatgaggtttcatctcaaaaccaattagcaatgagagaataactcatttaccttatatatatgatattcaacaaccattttaaaatggctactcaatcatattaccaatgagtgagcattatttttggctaaaagactttggatgattctatataaattcaattttccacatgatacattttgacaatatttaaggccattatctataaaatattacctgaacattgctccatctctcttctccacccattgtttgtgaagtttgttcacctattgacatggaaaaagatcaagaaattcaacttcagctcagcattagaggtaactcttccttgtttgccttaactaagtgatctcttcatagatgtaagttcaaagttcataaatgaataaatgaagcaactatagtaaaacattcatagtaaagaagtacttactgatatatatgatggtgtgtatctgtcatcttaaccagctgaggaagctaatgaaggagattctcatggctatgcaaatgaatccaaccaaccaactactcctcaaaccagaaaacttggactttggattcgaatcgggttttattcattccttgttctctctggccaggctgcagcaaccttattagggagattgtattatggtaaaggtggaaagagtaaatggatgggatcatttgttcaactagctggctttccagtccttcttccttactatctcttccaaaaaatgaagtgtaaaaccaaaaacaatcacaacatgaatactaacacacttcctcttcaatcaaaaaagccatctatgttaattgttgcctcagtttacttggttcttggcctaattgcagcagcgatttgttatctatactcggttggtctgatgtaccttccagtgtcaacttactcaatcattttagcatcacaattggccttcaatgctttcttctcattctttctaaactcacataagttcactccttacataatcaactccctagttcttctcaccatctcttctattctgctcgtattagaacccggttctcaaaaatcttctaaagtctcaaaagggaagtatgcaattggctttgtttgcactgtgagtggctctgcagcttatggattgtctctctctttaatgcagtttttcatgaataaagttcttaagaaggagagcttttcagtgatcattgatgtcatagtgtatcaatcacttgtggcaacaattgtagttcttgtgggactttttgcaagtagtgaatggagaagtttgagggaagaaatgaatgagtttgaacttgggaaagtttcatatgtcatgacattatcatggatagccataacatggcaagttgtttctattggattattgggtttaatgctacaagtttcttctgtcttctccaatgttataagtgttttgggtttgtctattgtcccaattatggctgtgtttttcttccatgaaaagatggatgggatcaaagctatggctatggttttggctatttggggctttgtttcatatgcttatcagaactatcttgacaatccaattagcaatagttgaaattatgaactagctttgcttgttttctaagatctacatgtaaaagaataggagagaatagtatttaataaaataaaagattgtatcttttgttactcaagctaaaatctcttttttctaatagtatgtaatatttattgtcctaatgtttctatttattctcatataattgttttgtagagaccaaaggtgattttttgagcaatgcacctatttttcatctttttatatttaaaattattactttttaaaagtgcctttatatcaattttggaaaataaattaatatattaatgctagtcttcaactaccattatcaatcattaaacaaaatgtggttataagtatgtttttggcaggagaattgctattgggtaccagttgtagataatgccttataattggttagtcatattttttaaaagttattttttaaattatataaggcttgatatttaattacatcaattggtatgacattgaggagatgctaggtaccagtgatacattttagcaattctcttttgccagctctaacatgatccaataagatatttcttatttgtggaggttcattgaaagcattgatatattgacagtatttaatgcaatttgttagagggaagaaatgaatgagtttcaacttgggaaagtagtcatgacattattatggatcactataacatggcaagtttacttcattggagtagtgggtctagtactagaagtctcttcactcttctctaatgtcataactcataagtgttttgggttcacctattgtcccaattatggctgtgtttttcttccatgaaaatatggatgggatcaaagctatggctatgattttggctatttggggctttgtttcatatgcttatcaaaagaaaaatgctaaaaggcatcaatggtgtttagcaccctcctacgtgtcaatatcgatatt

SEQ ID NO: 310803 - DNA, 1066 bp, Cannabis indica
tctattccgaacatttcaataatgaatctataaatgattttaattatcatttcagcattttattaattggtcgaaaatttgtagttatatttagagagctaattgtactcgatttgttttttttctaggatctctttgttataattatcataaaaaaaagaatatttatttattaatttaaagaaatttacataaagtactaaaaatttgctatttttttttttacatttttttttagattttctttcttaacatttttacaaatttatgattttttaaaaggaagacaacattacgttgctgcaagattatatatattatattttcacactgttaaaattataattttttttattttttaactcaaaagttataattttttttttaaaacaacttaaaaagtaaaaacaatggtatgtaagaagaaaaaaaaaagtcagtaaaattgtaaaaaagattaaaattccataaaacataaatttttttgttggtttgaaaagaattagcatacttggtaaattggtaataatgtaagtgacgtacctataaacatctctacaactcgtaagatgtgcaacaaactggatacattaaatttagtgaagaatttttatgtacttgaagtcagtgacctcaataatgaaacaaatactacacaaaaccgtaaaagtgcctcttcctttaattaaagggatcaattatttatatcttctcaacaaaaaaataataataataatatgaggagtaatactgttaacctcttgttataacatcttagttaactttcatacctgaaaatatatatcgaaattatttttttcaatttttttttacgggagtgttcgttatgcttataacattatctctgtaaatttttgaatagtttacagtgtcgaaaatacgtttgaagttttttgaacgcgcgtggtaaactggaatatcaggaactctgttttcggaactgtaaactattcagaatttttaaaatatttacaaaaatgatattgtaactataacgaataccgctattaaaaaaattgaaaaaaaatattttaacatgtaattt

SEQ ID NO: 310804 - DNA, 1850 bp, Cannabis indica
attattggaataggaacacaaatattttccttggataaaatttgacaagttaaaagagactactatgcgtcctccacgcatgagtcggcttcagattcttcttttgggtgttcctcgaagtctatttccatttctacatctgttggaattggtgctctcgtgttcccaaattcagagtctgactcatcaatttctacttcaaaatgataagcaggtatgtcgtcttctacttcatcgatactgggtgttgtggatggatctaagtccttgctctttagtaatggagagtaatttggctcatcggacccttttgacattttctcatctttggattcttcatttgaaggaatctctattacttttactatttcctctgcttatatttgaggtgggctttttagttcaagttccagcatttctattgtcacctcaaaatagtttggcatttctgattctttcaaatctcattcatttgttatgttcacagattcagctatgtcctccatactaccgtcagttaatttatattgtacattcttgacgtgttcttcttctatgccttttgtttccacattataagtcttttcaaaaatgaagttgtggaagtcaagcgttagttcacatatgaatgttgtgtatctaattgtgtcgccaagatttgagacacggtgccagacgtcattgatatagtagagaagtttaaggacatgtgacaatgcagcccttaacactagaaacttttctcgtgatttgattaaggctcccctcacctctactactcttttgatttcttcattaattgtgatgacctctcgtagagctctaagaatcttatcctcttcgtggtatttatttttgatcttaagcgataaaatgctttttatttctgtaagtactgtttcgtttgacgctttaactctaagagacaattctcctatatctgcaacaattatcccttaactatttagtaagacttaacataagaagattcaaataaatatttaccagatagaataaaacctctttatttagttatgaatttcaacaagctaaaggagttacactaaaactcccaactaaagtggagctatacttaaaccctttattacaaaaaaaaaatgcaacttgactattctactcttttatgcctgatccttcctctaacatatcctctgtcaaatctacatagtcgagttctaaatacaccaagtttaacgagattagtaacttttgaaggaattcagacctaacaacattattgggtcaatgatatatttcttcttatggtgatatatggtgtcgatagttaagggataattgatcatgtgtaggtcatatcttttggcctcacctaccccgacatgccctagatgtccaagtttgctcttagactacgttgaacatgtgccatattgagagcgtgcatcagggctatgtacttctcatgcgacttcagtaaacaattccaacaatatattatcttatccgtcccctctgtattttgttaattatatcaaagactttgttttcttctcgcatagggggggtcttaggaactctctttaaaagctttaatgtgcctgcctaacaatgtgttctactttctctggcctcatgatgtttgtgcttagttggttctagggttttcaaaatgaaaagagattttgaaacactcttgtgagtgagagtgaggacaaaacacattggaaacactcgtggttgtttgtagggttagtcatcattccatgaagcagccaaagtgatgtactcgtgcataaaagccttcattctgtgagtttaagggcccaatggaggcttgaagcggggacattacagttggtatcagagcc

SEQ ID NO: 310805 - DNA, 3070 bp, Cannabis indica
accgaccgccaaacattggatatccaattgtgatcggatcagattggatgttatttttaaatatccaattggatcggatcggatgttggatgaagtgtctaaaaatccaacacatccaacatccaattaaactaattagtattttcatttagtttgaatgagtaattagattttataatgttatacgtaaaatatatatgtatatataaaaattaacattaaaattttactctttttttcttggattgcatggatccagtctaatccagtacatattgaacctaaaatattggatggatccaaaaatactagtctaaagtattgaataaattcaaattgaaccatgtaaatataaatgaaatatatccatggatagaaccgatccaatccaacatccaatggatgctggatcgattggatgactgaaatcaattggatctgatcggatggtaaatttaacatcaaatatataattggatcggatctggatgggcctaaaaacattggatgtgatccaatgaacacccctatatgagaatatctaaatatatgtgtgaaaatttgaaaggacataaatgcccttagttgctattatgtgatttctatgacataagggaaaaatagtcattttgaccaaaagtgactgaattgtgttataatctcatttttgaaaatgagaaggaaaaaccttattttctggcctcttgagtcttcctactgtcacttaccttctcgctaaccttcttatatgaagttctttaattttcagggaaattaagtgcaattggaggggaattcaattgtggtgttgatcttaaactttgtaaaggatttgttgaggtattttgatctctttgctataaagttaatctctaaaaacttttatgtgtaagttgaatgcatgagattgttaaagtgttttaggtatgataatcttggtggattccttgatgtttttctttcgaatgattggctagagtcttctttctttaagttgagccttattgtaagggttgtgtggctgtgattgtctatttgtcgttgaaggttatgatgttttgattttgattttgggttctcaagcttttagtttgagtttgagattttttagaaattagttatgtaatggtgttttatgaatttatgaagcatgtgtttagacatgtaaatcctaatgggttcattatacttgtttagcttcatatttgagcctaagtgttaattgcttgaattgtatgaatgaaataggtaaattctcaaaaattggcattttttgggttataagcccagttatcgcgactagatttgggatcatcacgctaggctcaaacccagaatagggatagcccctgcccaggctttagtttaatctggttgcaactacaatcaattgggactagatggcagcgacaatgtaatttttgctattttattttatgcagatttgttgactcccactctgatttggaggttctttatatcattagaaagcttattttgagctctattatttggtccagtgttagaatcttatatgtggatatttatgaatgtgaatttggaatttaaccctattgtgtaaaaagcacgaaattgtgactaggaatactagtgcttagttagaatcacctgcagatcgggatttctcctcatacattataaatctggtaagatagtaaattaagaacacggagtatagtgaggtggcgtgatttatattatgtgattaataagataaaagtgtaaattaaggttattactctaaatttatatgatgtggattagggttattattatcctaagtgtataatttgagaactaaggttattaccctaaataaatgtgtcgtggattatagttattacctgaactagatttattgtgaactagggttattatcctaagaatacatatattatgaaataagatcattaccctaaatatatattgttatacacatgcgttaatgtattaagtgaataaatactatatattatgttatatggatagttagattcaatttctactagggttaatatcctaaattttatatatgagcataaactaaatgaattgagtgatatgtcaagagttatgtgtacaagatataactgagttaggggtgataaatatcatcaggatgaaccattataagagcataatgtatggattatgtatatataataagagttgtgtgattaaggcatagctaggttaaactcggtaactgaaactaaaataaattctattaaggccttatatgtaaaaaaagacgtatgagtgtaacatatgtatctatattataaagacattagatgcagtgtcatcattatatatgaaataatatgataaacagtgtggttctacagtaatatacacagaggcataatgtgtgaaatataattgttataattattcatactatattgttattattctatcttgttgggccttggctcacggatactctcatgtgtaggcaacggtaaagcagtgttggttcagccatgagttcgagagttttgaagaagaattgcacatgttccagctaagctagaccacaagggttggatccaatagggaattgtgtagaaattctaattttaccgcttaggtcagtctgtataaaatagcttgtaatattattaactaaattttatgagatcccgaatatgcaactttaaatattttggtttaaaataaagtatgtatcattgcaagttatttaattaaattaagtttattattgatgttaaatcacttagcttatggaccccaattaacggaattattttattgtaatcatgacacgtggtgttcctcagagtaggatgtttacaaaaatattgatgaaaaaaaatacaaatagattatatttaaaaaaaaaagtctgtttaaattttttttgaaagtgacctttttttttttcaaaatttaaaattttgattctcatttttaaaattagaaattgaaatcaattttatagaatatattttcgaaaatattttcacttttataattaaaaacaataaaaaaaaaaactaattaaaaaagtgttaaaaatcatatc

SEQ ID NO: 310806 - DNA, 1197 bp, Cannabis indica
gtaagattctgaatttctttttcttaagaaaaaaaaacatacacacaaatttccaaaactatatatatatagagatcttccaacagcattatataatgagtaaaaaaatagtgatgtcgtggctgcagtttggaccagacacccaaaggtccaagggtgtcagtctttatataaagaaaatttgatttgttccattacactgtacgtattactattcttcagattacaacatagcatatatatatatatatataaacatcagccacattctttctctatcgagttactttacctgtgagtaagaaaattcatcaagatattttgtggcataacaagaaaaagtttgtgactctcgttgagtctcagtctttcaagctattggggttctctttttaaagcttcaaaggggtccttctttcagtcactttctgtgtcgttttctttctctgatgatgataatgataatatttgctctgaatgttggtaaagccttccttctctgttcttatattttgtcaagtttgattcagattagtttttgtgtctaacccttttcatctatttcatcagtaaatttcttctgagtttaactaaatattttcaacgtgttgtttttcttagtcttttttttttcttgtatggaattgatttagtttttgttaaataaatttcctcttctcttgtatttgtttatgtttttgtaaattattatttgagttttttttattttattagtaatattattgtgttttatgtgtatagtgtcgggattttttacggtggtcgtcggattgcggttattaggtaataatttataccacaatgtatttgtatattttattgaatatttgtatataatgtgtgtatatattgtgtgtgtatatagtgtgtgtatattttttatgaaaataaattttgtaattgtattttatatattttttgcaatatatatttattgtgaataaaatgacattggagggattttattagtttcaaaaaaaaaaattagtttagaaataaaaattttaaaatggaattagtgtgtgatataattttatttttttgagataatagtgtgagatataattgattatatatatgtatgtataatttagtaactaagtaacttgttacaattttttataactagttataagttatgaaataattaattttgtaatttcgttgtatttcttt

SEQ ID NO: 310807 - DNA, 875 bp, Cannabis indica
tataaatatatcattaacaaaaaaaatcaagataatttgaaatctgtttgatatattaaaaaaagaaaaccaagatatataatattatattatttatgtattatgttttttcttcctttgttttgaaatttatgtccgaaagagttgtccccattagttattacccactatccaaattttgatttgatgatttgggttcaatttttaaaaccctttaatatattatatatataataatatatataatatttttataatgtttgacttacattatcttcaatattatgcacaaataagaatcatatgaagttttaatttgttaaactagggttttaatatatactacatcgatcccttaataataataataataatcattatatatagaatgaagttttgttaaatatatataaagagagagtaaaattggcttggcattaccaactatgttacatatacaaaatatatatatctataaatccatagaggtcaaattatgtgacaacatcaaaaaagtgttatatatatacctaaaacacggcaatgactttagggtttcaaagtcaaacctctatttgacttctttgcttaatttttctataattaaatatatatatatatattctcttaatctctcaacctctgctacacgcctataacctctttcataatatatactatcatcaatatatatattcctctcactcacttattcactcatcactcaaattaagaaattacaaaatgagtacacatatataaatatatatatatatatatataattgtttttgattatgttctcttcaagaatgagtacaaatcagtaggacaaacagttagttagctgctagtaggtttagaaaaaaaatccac

SEQ ID NO: 310808 - DNA, 1337 bp, Cannabis indica
ttttctactaatgttactaaaaatatttaaaatttgagaagaaatttaagatgaagattagatttgggaaatataaaatgacgattacaagtgaactacggtaatgacaagagatgagatacaatgatgacaacgagtgagatacaatgagacaacaagtgagatacataaataacaatagttttgaatgatcgagatatgaaaaataatgcatcatggaaatatcgtaatttttttctacatcatcctatttatttatttttataaaaataatttttttaacaaaaaaatttaaaatactacatataataaattttaaacttcttaataaataatttcaaataataattaataaaattatgcatttagtttttaataaataaaattattaataataatatgaaataagataatgtatttcctcaaaaaaaaaaatgtatttataattttactatatattaaaattgtatttttaagtaattatttattataatactaaaaaaattaaattcgttatgcatacttttgtataaacaatttcaacccaatttgatttgttgtttttgcgtgtcaatttatggtgttcacgtgttgcctatatatttatctcacactatatgctgatattagtatgatttatttagtttatattatatatatatattaattgtattgatttgtttgatttattttaataatacacttgtctattggttctcgagcctctaggtcttcttcgaggtcgcttagttaatgtatttggctgattagggggtgcatcgctacgtgttgtctttgcggctgcagcctagcgttctagttcagcattccttggatttgattctactaatctttgtcggagttgtctcttttgcaattctactaacaacatatatcttgtgggatcatatgcgtcctcagtacatctttctaggatctcacccccgattttttcaaatccttcttcactgtttctcttccttaactaggagtctcagtcgcatttgtcttatgagaattctgatgttcttttcctggatgctttgtctctcccagttgggtatcattgtttcaagggttgtcgtctgccatggaaggaaagtttgaatatttttaggggagtttttggcggctaaaccctctcaattgtcgtttcacttgcttttaactttctaagctcaaattttggcggtaaaaccctccaaactactaaactggtagcaaatttaaggtgtcattcgattaactgtcactatgggctgtttatgtgtacactcttgtacacatgacacgtttatattggtacacctaatgttattattttaaaattaaataaa

SEQ ID NO: 310809 - DNA, 805 bp, Cannabis indica
tagtttaattatttggtgagtccaaaccgaaaaattgcatcgcactgcactattttttgcggtgatttctgcggttttttagtttcgcggtgcaagtgcagaaaaactacatgtgcgtgttatttaaaaaaatagccaaaactgcaccagccgcaccgtgaacaccactagttaatatgatatgattattgaatttcggtgggctaaaaatagttgggtgatattgatagtacattgctactagccaaaaggtaacacatttagcttaacattttaaagtttattcattaatttttacttaataaaattaagtgataaagtctgagaatttagtattttaattatatattttgacatagtgatgaaaattactatcgaaatctacaatgctgacttatgccatcgaactaggataatttttgtctaatcgaagagcgtgttttgtcaaactataagttgcagaagaataaagcaacatgagacaaaattactcttaaaaaacaaaaaaattataacattctcaaacaacacacgaaaagaactaaactttagcttttaatattaataaagtctatctaaaaatatcacaaaataactactaaaaataaattatattaagatgacaaaataataataataataataataataataataacaacaacgaaattgtacaagcttagccaagccacatttttatatgtggcatagatatatgtattaatatcaaataatatatgtgagattcattaaaaaaataaaaataaataaacttacaaaaatattagaatttaggttaattttt

SEQ ID NO: 310810 - DNA, 1408 bp, Cannabis indica
ttgaataaattttattttttaacaattttattatgacatcgtgagaattaagttgagctaaactaatgtttattatatatgttggatcattaagttttaaattatatactttatatatatatatattctttttaataaaattaacttaaatggtagctaaattggattggatggatccaatccaatctaataaaaaactaatcagcacatccaatggttagaactgatccaatctaatacatctattggatcagatcggatgactcaattcgattggactagattggatgacaaaattcaacattcctctcaaccacattgcactccctaggatgcctcggagtggccctagactctatttcaggctcaacatgatcaacttcttgctcttcctcttgaacgacaataggctcctttgcctggctggcctctggctgttcaacttacttaacttggcaaacccttcctcttgccatgagctcgataatgtgaggatcagtgggaggtgccttacaatacatttgcttagtcctcactaggtttggatgtttctcggagtactgggcaacagtcacaacaaccgctactataggaagatctttggacaaagaagacgcctatccaacatgaaatgtgtcaggcacaccctgacgaacaatgtaagtccaagacttgggaaggaactgtctccactcctggttcaatttccagaagaatcttctgtagatttcaccacctattcgttcataatagtggtgatgttgaacctcaggttctagagaaccactactgacttcaaagtcactcaaagagctacccaatgagctctgagaagaagaactagctgaacgatagtcttcatacgaaagactaataaatccttgtcatttcgtatgtcacctccccaatattcacgtgggttcatctgtgcagaaagacaaaaggaggtgaacaaccaaatatcataaataagaagaggataaaaacatgattttaatggccaagacttgaacgaactaactggacggtccctggatgtaaaaccacgaatcgactagcttatggttggttcaccaagaaccggctagcttacagttggttcatcaagaactggccaggatagatcaaactcgagaagaaccagattgaaatcttgtaaaggatctaagtaccgggtagggttttggataggataaagcaccaagcaaagtcctaaacagatcaaaagtcctatttttttttttttaaatttgaagttatgttcttcgtgttcttcgaaccctaagttaaaatctcaaacaaagcccaagattcaatcttttctatcaaagagtcatacattatgcattctaaagctattgaacggattataatgcataaaaactaatcctaagacatgagaatcaag

SEQ ID NO: 310811 - DNA, 1947 bp, Cannabis indica
ttaaacaacatacttgtgagtagatctaagatcctggtaaaataaattccaacaggaatatccccaaattaaaaaaaaaatttcgaccaggagactgtttctgcgattttgaaagggggtaatccgttggccagggcaataatagatgtgtttggactttggaaagtaatgatcggttcacgagtaaatcagcttatcttgcccaagctttaaatagggcgcctcactgtgaggtcgctcctttgctctgaaaaaagttgtggaatagtaaaatctcagagaggcgcaaaagattatgtggtggtgtatcttgtccaagacaatcccagttcgttctaagatctgtaaaagatttcctattgtggatgttaaatgccccctttgtgggacagaggatgaatctcttgaacatctgtttctatcctgtaatgtgacttttcacttgtggcggtcctctccttcgcctatttgtggtacgggcatccggatgtgggattgggtcaaatttatttgggaccttaaaaacaaaggcatcgatacagatgaagttttcctttatgctttgtttattgttgacaccatctggcggatctgcaatgataagatacacaataattgtccaattaatgtaattaagtgtattgacaatattcgttcttcttttgtaaatcatcatgcttctttgttcccttgcttgtctcctagtttggcagatatctggcgccctctcccttaggactggctaaagctgaattgtgatgttaaagtggggttggcagcatgtgtgctgctgttgttgaaagggatcatctcggcaaggtgatctaggttcatacttctagattagagttttgatgtgttatgtggagaagcggtggcttgctgcaatgctctggatattgcgatggatcgaggctttaagtttattatagtagagagtgattcgagggtagttattaatgctcttaatagggaggagtcacgttgggagcttgagaactatgtctcattttgtattagatcctctacttattttgttagttgtgttttctctaatattagtaaaaactgtaattttgttgcccataatatggctaagtgggcgtttacccaccaaaggtttggttgtattccgatttcttctattcttgaatatcttttttgtaacgaccgcgaggtctaactgtttttttgtctaatctatgaacgctatttaaaaaaaagctacaactttttctttatctgttttctagtgatgtaatggcattcagtcacaagaatgaaatgaacttttttatttaatgtatttagtaaggaattattttacaaatacataaaaataacaaattttttttataaaaatacggttgtatagagtattaatattttgtggtttttaagattttatttacaaaaaatatagttttctgatattttcatgttattctgatattatattcttgttattttgttattggttttttattttttgtatattatttagagtaaattacgacaaaactcctaatactttcacttcactagtaattaatccccaaaaataaaattttggtggaaaaactcccaaacacccatattctgttagcagattaccatttccatctattttttgtgttaagtgtcatgttggagtgtcaatgtagacaaaatgtacacgtgatacaattttatttgtcccgatagataattattattaaaaaggaaaaaaattaagaaataaatcataaaagaaaaattaaatcttttgtctttctctgaactttctttttctcttcgacttttttcctttttttcttattttttttcttcatcattattcttcttcaaaactatcatcaccaccaccactgttaggttataattagcctatgtttcgggtctttaaagttagcattatctcgtctattggtgtcttttggagcagtt

SEQ ID NO: 310812 - DNA, 1361 bp, Cannabis indica
aagtgacaaaagtaagtggaacaccaaactctgtgcagaattcataggctactctattcaattatgcaacttcccatcagatgaagccctagtcaagtgcatttgagacaccacataccatgtactaagagtcaacaactacacatgacgtttttctttagtgtatttccacacttcacagaaattccccaagactaaatatggctcatagcaaactttgctgaacttgcattcaattatcaatttaagaaccaaaggaacttacaggattaaattttgcagcagtaatttcttcaatgtcatcttcagctaaaattccaactttgacaagttctaagagctcttttcttgagatgttccattcctggtccctctgatcaatgattaccaaaacatcatagacatcacttacaaaacacttgactacaaataaatttttatttgccaaaagtttatacacaacaagcttcatatcttattgcattaccccttttagaacgtttttctccacaatggccactcggagacctttggaacacaatgctgtggcaatgaaaactcccaatgtccctccacaaactatcacgtcaaacttatctagagctttgttagctagctcagaattggaaaataaaccgggattcgtagaaacaactttctggggttcttgtacaactggaaaatatttataaaaaacaattagaaacacaaaactttcaaaatgccaggacccaatttcaaagaagggaaattaagcaaacaaatatgtttctgacctgtttgagcagaacaaataccagtccagagttggtccagcctttttaaggcactatacgagtaagctcctccagctccaccaacttccccaccaactgaaatactctccattattctctacaaaaacaatattgggagattcatatgttaaaccccttcataatactaactcaccagtcaccaccactaactaaaaatacaaatacaatacaataagaataataaacgaaactaaaggtggaatttgaagaaggaatgaaaaggtacctgggttctagaggcttgcattttaaagcccaagcttttgcttttggtagctctatgtcttatgccatgagcatggagcaggagatttggtcttgggtaagataataacccattaaatgattggaggtgaagtaataacatggcttctgctcaggagtttttctgctcagtcttcacctggccatagctacttaattttatggtagagaagaattgaagtttgaacattttgcgtaccacaacgggacacgttaactataactaccatacagtgaagtgtctctcggtatcaacaatcaaaagttctaatagtattt

SEQ ID NO: 310813 - DNA, 3379 bp, Cannabis indica
cccacttttagttgggaacttgacgcacagatgaaaaattaatgtgatagcttttaaattatatagggttggtcggcctaacatgacattaaaagttgacgggacattgattaccaagaattgtgctgttatagttatgcttctcggagcttgtccaattgtaagtggtcggcaaatttgtccaagtggtgcgacactctggccagcgaacccgtatacaagttgagtgtaaggaatcaaatctttaagctggagtcttatcttctcataagttgttttaaatagaatattagaggaagctccattatctaccatagtttgtgttgccatcttgtttacagtctgcacttctacgaccagagggtcgttatgtggaaagataacatggttggcatctacctcagtgaatgttattgatggttctccccacacgtagtattttaggtttcctttcttccacggccagaactgtgtcactttgttcgtgctgcaaggcacgagcatacttttctctagctttgcctgagtctccagcgaggtgtggatccccaatgattacctttaaatgtccgtccactagtggaggcattaattggttttggttattatctgcctaggcagcccgttgctcttagtcgacctcgaattatttttgtaaatgcgggttattctttctgatcaaaaattcaatctcctgcttgaagttgttacattcgtttgtatcatggttgtagtccgcatgaaagcgacaaaacttagttatatctcttttgcttatgtccttcatgggagatggtttcttgtatggcaccatagactgggtggtcgcataaattgtctctatgtcatccgttagaactgagaaatcagtaaatttagaggcattttccctaggatgttgttcagcgttgccagtgaacttgcttttctttctattatccagtctattgccgttattggacctttttttcatttgaattcgaactattgggatattgtgagttttgggcggtcataccggtcgtagtggtgtgctgttgatttttcttttgcctgacagtatgcacacgccgtactgctttctcaagcttaatgaatccatttgctcggtccagaaattcaaccatcgatctcatagttaatcttttgatgtccttccataactctctcagaggctcaatgccccctgtattgctgccaatcttccctcctcggtcagtcctttaacttttcttgcttcagtcataaacttgctaatgtaggcccttagaggttctcctggcatttgctttacttctaccaggttttctaggtgtgagggaagttgacgagaggaacaaaattgtgtgtggaattccaaggagaaagaaatccacgaattaaactttcttggagacaatttgaaataccatcactgggctgcctctgcgagtgtggccaaaatttttttgcaccgtacatcacctcttaccccttgcagattcatctgcatttcaaagtactttaagtgggataaaggatcttcttttcctatgtaaattttccatgtgggcattttgaaatttgggagtaggtcaagagcttcgatttcaggcgagaagggtgatccacgtgcctggtcgagtttgagatttatggtttttggccggtcaggccttgtaccatgtttttaagttgatcttatttgtgcttgcacaagtggatgaacttgtttagcctggtgatcgacctgtgtcacattgggatctctttgaactggatcttgggcgtgggtatctggatggacagttggtagaatgttttgtctgtccagtccccttttgcgatttaaatcgaatttaaagtcgtgcacggtgcctagccattcgaacactgaagcaccgggtggttttggcatttgacttatttggccaagggttggcctgagacctcttcacgagtatagttgtttaaatgtgtaagtcctcccaaagggcagtttggacctgtggccttggattggacagctgaccactatgagtctacgcgatatgtccagctacatacctttctgacccgctcagggggatactagattcagtttctggttgttgactaatcacttggtaggcccttatgattagcagggtggtcaccctagaacgatcatcaatggctacctgttgtgccctcataatttccatctctcggttcctccactccataaattgacgtctttgctcgttgaatgcaaggttaatggttgcttagagatcttcctgatcatgatacaaagtgttgttatggccttgcatgagcctaagtgcttctcgcagattttgaagttcagtgtaaagctggcctttgagtattattagtgaacaggacctcagtcctgggagtggtctgatcggcagccgtactggtgtttccagtctcctgtacgcctggtgtgaacccaacaagaggggaagtcactctatggcctactgtaggtggttgtgtattaacatgttcagggtttgtccctagtggtcctctcgtgtttccaggagtttacacaattagacatgtcaccattgggtcgccgtgatcagtaaggcctctccttcgagtttgtacaaccatcctgttaatctatcaacactaagataaaagcttgtgtttttgctctcaatgaaagtaccaaaatattgacctcacttctagctaatgacagtgagtcaagataaaacgatcagataaaataaataatagaaagcaaaaacagtaaagtaaaaaagaatactagattttaaagaggtttggccccataagaatggtaataacctactccccttgtatttttattgacttgagagaaagaataaagtgttcttcttctctgaagctcttacaattgatctttgagttattttttctcttagatcactattctctcttgagtgtatttctagattaattctttcgtcctcctcaatagtgagattatgccactatttataggacttaatctttaataaataaatagggaaactatattaattctaaaattacaatgtaaatagaaaactaaggtgtattgactttattctctggctaaatcccacgaatataatgattgtcttcatgtcttggaagcgatgagactgatctatagaattgccaacttatacgccttgctcggtacagatatgtctgtatcttggtcgaatgtcctcttgattaacctgttcggacatccaagtgacatatattaagattaaccgttagtgggttgctaggaatacttccctccacccaagtagcaaaaatgtgggacatgtgtcatccattcttattgctatgtcaaggtgcaaaaaataagataacaagttgctatatgaatttccgtgaaaat

SEQ ID NO: 310814 - DNA, 1089 bp, Cannabis indica
aaaaaaagaaagaaagaaacataaaaacatatttaagtgcaaattactcttccttgcatataaatcaataatagtactactttttattttgtgtatctctaattattttgtttgggcatttttcttctactaaaaataaaatattaactgtcattacctaaccacatatcattccacattctatatattgtgttttgtgagcctctcactcacatcaattgtttaactaccactcatttatttttcgaaataataatatcgtatcaagaaaaaggatatggcctccatccaccataggtgatatagagtactacttctactaaatactttgccctagtttctcaccattgtcccccactatctatccttggaagcttcaactattccattaaagagagaaaaactcattaccctccttaagtttttaagtggaaaaccaacaaatcaagttaattctaaagtcaaatcatcatcatcatcatatatattgttaggatctatctccatattactaacaaaataaatttataatagaccataagaaaaaattattttaggtccttattttttaaaaaattagtaaaaaaaatataaatttaagagggatttttttttttttttgattcctagagctggcctgtaataatatggtatgatatttctcgctttaaaacctaactccttacagatttttgtggtttttttttggtaccttcacaaaaaagagacttttacacccaacaatcctctcctcaattacacatctaaatcttattttcaactcccttagaaaattataaatcctttgatcaacgaatttatttttgggcactttcccataaagtatcaaaaaatacctcgttacaataaaaatagtgttcatccttacataattattttatttttaagctgtaagactttaattgtacaccaaatatttatatatatatatttatataatgagcattgctattaggcaccagtggtacctagcacttttgcgacatgtcgcgttgcgattggctagcgatactccctaaaaactattatattaaattatatgggacccgatacttaattgtaccaata

SEQ ID NO: 310815 - DNA, 1224 bp, Cannabis indica
caaactcatgagcaaacccatcatttttgttgttgtacttgtccgtacgagtaaaactagcctcttccttaaaccctaaacgaccagtggtcttgtcgacaaactcatcagcagtgaaactcttcttgaaacttgttgtggctttgcccttgtcactcttcacaatcgactttgttgctgagtggagctgagtcgagtccttcatgactcgccctttgttactcgaacaagaataagttgatgagacttggtttgaggactttggtgttatgttgttggattttcttggtgccattttcagcctaaaatattttagtgtgatgaaattatgtatgtaataataatggtttgacgctaattttggttatctatatatatatagccatttatattaattattattattaacgtgaaaagaacccacttctttcttgcatgcttgccacgtagtaaattactcatagaagtgtgccacgtgtccatgttttttgctccactacttctacacactaatcccactttctttttttacttttgtaattagtcaagttaaaaatatttctatttttttttttggtaattaaagaattatttttcttatcaatttgaaggtaaaaatgtaataataattaaattcactggaaaagaattattacaacacatcacacaactaactactcccactctcttttcgtttgaactagtcaaattaaagttgaattattattttttgtggtataaaatataggaaatatgaattattgtggtgtaatctccatttcaatgtgtataataattaataaataaataaacagttataaaaattaaataatagagactcgaagtctcacgagctaaagtattttttttcattaaaaaataaaggatgatagaaaaaaaaaacatcctttaaatttttctgtgaaataattagcatttaattggagttattagtaaaaatttaacattaattatcactaaggaaaaaattaatatttaattaagtatgcaaaacgatgtgaggtgtgaaatgtagtggggaggatcacatggacacgtggcgagcatgcgatgatcttacgtgtcgtgctgtagaggtgggtccgcagctgtctatatatttattaattattatttttaaccctaattaaaaatgaaaaaaaaatgtaaattatatttttacatttgtactataaattgtttttaaattaattatattaaaaa

SEQ ID NO: 310816 - DNA, 1127 bp, Cannabis indica
accagggtttaggtagtttagccgccaaaaattcaacttttgtggttaagtgttacaaaacgtaaaattcaagtggtttagccgccaatatccctaacaataaatatttaaaaacaataataataataataatatattaattattgaataataacaaaataagagatttaaaacaaaagggaatccaatttaatgagacattaattaactaaattcattaactaaaattagctcaaaattaaatacattaaaagctaaaatttggaatattataaaaagtataacctatttaagataaaataaaaatgtcagaaaatagctaatctaatttctaataatagtatgatgaaggcttgaccaaaaataaacaaaatctattaaaaataaaaaacaagtccgaaatgaaaacaaaaaactaacaatttacacttctaagcaaaaaagagaaaattactcaaaaaattcaaactaaaaaaacatgtaaactgccataaaaataatataattaaagctaatttaattaatttattagtagaaaaataaatcattttcaatttttagttattattaaatgaaaatattaaaattaattactgaaattttctcaaacagcaatcacgcgcatgaaactcggcttagtcaatcctcaaggctcaagctgtcttcgtccaactcccctgtcggccttactcaggcgacaccacccagcatattctacatatcttcaggagaaccaagctttaatagccaacaaaacttacaagagatgaataatagaagcatacaaatcataaaactaattcacaaactactctcaatcactattactatgattgacaacactaaacattacatgatgagaggatggccgagggcttacactcgagaacaaaaaccgaaaaaacaaatatacaaataatcatatgaaatccaaaagattgtaaaatatcaaatagaaaaataaatattcaacaaaagaaaaaatatattctagtatgaataacaatacatggatcgatcactatcaagtatctcaagaatcgtatgatgattatgttagacttttatttggacttacattatattttattggttttattaaaacttaggttaattgttaatttatc

SEQ ID NO: 310817 - DNA, 667 bp, Cannabis indica
agcccactacatttcagggccgaccctggcaaaacacattctaaaattataaaaacaagatcaatagcaacatcgcattctaaaatcacaccaaataaattatcatcactatactattgaataaatacctaacatatttataacttaggtaattatttgtggataaaatattaattcatgtgtttttttaggattgttaataaaagtattcattaacaaagacatgggtgaccaaataaagactttcatggctttattttttacattattattaccacctaatatcatcatcatcttatatatgtttttgttgtattcctatgtcatcactatcatcacctacttcttccaccaaatatccatttccaaataattgacctctatataataaatatatatatacacatatctttcaattctattaaaaacatatcaagaggttgaatcaataaataaatatatatatatataagaaaaatccaagtataatttagacaaaatataatatctaataaaattatctatatatatatatatatgttattatatgcatgcatctataataaaatcatatagttgagacttatttattttgttaaaaatatttgtgacatgattcatagaggttatatgggaattatataactatatatttttttttttttga

SEQ ID NO: 310818 - DNA, 1410 bp, Cannabis indica
ctcttgtgtcaagttatttatttttctacaaatattttatattctgcctgttctgttttgctgtagcagaattactttatgcttctgcagacgcatactattttatattttcttatatataattgacatttgcaaaaatacggtttttcaattgtagtgttggtatttattatggcttattggttttatgatgtacaaacacaaaatggaagattgtgggttggaatactccgatgaggagcttgaagaacaagaagtttgatatggagaactaatattgttaaatattattatatgaaaataaaacatatacactcaatttgcaaagtagaataataaaagacatatcgagcgtatatgtgaacgacaaaagagacgtaatacctccaggtattgatatttgagattcaattccaatgttgcttcaaattggataatcgggcttccaagctctctctactctcttagatagaattttacaattttgcacaaaatgagtgagaagtttggagaccaagaccttacatttatatttaatacacgatccttgtattacgaccaacttcaagaaccttgtattacaaccaactacaagatccttgagatgttgaatgtttattgaaataacatcccgacaatgttgaaatatctcagttcataaatcttgttattcttatttatattaggttgcctcataggttgagtcctgagtttattctacctatcgcacaatgtatttgttgggagaattattatatatgtcacgtgacatataattcgtcttaattattaaatagtccaaaaaaaaaaaataagtataacattatatatgaattaaaatttaccttaataaatgttatacccatatttcaagcaattaatatggtaatgacacatattaaaaagctagaaaatgaaccaactcgtgttataaaataataaatgtgttcaataaactcgtttcgaaaaatacaattggtaaaaatatttaaactcaccttttcaaagataaggcgagatgtgaataataactaccactttatgagaccaacaagatgaacaaccaacgtgaaaggtccatctcgggatacacaaaatacatagtagaacgacaatgcgaaagggtagataatgaattcattaaagagcttgcagctcattgacccacatactcataagtatgttgaaagactaagggaagcagtcccagtacaattcatatcgggattgtcgcactataatagtatctcacgtttgtttctctcattatttatagaaggacacgagaggtactacccagaatgtactttggcgcagagagtcgccttcagaataaaacaactcaagaagattatttgcattgcaagatgaataagcatagtcaacataactatttatagataaagacaa

SEQ ID NO: 310819 - DNA, 794 bp, Cannabis indica
tatttaattacaggaacttttcctaattcttaaaaatagatgtattggtgtatttctttccattttaattctgagacattatataaatttatttgttttatctataggtcacaatgttcatactaattatttaggagatccttcaaatttttacaaaaaaaaaaaaaaagttaaggaaccatttaggtacctaaattatagttgaatatatttcgttacatatattttgtaagttttttttttttatttattatttttacatttaaaagtaatttttttattatttatttttcttacgtttctgcaacaggttgtataaactctaattttgacaccttaaataattttaaatattttaaaatttgcatgatgtcgtaatcatactataaggaactctgttgtaaaaaataattagaggatttgtatgagagaattcgcaattatatgtacatttgttttggtaattattaatgatgaaaactcctaaaccaagtggtcggtcgaaaaataaaaatttacagagaaatgttaaaaggtaccagtggtgcctagtatctttttatgtgtcagtatcgttattgatccaactaagtatcgaatcccacataatttaatataatagtttttaggaagtatcgctagccaatcgcaacgtgacatgtcgagaaggtactaggcactactagtgcttaatagcaatgctcagatttataatgatatatcaagaaaggtgatataaatgatgaaacgtaaaacaaaatattgtcaaatattaatactgttgggttttatgc

SEQ ID NO: 310820 - DNA, 1480 bp, Cannabis indica
tagacgagaaaatgcttacttcttagacccaaaacataggctaaatataacctaacaatatcttctcggggtctgatcctggtcaggctatggactgctgacacctctttcaggacagaatttcccacgaagatcaagatggatccaccctttgtccttctcgagaggaaatcagaagaacgttatttgctatgaataaccataaggctcctgggccggatggaatgtcggttctcttttacaaacactactgggagtctgtgggtgattccttctgtgatgcggttgctgacttctttgaatctagcaagatggaccgaggtataaactcaactaatgtggttctcatccctatagttcagaatccaaaaagacctaatcatttcaggcatatatctttgtgtaatgtgctgtacaaggttatgtccaagatagttgcaaacagattgaagcctttccttccttctctaatttgccctacccaagcggcttttgtcgcaggtaggaatatccaggacaacaacgtgatcgtgcaggagatcatccactcttttaacaggaaaaaaggaaaggagggatattttgctataaagattgatcttgttaaagcttatgatagattaaactgggaatccattgatcaggctcttgattggtttggcttcccccagaagttttagaattgggtcacccaatgcatctccaccacctctctcaatgtgtgccttaatggaggaatggtgggcaagattatgccctcatatggtctttgccaaggggaccctctttctccctacctctttatctgtgttgctgaagtcttgtctagactcttggaagatggtcttgcgaagggtatctacaagggcattaagttaagtaggggaggtccggtcctaacacacttattctttgctgatgacttaattctggtaggacgggccaatgtgaatgaagctagaggttattggaattgcctagagacgttttgctcctggtctggtcaaaaagtaaataagctcaaaacatcaatattctttagcaagaatacaaccaatgggatgagaagaggaattaaggaggcattgggtattggctcttcggagggtgtcaccaagtatttgggtctgcctctcttcaaatcaaaacaaaaggatgcagatttcaatttcatccttgatgggcttactgtaaaattgcagggttggaaagcgaatacgctatccaaagtagggtgtgccactctaatcaaatctgttggtcttttgcttcctctttatgccatgcaaaccaccaaattttctgatcgtatggttaaaaggatagatggtcttgtcagggatttttggtgggattttgagaaaggaaatcatggcctgcatctaagagcttgggataaactttttcttcctaagtcctcaggaggtcttggttttcggaaaacgaaagaaatgaacctggccttcttggccaaatgggg

SEQ ID NO: 310821 - DNA, 1063 bp, Cannabis indica
ttgttatatttctagctcccagagagtaaagacgtgctttatgctcctctctgggaggctcactccgtgaggtgcacttctctttccatttatgacttaagccaatttttgtgagtgaggtgctcttgaaatctacgtgtcacacgcagtcgctgccacgtatttaaggaaaaatctgaggcaacaacactgaacttcaaaatctgcagaatgcactcagtcttatgcaagaccataacaaaatcttgcaccatgatcaggaagacctccgagcagctattaaccttgcctttgacgagcaaagacgccaattcatagaatggagggatcgggagatggaagttatgagagcttagcaagtagccattgatgacctttctaggcaagctgttgtgctaatcaaaagagcctaccaagttaccaattagcaactagcaactgaatttactatccccctgagcgggttaggagggtatgtagctgatcatactgcacagacttgtaagggtcagctgtccaatccaaggccaaaagtccaaactgtgggctaaacggtagacgaccagatcttaccaaagcaccccttgggaggtactcattccaacaactatactcatacagaagtatcacgctaacctcttggccaagtaggtcaaacaccaagaccgcctgacgcctcggtgttcgattggttaggcactgtacatgatctcaaaaatgacctaaatcgcagaaggggactggacgggcaaaatattccaccagtcgtccacccaaataattaagcccaagatccaatttaaagagatctcaacgtgacataggtcaatgagtaggctggccaagttcatccacttgtgcaagcacaaatagattaacttaagaacatggtataaggcctgaccagcccaaaactcataaatctcaaacttgaccgggcacgtggatcacccttttcacctgaaattgatggtcttgacctacccccaaagttcaaaatgccagtatggaaaatgtatacaggaaaagaagatcctttatcccatttgaagtactttgaaat

SEQ ID NO: 310822 - DNA, 2441 bp, Cannabis indica
acataaataacactcttgagatcaaacctaaccatgtcaagattaagatcttttgatttaagatcaaccagtgatattgactttctaatacaacagtaagattataatatatttaccaagatcaatatcgatcccagtcccatgtatactccatacatccgatactagcatactttgccaatgttcttgaagaacataacacttatttaaggtgtaagtaagctttatcgctgactatcgcataagtgtaaatccaggacactaatgaatcatgggacattatctttggaagcatgtattcaaaattaccttccactgtgttgacattactataattgtaaataactatatgttctggacttaccagaaattgtatacattaaaccataaacatgaaaactacatgtaaacataaatgacttctaatcttctattgataaaaaattagattatattgaaatagattttatataaaggataaaatcccatcatgtttgacacatggcaagaaagatgacatctcagagttgagtagtattgagtcatagcaggttgacttgggagaggttcctagccatgcgcccaagttaacttagggaactcagcaatggtaatttagacttcaataacttgaatctaactcactatctttaagtattctataccatgaatacatggagtaacctggtctaagccccaataactgaaaatacatgaactcgtaacctggaagccaacatggacacctaaggtttcacccgacgaccaagttaacattctcaactaggattttagtttctaagaccgtcttagcacaaaatagtcaaaaattgcattagaacatcaactagacgtaccactgacatatttgaggtatcagaattaggcaccttccaagtgtccaatcgaagatttgacttttgaatcatattcatctttatcagtaaatggggaaataggtccttccagaggaaaaaacaataatttttgggcataaataatagcgcccagtgcccagattgacacttgggactggccatgtgccaggttgacattttgtcaattgggccatttaaggtggagttttttaggaataattttgcaaattttctccatctttagaaaatattaagattcaaatatttttggggaccaaatggaattttcaaagggccaaaagagagacccagcgctcaggttgacatattgccaacctctgttgtttccgatccagttcaacaaaaagtatttcaggcattttttgtcatcagaaatattgaagattcaagtaaacttggggagaaaactacaatcccgagccccaagaaataaggcccaacgcccaggtagagctagcgctgggtcaagcacccaagttgataatcaacatggaacgctaccttcaattgctcaaatatcaaacttgatgcgaccattaaatctggaatggtcaaaacagggtgggagatctcgtccttaagtctaaaatccttggaagtataaaacaaaatctcaggagctcgatttaaagggctcagcacccaggtttacaaaaggcctagtgcgttaggttctacttattcaaatttgattttgttgcaaccgtccatctatttcttcacaattacactgatctatgaagtcggagaaattaaattcacaacttttcatttcttatttccagcacacccaaaactgaagagtttcgagtttgtaatttctggaaaataacaacatctctgagaaccagtgaccaactttgccaaaacctataaatggagtaggtggtgtcaaaatattacttggacatcttaaaggataccccttggacgtttctacacttaccagcgtacacgttgacattagatgtcaatctaggcgctcggatgtcaacctgggcgttaggacctgaactgcattatgtaaaatagccataactcactcaattttaatcatattaacgcgattaaacttgtttctgaagctatttaaatgatctatcaagtcatgtgtcacattctagtcgtaattctaaagctattgtcatcaaaattcacccctaagagagttataaaaataagctccgggtaacttgcagcgggattcgccaagcaccaaaaattggccatcaccaccagaagctaatttttaccattatatcatcatcaatggtggaaaataacttattttatttttctactatttttgtaggcctccttaacatatataaggagaactcactttgctcattttttatattttgaaaactccccacaaggtcagagtttctctctctaaatttttaatacttagtctattgttataattaccatctcgtgataaataaaaacttaaactagacgcagccccattactatcccgatataggggtgaactactataaattttgtgtatctctataaattatttacttaaactta

SEQ ID NO: 310823 - DNA, 923 bp, Cannabis indica
gagagagaaagagaaagagagtgtagtgagaaaaggttgattttaggtttttctaacattaaccttaattaaaatccttatttaatttgactaattcaataaaatcagaacctaatgctcatatatgacaaagaaaaccttggcaaaaagacctttttgccccttttaaattaatttaaaggttaataactcccaagggtaatttggtcattttcaaactccaaaaattttctgatacttccaatacctaacaatgatatcccactacaaaaaacattttaaaccatataaaacgtgactctctaatggctcaacgtaacgttccgctgataccgagcttaaaatacagaaaataagaaattcacatatataacataaatagcataatctgaaactatataaatctccacaaatacataaatcatgattagtaacttaatttcataattaaaccctaattattaaataattcatcatattaaaattacgcagtcttggtgaagtaatacgggaggaagaattcaagaccaaattatatgatcaaacttgatctaaggaaggcttatgaaactttagagtgagatttttttttggaagaaatgcttgcagccttgaacttttcgaacaaatttattcaagtcgtcatggtttgtgtccgtaccccccagtttagtatcatgattaatggagcaattcacaagttctttgaagcaaagcgagggctccatcaaggatatccaatgtctcccttattgtttgttcttggtatggaatacttattaggaattctttccagagtgggtctcatggcagatttcaagtatcatgataggtgctctgaactaaaattgaatcacctctgctttgtggacgatgtacttttgttttctcatggtgacttcaagtccatctacttcatgtta

SEQ ID NO: 310824 - DNA, 1300 bp, Cannabis indica
aaataccacaaactccttattaaacagctaaatattaaggcttataagatttttaagcaggacgtgaacatcagccttattatatataatatattttttatttttattttgtttttatatatatttttagttatataattaattttttattttatttaataaacaatattatttttattaatataatattaatttaagtactatttatatataaaatttattattaattataattttaattgttccgtaatatttttaattttatattacttttcattaatttttttaaaaattattaatcatacattttttattattttttcaataagtaatagtaccatggaaagattttttttttgtaagtacaatcatacatttatagaaaaatatattttagatatatgtaatctttattaaaaatatttgaaaaaataaacagcttattatatagttacatttaatataacatacctgaatttcgtccgagttgttggtctggacagcaacttcccaaacgggttgacccgagaggaggctgccatattcttccggtgtatccattttgtcagtggtagtactagtttttccgcccaggtagcggagcgccaccaccttagaattaaaccttacgcatttgaggacgtcaaagtgccgggcgtaggagttgaggtaatccaagacctctaggtgggaaggaaagctatactcctttttcactgcagcaggccatgggaaatccgagaactcgtagtcttggtaagtcgattggaggttagtggagctgtagcagcaatggctccacacccctccaatcgtatcagtcccttcaaatacaatgggatcatggtgtctcagctgtttggctgcagcaataccactaactccagctccaattatcccaattttggtaaaaataggagaagtaggagccatttttggagaatttatttagtaatgacgtctgggttggaattggggtgggattttgttgtgagagcattgtgatatatataggagttgcatgagagttttgggtacgtgaaataaactttcatatgtttgtgaaagtattggaataatcaataatgtataagagaaatatgctaggttggtgcatttgaacataaaaattattagttaattacaaattattagtcaattacgaattattacgttctatacctgtcaaaaaaataatacttataatattattataattgatcaaattaattaaaatgtatattatatttattaaaaaaaaaaaatagcaatttcgtaaggcatgttgtcatttcgacat

SEQ ID NO: 310825 - DNA, 1115 bp, Cannabis indica
ctcttattaaaaaaatatataaaaaaatatcaaaatttaaaatttgatatacttttataacttaattagaaactaaacaagatacaaccgcacgcgaattgcggtttgttttctagttttaaaataaatgaaatttatttttcattagattattttaaaattaatttaaaaacctacacttagtttaatgaaataaattctgtaattttgtacttttttgcatttaattttgcacatgtactttactttaaaaaatttcaaattgttcattggaaacatttcttgggtgtccatatatcttgaactctctttcctggaaggaggaattgcttgaagaatattgcatgtccagtttagttttcacctttattctttggagagaatccactatttggattctagtacatttctaaccccccttccttgaaggaggaactgcttgaagtttgttacatgtctaacttgtttctcacaaaaggcacaaataatatgctttcaacatgatccttcaaatgaggacattgtttgaaatactattgcagtcaccttggtttgttgaccacacagacaagtttccttcaaggagtgagaaaaaagaagcacgtctaggagccctctgtattcctagcagctctcttatcacaaatttagcaaaagcctgtctaatgttgagctagctttgctactttgatcgaggaaggatgatcaaagtgctagcacaaacttaagcctcatctccttgaaaggaactttgctaggatgttgttgcatgcttggccccctactgtaacaccctaactagactaggtgtgttaagtgatttttaaacgtacagtacagatcgttgctaatcaacgacgtttataaaaatcgtgattaattaaaatttttgcttttaattaaacttatacaatatttcatacaaaatacattgggatcccatttacaaaatactttataaaaagtatactgtctattacaaaatacttgtcgcccagcgactaactacaaaagcgttgttgtcccgaggattgtacgctccaggcctaactgccctgacatgtacaatcttcatcggctcgtcctcacggttcttcagctttagccttgccctt

SEQ ID NO: 310826 - DNA, 1045 bp, Cannabis indica
aggttcaatataaattcataattcgtgtgctatttatgttatatgtgaaatttcaagtttttcatattttatcctggtattagtggaacgcaacgtttggctgatagagtcactttttcttatggtttagtattttagaaatagcgaggcaatttagatagacattaagaatgtcaggaatttagttgttttagatttgaccaaaatgctcttaggtggcatgattactttttgactaagcaagggagaaattgtcttttgccttatgttggcttttgtccattagtggattattattgagttggtgatctgatttaattaggaattatattagataaaaattaagtttactatcaattagtcaaaattagaaaaagattacacacactctctgtccaacaccttctctctatcttgacctctcaagaaactcagaagaaaactagggttttcatcttaatttctgggtgttctagctggatttggtaggatctttaagaaccaactcaaggtaagcaagatctctccctctttcttttgtatttttatggttttaagcttaagtatccatgcgattttgaggttagaatctatagggttaaaattatgttgactgtatttttagaggttgttttggaagttctttaagctaatttggactttatttgatgctagtgattgtgtttggacaaagtttgagcttaagagctcaaactttgctctttcatggtgaagtttatttcagtggtttaaggttgtttttattgcttgatttaagttcattatggtattttaggtactctggaaggtttggtacgaattggggttgatttgaggtgtgtgtgaaatttttagtagttcctaaactaaacctgttggccggttcagttttgcactgtggaaccagttgaccagttcccttggcagcacacttagaaaccaattttacggctgggattcggtttaccagttggggcagtttagggtaccctaaatttttatgtttttaatatatttagggtattattatgttatccatcgatag

SEQ ID NO: 310827 - DNA, 3669 bp, Cannabis indica
ggtcggtttacagattttatattttttttaaattgggcgggttgcacttaaattttagcaacccgaactttagattgggttagaaaatatataggataaaccgcccaaaccgaccgatgtacaaccctagttcatatgtaacactaggggaagcagaccaagcctttttcctagcagattttctttgaggaggtttttctgggactttgaaagtggtaccaacagtaggagcttcaatggattcattctcaagaatcaactgcgtttggttatacaaaatattttaaatcaagggaagaaaaataagattaaggctaagtttcttacccttttaaagagagacaattcactcccaaatgacatcaaccaaattaattatttttgcactaaaagaaattttatataaaaagacaacaagttcatttgaaacttttaccggatttgagaaatgaaataagttggatagggaaaatctcataagagcagcatggtgataagaaaaatcagtcaaattccgtgttggtaaagatgtgtttgggcaaaagaacgacttaattttgattcgaaacactgacatcaaggatgtcttcaaaatgatgatcataagagcccagacattagaaatttggtgcaagtataatatccaactcttaattaacttaataattttgtttggagtttgattttaatttatctatttttatcagctacatgtaggcttgactatttaacactaacatattggatgcaaaatatgcatttctaaattctcgtggcattgccacctaggcagggcatcacagtatctgttgcaatacactatttgagtgtatgaacgcgttcaatccagagaaatttcttattactcctatcatacaaagtagatttattattttttaaaaaattttaactctatatatagaataatattttataagcaatcttacatgtttcacatatgttctagtcttcattggatggttgtacttatccaaccttcttagaatataaggtgaagtgtacacgtgtcttggttagttagaagtcgttatttctgttggagttagttagttctcttaacttcctaaccgttttgtcctctgtttgttttactcagtttgttactgagcttgagtctgtatatatatatatcagttctgttgtaatcaatcaattcaattcaatacaatttctctttcttcatcttctgattactaaaatggtatcagagccactcgactgagtgtgctcttcgactcttccgcttgttgttcgatcttcgaccatggccagaggaggtggaactcagacccgtagtaccaccaacaatggtgattcgaatcgattctctgttcttgatcagaatactcgcagttcagctgatgatcctcgcagcccgtatttcttaaatcatggtgacaatccctctgttaatcttgttcccaaggttcttactggagcagaaaattacagttcctggcgtcgatcgatggtggtggctttgcttgccaggaacaagatgaaattcatcaatggaaaactccctgcaccagatgaagaagatgaagattatgaggcctggacaagatgtaacagcatggttatttcatggatcttacattcggtttccaactcgattgcagaaagcataatgtacatggatgatgcgtcttacatatggtctgaactacaggaaaggtttcaacaaagaaatgccccaagaatttatgaggtaaaaagatcattgcagctgttagctcaaggttccaatgatgttacctcctactacacccgtctcaagagtctttgggaacttttgcaagaatacagaccacaaccattgtgttcgtgtggcgctatgaaaactattcaggcttaccaggatgaagacaaggttcttgagtttctcattggtctaaatgagtcctattccagtaccagatctcagatccttttccaagatcctcttcccaatgtaaacaaggcttttgcctctgtcatccaagaagaaaggcaaagaggtatcactaatcatcaacctgaaattccaaaatctaatgaaaatactggacagtttgcaggaaatacacaaggaaaccgaggtggaaataaccagacgaatggaaaacccacttgttctcactgtggtcttgttggacatactgctgcaaaatgctataggttgcatggatatcctccttggcatcgtttacatggtaaagtgcctaaagatctccctaataagccaagcaatcaacaaaaccagcagcgtgatcgatcctctcagcaacaagatcgatccactgctagtttttctgggcatattgacagtcaagaaggagccacaggtgaacatgatttttcctctcaatgccaaaagctcattgccatgttgactcagaaagtgcaggaaaacagcactctaaaccagactccagatcagcccattgtctcaaatgtctctggtaatgacttttgtgtccctaaatctacttggataatagatacaggggccactcatcatgtatgctgtgatcctaacctgtttcatagtgtggaaaacaatgttaaaatcaataatgttgggttgcccgatggtagatacattgctgtttcttttgttggaactgtgcatattgctaatattgtgcttaaaaatgttctttgtgttcctaaatttcattgcaacttgctctctgttacctctctttccaacacatctaactattctttcctttttctccctaataaatgtgtgattcaggatatttccaagagtcaagtgattgggatgggtgagcgtgttggacaactctacctcctaagacacaatgattctcctactgccttagccacttttcctactgctttgtccattaccaattcaaaaattagtagtgatactatatggcattatagactcggccatgcctcttgtgtaaagaatctttctttgaataaagagctgaattttcattactctagttgtcctgatttccattgtgctatttgtcattttgccaaacaaaagaagttaccttttgtatctaatcataatattgccaagaaatgttttgatttaattcatatagacatttggggtccctatcatgtctctactattgaagggtttagatattttatcactatagttgatgattgctctaggtatacatgggtgcatctcattaagaataaatctgatgcacaacatgttataccagcctttattaaacttgtcaacacccaatatagtgctaaaatcaaagggataagatctgataatgccaaagaacttcagttccctgaactattcagttctcttggtattattcatcaccagaaattctaaattctaaaacccccaactacaatcatcttagagcctttgggtgtttagcctatgcctcaactttaggtgctgccagaactaagtttgctccccgagccattgcttgtgttttcttaggttatcccatgggaatgaaagcctataagttgttggatttaaacacaaatagagttttctgctctagagatgtaatttttcatgagcaaatctttccttttgtgactgcaggaaccatgtcccatgaatcccttgatttctttcctagttctgctactaccaccaacaattctcacctgtcacaaccatctatacaacct

SEQ ID NO: 310828 - DNA, 518 bp, Cannabis indica
gagaatcccctcaagtttgatccggacagattcttgaatgacagtaaatgggacttcagtggaagtgactttaattacatcccatttgggtctggtagaaggatatgtgcagggatagccatggctgagaggacggtggtgtattctctagctactcttttgcattcttttaactgggaattgcctcgtggagagaaaatggatcttgaagagaagtttgggattgtgttgaagaagaagatacctctagttgccattcctactccaagattttcggacccatcactatatgagtagataactacttgaatgagtgttgtatatgtgaaaggcttatgtttatttggctatgcaatgtaaaaccgtaagatttgggatgttcatccaatccaactcatattattttactcacagtgcatttgatcagagcggattttatattttggatctaattcaatctaaaaaaatacaaattgaatcgattatttttggttagttactttttaatatgaaattat

SEQ ID NO: 310829 - DNA, 1079 bp, Cannabis indica
ctgaaaattgaaaggagtgagtgaatgtcgttgtgttcgtagactaagtatctaaaaattagtataaccaaaataataaaaactaacaaataaacaaacaatagatatgatatggttgcttaagaagattatatacgtttgtttgtgatgatttgcacaaaacatggataggatcacatgcatgcaaatacttttattattattattttaaaggttaattagaatctttattcctcgaactttaacatgtaacaaattatgtcctctgaacttttaaagtcgttaaaaatctatcgaactattgaaattgttgtatttaaagacttttgtccaatcttagtaagaaaattctaacatggatgaaagttcaggacatgattttgcatatgtcaaagtttgaagggtatgatttggtagatatcaaaatttaggaagcatgatttagtacataaacaatcaccgaactagtaaaattgaataaaattggacaaaagcgcttaaatccaacaatctaaatagttcagggaaatttttaacggctaaaaaattcaaagaacatgatttgatacatgtcaaaatttagaggtaaaaatcctagttaacctattttaaattcatttctatacaataaacatattatctccataaaaaataaaaaataaaatacttaaattaaaatatatatatataaatcttctaactatatttaattatttataaatttctataacgagcagttaaggaaactatcttctttcccaacttagctgttgactcatttgatgagcagtgaactataatttttaggctaatttaaatttttacttttcgaattttgacatgtacgaaattatgtcccttgaattttgaagagcgttaaaagttcttcttgaactattgcgattgttcgatttaaggacttttgtctaattttaataagaaagctctaataaatttttaacggtcaaaaaagttcaaagatataatttgatataagtcaaagttcaaagaaaaaagatcctaattaattagtttaatttttatcaaaagaaaagactgtaatattttttttttttttt

SEQ ID NO: 310830 - DNA, 995 bp, Cannabis indica
aaaaccggtaaaaaaaaaaaaaaaaaaaaactaagaatcatattattttatttacttaactaaaaaaggtaatcaaaatattttaatttgacaaaattgtcattagaatatgtaattattattttttttactaaattttaaagggtatatttgtttttttttctcatttttaattaataaaattaaaattaaaataaaataagttaggaaatagaaaggcattccttataaaaatagggagagaatttttttctttattttttccgtaatttgtataagctccactactttctccatttctaaaatttagtaaataattgtatacaattgattcttatttcctttaagtaaacatgcccttaaaagatcataacaattgtgaacaaacatccacttagtcatattatggaccataaaattatatgtccttacactactagaaaataaacaactaacaagagatgaagttctttgacaatgactagaataattcttcaatctcgcatttacagtccactccattgataactaccctaaaattgctctccataattacaaacttgcaactcttttccactgtcgcatccaaagtcaaacaacaagtcgcaacctcgctacaaaaagcgtcagaaaaacccaatcatacagtagtcacccgattaaccacaccatgatggtctagtgacaaccaaccataatacacttgttttccatcctctcttttacatcatagtttaatttaagttgttgaccgaggttttcggcaaccaataaaatattataagattatagagctgtaagaaaattagagaaggatttttacgtggttggggcgttaatgagccttagtccacgagtctatcgtatttatggatgtatttaatacagagaatgtatttggtgaatgtttcacccttataaatacagagaatgttcttggtgagtatttactcttcttgctcttatgcagcccaagattctcgatcccatttaat

SEQ ID NO: 310831 - DNA, 1155 bp, Cannabis indica
ttacaaataaatttttaaaaaaattattgtgactaaaaaattataactaaaaatagttatttttgtagtgactactgaaaagtgtagattcacgtacttgttatacttttgaatcaacatgcattaggtctctcgtagattaatgtatgaaagcatcaacaatattggtagcacaaaaaaaagagacaaaaacaaaatagtcccactaaaataattaaggattaaaaatacatgaaagttttaattttttttcttttttacgatagggtagaatttttttaaaaaaatactgtgtaagttttatactatatattatggtaaattttcacggttgttcttacttgttttactgttatttttaattgttctgttatgttattttacggttgttttataaaaaatagtgtgtaacggtaaaattataaacttttactcaaaaattaatatttttgtaaaaacttcttaaaatataataataaaatagtaggttggcattggtgccaacttttgacactcttatcattcataaagataaaatgttgataccacatcagccaaaatggacccaaacgacaaacatgtaatttgatattcgatattttttaaacattaagatgctttggtactaattcctacctagcattgatcaagattagttttaccattattgtttacattactcatgataaatatatgaattgatttaactagtgtgtaagaggtaaagtgattacaatttttacttactattattagaaaagtaaaagaatatttatttaattgaaaaaataatgcctaaaaatcaccaacaatcaagtgtccaagatatttatatgtagaccaaataaaagtataatctggaattagttaattagctaggattaactaagcctaatacagaaagaaaataatcttaattaatactacaacaaatataagaattagaggcggaagggtccgccggtaataattaaaaaatccgccagtaaagatctttagaggcgggtttcgccggtaataatccgccggtaataaaaggtcgctattaacaataattagcggcggaccactccgcctctaatacttttaaatttattttttaatataaattaatattaaataaatttaaaataaaaaaacattaaataataaaaa

SEQ ID NO: 310832 - DNA, 877 bp, Cannabis indica
tttagggaataaaacccaacactctctgcattcttggcgttaaccatggtctccaacccaaatccattcactacctctctgtcaaaaggacctccagctcaaaattggctttgtcattcgctacatgggaagcctccaaggtcttcacatcctcctgaaaagcctctaaagatcccttagagccatcacgagttgagctgagttgaatcaggccctaaaaacaaagtaaaacaacattagtgtcaaagaccacaacacttgtcggctagtccccccttgagactactatggccggccagccccccacataggcttccaaggctggccagccaaacgcaagaagccacaagggcggcaagcctatatagtgtcaaaatgatgaatagagctaaagtataacttaccagagaaagatcatgaagccgggcagagtaaggcctgtcacgtccactgtcacccagatcttttagatcctcatccaagtaaggaatagccctctatatgcacctatttgccgccttagcagccttctatcgaacaaatgaccctgctcctcttctggacctttgagaaccttggtcggcaggccgtatcacaggctatccgactagtgcaggccctggtggagggggaggcagtgatggtccggcaacttcatcaccacgggaagtcatggccaccttagccctcacccgtccggtaggctcatctgaatgtcctcttgtaagacctctcaacctagatgacattgttgggttttgtgccctaaataaaactcatttcatataacagatttacttattaataaagataagaaataacattttatgttgcatggttcacatgatttatttcatgattatatgtatataatgta

SEQ ID NO: 310833 - DNA, 1924 bp, Cannabis indica
gcctcaggtcaagtcctcaaccctgaaaagtcggttctctccttctcaccaaatacaactttggctgctcaggttcaatttcaccgagtcttatctatgcccatacgtgattgtcacgagaaatatcttggactcccggcatacactgatcgggataaacaacaactattcagtgaagttaaagaaaagatatggaggttaatgcgaacttggaatgataagcttttctctatcggtggcaaggaaattttgcttaaagctgtggtgcaatcgatccctacatatattatgagttgttttaagcttccaactaccatttgcaatcaaattgaatcgatgatgtctaacttttggtggggttcaaatgagaatggcaataaaattcattggcgtagctggaaacttttatgcaaaaacaagtctgaagggggtatgggttttcgatcctttgtacattataatcaggcattacttgctaagcaatcatggcgacttcttgataatccaagctcactcttatgccgactactgaagagtcgatacttcccacataacagcttccttgaagctccccacggccattcaccatcacttacctggcaagggattctacatggtcgagatcttttaaaagttgggctacggtggaaaataggtgaaggaaggaacatccgatgtgcgactgatccgtggataccaaaccatcataatttcttgccaacttattaccatggaccggctgaagctgttgtttcgagtttgatcactgaggatcgacaatgggactgcaatttgttgcagcagtggttttcaagtgttgatatggaccgaattttcacaatcccacttagttttttctccacagatgacaaactcatatggcatcctcatatttcaggtatctacaatgtacattctggatatcattttgctgcctcacttgaagaaacaaacctctgctccccatcaacttcacccacggcctggtggaagtatttttgggatttgcagctgccacaaaaaatcaaaatctttgtttggagagtcttgcatgaagcgctgcctgttgctacttctttggtgcgcaggaaaatcattacggactccacttgttctttatgtcgtcttgcgtgggagtctattggtcacgcactttttggatgcaaatacgctaaagcagtatggcgtgcttcgaacttccattttgactggaataaggctacacagatgcacaagggtgattttttaattcaccttaccacacttcattcagtcaccgaaatggaatcaattttctgtatcctttggtgtatttggtcagagaggaaccgggtagttcatggacaacaagccaaaccagcaactcatttagcttcttttgctatcaattacatgtccaattacagatctgcccagttaaagtatcggcctcaactccatcatgttcctccttcatctgtcccaactcaacttgttcacattccttggcagcccccacctattggggaactaaaaatgaatgttgacgcagctgtggattcatctaaaaaccgaataggacttggtgctgttatacgtaatagcacaggtcaggtgatagctgccctctcgatgcctattattggtaactttgcttctcacgaaatggaggcaaaggctatctttcacagtttggtttgggcctcacaatgggagctacaaataggtcatgtggaaacagatgctttaatagtgactaatgcattatatggccgaacaaatagcattgcagcttttaatgatctaattatagatatttcttgtcttctttcttttctcccgggtgtatcaatatcacatgtcaaacgtacggctaatatggccgctcacactttggctagatatgctttaggggtggatgagacttgctattggatggaatctt

SEQ ID NO: 310834 - DNA, 972 bp, Cannabis indica
ttacatttttttagaaattcatattaggatgttaaataacatacatagtagtaaatctagatccttgtaaaataattccaacaaaaaccacaacactagtcggccagtcccctcttgggactactatggctagctagcccctcatagtagcatccaaggccagccagacacatgcaacatacctcttggccagccggcctatgcagtgccaaaaaagatcaatagagctaaaagtacaacttaccagagaaagatcctgaacaacagtagagtaaagcctatttgactcactgttgcaagctgctttagatcctcatccataaaggggatagctcgctcaatgtgcctgttgactgccttagtagccccctacccagcaactgaccccgctcctctactaggcctctgagtattcaggcctacaggctgaatcacaagctgcctagttgatgcaggcctagcagaaagggaggcaatgaacacctgacaagatctccaccactaaaagtcttggccaccttggccctcactcgccatatgggctcatctgaatgtcccccagtaagaccccctcaacctagaagacataactacaaaaagaaagagcaaagtcagattgcaatcataaacattcaatacaagaaaaaagcatggtgttatcagctattaaataccatcttcatcaaaagaggaactatcagagtcctcaacgatagccttgcccttgctccttgatgtgagcacggggtgggtacggtctctcaaaaagcctagcctctaggcctaatacggagagaagcatcacatactggaccccctctgtccaaaacattggcagagagccctttctttcttctctagattttctgtcaatataggataaaggtacgttatcatcatccaagttaggagcttgcccatctccagggcagaccccatctgcagctagcgctcctacaacttttggagtag

SEQ ID NO: 310835 - DNA, 1768 bp, Cannabis indica
acgaatggttttctaataactgtgaggaggaggtatgttacttcttttcccccttcttttctttttttttttttttttattaatataaggttgtaattaacacttctaggaaaatttaacatttaatgttaaaatattacacatagttttaaaatattttccctcactacatatttctaaggtttttttaaatatatacataattttgaaattatttataaaaataacaaggctaatttaaaccatcacaatagcgtggtcttccgtgtacttttttacctacaccaaatttggtatttagactttttatttttcttcttatcacttgtgagcgcttggctttctctcttattattcttttcttactttgttttgtttatttttaatatctatccttacacaattgggattcctaattattttagtttgaaagcatttccatgtgtttgattagattgcctcaagtgagtttatgtatgtaattggtgtatatcaccattagtattctttgtgtacttgatctaattgtttgtaagttgtaattcttgccattcattaatcagatcatcacagccaatagagttgcttctacccggggattaggtccaagttttatccaaaacttgtgactaaacctcgtaagacttgctgtccaatttttatttctggtttcactggttcatgtttcaggccaattgttctttttgcaattgtgttcttgtctgtgcttgagtgcacaacaaatggtattagagcagtagggagatcggggattagttcaagaatcaagtgcaagaaatcaagattgttacaagatggcaacaactagatttaaggtggaaaaattcacttgcactaatgactttagttgtggagaattaaaatgaaagcttttcttgttcatcagggaattttagagcccttgaatgaagaagctatgaaggagatcgatgacaagaagaagaaagttgagattgaaactaaggcacacagtgccatccttcttagtcttggagatgaagttttaagggaagtttcaagtgaagaaaaggcgcttggattatggaacaaattggttgcaatttacatgaaaagatcattggctaataaactgtacctcaagaagaagctatacactctttgaatggatgaatctaaggagcttcgaagacatcttgatgattacaacaagattattcttaatctgaataatcttggagtaaaaattgaagaggaggatcaagccatcattcttctaagttcattgccaaaaatgtatgaatattttgtagacaccatcttgtatggtaaagacaccttgacaatgatagcagtcaaggctgcattgtgttcaaaagaaattcaaaggaaagatgatcgagtagataacagtggtgatgggttgttcacagcaaaagaaagatttcagaagaaagactacaaggggtacaagaattcctacaataacaacaaagacaaaggtgacatgttcaaatcaaagggtacattaggtaagtaatgttattattgtaagaaagaaggtcattttcgtgatgattgtttggcacttaaggcaaaactaaaaagagagaaaaattgtggaaagaatggagaagctgatataacagatggctatgaatcagctgaagtgctagttgcatctagttgcacttctgatggagcctggatcttatattcaggttgttctgaatgtgtatgatattttattaaaccttacttgatttctatttattgatacttgtagtac

SEQ ID NO: 310836 - DNA, 1788 bp, Cannabis indica
taattgccttttctaatccacattactagagcggtcattacacatactgtcccgtggtcctagacaatctaaccacgaagtccaaggcaatgtcttcccattttcattccgaaagattcagtggctgcagtatccctgcaagccttttgtgttcagtcttcacttgctgacaagttaaacacctcacaacatacttagctatatcattcttcatgtctggccaccaaaacatgggcttgaggtcctggtacatcttcgttgtccctggatgaactgagtaaggagtcgtatgagactcattcaagatatctcttttaatgtcatcatccataggcacacaaatacaattcataaactttatcattcccgtgtcatccactatatcacacttaatgtatgttgatgatactttgttcttttgcaaagctactgcctttgagattaatgttatacatcagtgtcttggtttatattgtcaatggtcgggacaggttctgaatgtgactaagtctgatatggtttttttttctcataacactactgagaatgatagggatcttattaagcaattgctggatttttgtcttctgaacagttcagatcatttttttgggaatctattttcttttcccacattaagaagagggattttcaatttgtggtggataatgtctcgaattgtcttgagagttggcattccaaacttctttctaaagctggtcgatgctcatcaagtctgttatgtctagtactcaaatttatactatgtcaacatttcttcttcctgtctctctatgtgaagttctggatcgagttgtgaggagattttggtggatcagatcaagtaacaagagtcgttaccttgccttggcaagttgtgattccttatgccaacccaaagactttgggggactcaggtttaagaaatttagagattttaacatcgctttgattgctaagttgggttggtggctggccaagggtgatagagacctttggtgtgagatttttcatgcaaagtattgcaaaaaggggtcatccttttgaatatgaacatcttgggatttgcttccttggtggctcgtggtattgtttctctaaggccttatcgttaagagagttgttggcttattgggaatgggatgttggttgattgtggcactccctgcgggttccttggttttcttgggacgagtccctagctgacttcaatccaagaatttgctatcctctgaatagtaagctcgagctttgtgtcttgagtgatgggaagttagatgttacgaagctccgagaatggtttgtcccaagggatgttgtgagttttgcttctttaaatcaactcccacatgttatgagagaccatcttatctggcaggaagcaattgatggagatttctcagtcaaatgtgtgtatagggagatttctaaattgaggctaaacttgaacgataaggatgagatcttgagtaagatttggaaggccccaattcacgagagactcaaagtcttcatggtgaaagttatgttggaattattttaccaggatctagatttactaacaagtatgttattaacatcctaaatatgaacttctaaaacgatatgaaataaacacatataaagtttcaggaaaccttacagtggttgcagcggaatataatgtctccttccactcagatctctaacccttgtatcctttctgtagcagagtatcaccaagatctgagtccgaatctccttctcttgaaactggattcttcacagccttacacactatgattgagt

SEQ ID NO: 310837 - DNA, 1139 bp, Cannabis indica
tgatgagaagtgaagtggctatgaagattgggaagttgtgaccatccttcatgatgaatgagaagggactgttcaggtgcatgtgtgttgagaaaacctgatttgaaagggaattctttctcattaaaaactacatgtctcgagatatagaccctaccggttgtactaaggcatttgtatcctttgaaagattcactatagcctagattcacacactttagtgagtgaaaattggaacttatgagattggtaaggtctaatgcaagggaaacatgaggctccaaaagttctcaagagcttgtaatctggttttttatgatagataacctcaaatggagatttgaatttcagaatggctgttggtaatctatttattagatacactgatgttttaaggcatctacccaatattttagaggcatgctagcttgagcgagaagggttaagcccatctcgataatatgtctatgtttcctttcggctctcccattttgagcggaggtatggggacatgagtgatggaattgaattccatttgtgacaaggaagttgtcaaaactttgaaactctccaccccaatcggttctaaggaattttatcttagtgtcaaattggttttcggccatggacttgaattggatgaaggcatctaacgcatcagatttttgtttcagaggatacagccaagtaaatcggctgaagtcgtcgacaaaatgaatataaaatctgaagttagtgttcgaatttattggggcaggtccccacaagtccgagtgcactaattctaacatcttagcagccctattgtgtgaaagtttgaatggaagagcgtgggatttaccatattggcatgcatcacagaaactttctttttcattgatagggacagttacattacttgtttttaagacatgtttaaggattctactagatggatgacccaaacgttggtgccatacatcattcttggaaataaaactagacctatgagcaacattagcagataaaactaaacttgggttgatggcagaatcgggtggacagaatactggtttgacattgctggtgtcgaattggtacaacccattcctaagcatcccttgaagcagtaccttccttgtgaccttgtccttcacaaa

SEQ ID NO: 310838 - DNA, 598 bp, Cannabis indica
tgtttttttttttctttcaaatgttcaaatttgtaggcacgcattgttcttagccagcattattaaatgctcttcttctctcttcactcatacatttcatttgatcagattgattagaatccatgaatacatgaagagactctagcatccacccaaccaaatcctacttatttcttcactcccttgttctcattattctccttattactgagaccattcccaccccctttgttagtggtgtacaaaatgaattatcatcacacaaggaccaaactccatagtgccaacaatcctcaatcaactatcttcccagcaatctctacattctcgtgaaactagcaagctctaaataagctttgcaatgaagacaaactcaattgtctagtgttatttgcattacgaatagatattttaaggttttaattgtgtatataaaattatttttcattaattaaaatttttataaatttaattgtaaaattattttagttggaaatctttatctattttgatttgtcaatttttagatttggagcatataaggatagtaataaatgtatgaataaaaaggggataatttcacagatacacaaaaaca

SEQ ID NO: 310839 - DNA, 555 bp, Cannabis indica
tgaaccaaaacatacaaatgaataaaaaaatacttctgtttctttattgatattgaataaaatggattacattgaaagaaagagttaattagggcataaaacccaacaataacaactatgaattaatcttatcaagattaattaggaaaatatataaaatttaagtatcttatgtgcgaatcaataaaatttaaacagaacaaaataagatagataaaatcataacggaagttaattgaccacttaaaatgtaccattaatatcattttaaaaattaaataaattaaaaattaatactcaaccaattaataccatttcacccaaaacaaaaattaaaaaagtaaattacacaatttttacaaaaaactgcaaattaaagtgaatgcatatttaaattaaataaaaataataataataacaaaatcatattaaaagtagcaatatagaaaatttaaaactacccataaatatattttaaatacaaatttaattttagtaacaagaatgtaaaatataccgatataattaaatataaattattattttaataaatgt

SEQ ID NO: 310840 - DNA, 1896 bp, Cannabis indica
ctctagttgtttcgttgtcaaaatggttatatagtttctagagatcccaatttcctctattagtcaacagattcgccactcttctaagtaaaggaactatcccccctttggcctttggacaaaagttcttaccgtgagtgatccaagggtcatcccatatattcgtatcctttccatcagtgatgactttgcaggcgccctgtggtaggatgtcattagcttttaccatattttccagaaccaggaatcataagatttggccttgcacttaagcatatctgttcctctcagatatttagctctcaaaatttggcagcaaagcaattgggatcttgtgagcattttctagccccatttagcgaaaaaaggtaaattcatttctttggtttttcgaaagccaaggcccccacgggatttaggaagacacatcttatcccaagatttcaatcccatggttacccttttcaaaaccccactagaagcccagacgataccatcaattttggtagcgagccgactagacagcttagtagtttgcgtagtgtatatcgaaatagccagcctcacagatttaatgagtgtagcacgaccctccttggacaaagtcttagctttccatccctgtaatttgaaagtcaaattttccagaataaagttgaaattcgcatccttatgtcttgatcagaagctagggagcccaaggtatttaatgttgcctttcggactaccaataccaagggcatttctgatctctgacctcattctctcaggagtattgttgctgaagaagatggatgttttgagtttattgacacattgccccgaccaatcataaaacttatcaagacaattccgcatgcccatagcctcccccatattagccttcccaaccaagataagatcatccacaaagaaaatatgggaaatactagggccagtccgattaattttaataccactgatcttaccttttttcacagtctcctctaaaagtcgagaaaaaatttctacagcccagatgaaggggtacggggaaagtgggtccccttgtcttagaccacaggaaggtctgattcttccaacctgacccccattcagacaaacattgagagtagtggtagacatacattgatcaatccattgacagaatatatctggaaccccaaagcaccttaagacatgatcaataaactaccagctaagtttgtcataggctttcataagatcaattttgattgcgaagaagccttctctgccctttttcctattaaaagagttgatgatttcttggaaaataacattgttgtcttgtatatctctaccagggacaaaaacagcttgagtggagcaaatgatcttaggcaggataggctttattctatttgcaatgatcttagaaataactttgtaagaaacattgcaaggagatataggcctaaaatggtgagtgctttttgggttttgaatttttgggatgagaacaaggctattagcattgatccccaagtgcattgagttggtttgaaaaaaatcttcaatgattacacagaaattactgcccactacaactgattatgaagccctaatcccataaatccgagattgcaagaaggataagcgcagaaaatttaaactttatttgaaacataataaaaattaaacttgtaataactttaaactttacaaaccaaaagatacatatttcgagatctcgtaaatatttttgtttacaaaatattacaagttcatatcacaagcccaccaaagcagcagaaccagagttacaaaatacatcagtggtagaccccaacccgcttggtctagtgtggcctgaatatgtacaagcaccgccaagctctcgcactcatggctgatcacagtctgatttaccctttc

SEQ ID NO: 310841 - DNA, 701 bp, Cannabis indica
aagcctattttatctattcctactcctattgacagagaggatatacttttttagaacttctctacttctggctgttatacggtgaagagtgggtattagagcactgtctctcgattgggttgggggcatgaggcgtcttccactagttcaacttggtggtagaagtatgtttgggctctcagtcttcttcctaaggtgaagaattttgtttggaagacctcttttaattttatccatacttatgctaacttggctcgacatggtataagtaccccagatgtgtgttgtggtaatttgcaacacgcaagtatacgtattattttaacaattaatactcacaaagagtgaggtcgatcccacaaggattgtagttaagtacgttaaaattaaattcttacttctatttggctatataaaattttaagagaaaataaaaaaaaataaaaacagcaaaagtaagaagcagataaattaataaaggaattaacaatgaatacaagttagggctttcgatttcaattgtatctattgattatggcttaatctgattatcttcctcttaccaatttctatgcaatagcatgtttactaaggtaatttatagtcttctaagatatataaacttcaattacatacaaattttatactctcgtgataaattaaacatgtaacaggccttaaacacagaaaccctataagct

SEQ ID NO: 310842 - DNA, 1020 bp, Cannabis indica
aggatgttaataaaacatacttggtagtaaatctagatcctggtaaaatatttccaagagtgcatgcttctgggacctttcataaagtggttctattcggttgataacaacaaccggtctcacatgcatagcaggggtaggagccacctgcacctcaggagcaagcattacaggagcacccctactgtcttaaacgtcagatctcttcatcttttttattaattctggcttgcatctcaacgaacctattttcccaatcctaggcagcctatggtgggttagaatcaccccgattgcatgccctacctcttagcccttaggcctctacctcgaccatgaatgtttgggggaaactaaactccctgatcgccactagatctgaccaaattaccctagattctcatgttttgtctgacgtccattctatttgaacaacctgcgaaacaatgagctagcctggtcagaacatgattaggattaaattttaactaccgcttacttgagaaaataaaacatgcacctattcagctatcaggctactaacatgtttcctatcaagcttttcttataacatactaataaataaactactaaagcaatagaagcttactgaatcgtgagtcgagtttatctccaatgatgattgtatatatcgtgacgatcttcgaaagataacttggcggctctaataccaaattgtagcactctactagattaggcgtgttattgtgatttaaatactaaaaaatatataactacaaaagttgttgctagtgactgccaaaataaagcgtcctaccctaaagatctaacactacaggtctaatcgccccgatatgtacaattcttatcagctcgcactcactgctgcacaaccttatctttgcccttacttacacatataaataatatatgtgagtcaaacaaactcaataagaaaagcataatcatgacataaacttaaactaaattataactagacaaccatacacccaatcataaccctatcccacgtcccac

SEQ ID NO: 310843 - DNA, 1026 bp, Cannabis indica
tttggggccctgagcgttcgagggctcgaggcgcacgcctagcccgcctaccctcagggccggccctgcgtttaagtatcgagtctcatataacataaaaaaaataatttttaaaaaatattgctatccaaataattataagtcgctacctatagaaagtgcaagcactagcaatacttttagagaaattataaactaatttttttatatgtgatggtgtatattataattatagtaggtattttacctgttttttaaaaatttcgaataatttatagtggcaaaaatataattaaaaaatgagtaatttgtacaataaatacttaaatttaaatttcagttggagttaaacacttgagtttaattttttacggcaataatacttaagttatatttctggaacttttgtaagtacctgatcgtattagttcaagttattaaatttttattctttgtttaaaaattatttataccaataaaaaaataacatgtgtacaatgacttgacacatgataagagatattcttatacagttttacatgtaacgatagaaattcaaagagttataaagtatcggttgtatagtattaaaaaatagaaaattcaatacatgtaattatagaatgcttaataggttgttggactgatttggagtctgggtttgtagttatttggcttctaggaattgctcgtggtttttgccctttgattaatgaattctcttttccaccattaaaaataaaaaaaaaaaaattacgttattcttactttaaattttgagtccgccactaattatatttatatgaaaggatatggtacatgcgaatcacatttatgatctcattaacgtctttttcaaccattgaatcaagcagggcttccattggtctatgggccttgactcaacggcccaattgtatggacatttaattcagattcaccatccaactaatactatacctaaatttttgaggaaattacactctatactttttttatattgtcctcttttatttttaccctctt

SEQ ID NO: 310844 - DNA, 3347 bp, Cannabis indica
gggagcttggagtaaactttgtcttcctaaggagaaagggggtttggggttcaaagacttagagctttttaataaagccttgctagccaagcaagtgtggcgggttgttagaaatcctatgtcccttgttggaaaggtgttgaagagcagctatctctccaaatcctctatgttggatgctaaaaaaggttcgtgttcatctgcagtttggaggggtttgctttggggtagagagattgtggaagcaggctctcggtggagagttggttcgggggaaaacattgatattataaaagataggtggatgcctagacctgtgaaatttagaccaatcttaaatcccggtatacccgctggtaccaaagtcgttgatctcagattagcaaatggggattgggatgccgagtttattaaggcaatctgttgtgaagacgatgcagagattatattgggaatccaacaaggctcttctaagagtgaagataggctgatctggcacttcgcaaaaaatggggaatacaatgttcgaagcgggtacaacactgctcttaatgggagagtgttcgaagagaatttcgacacagaaagcactaagaaatggtggaagcacatgtggagcttgagagtcccccctaaagtcaaacagtttctctggaaagtgagtcatgagtggctcccgactaatagtgttttgttttgcaggaaaatggaggttgataaacattgtgggtgttgtaaaggtgcgagaaaggaagaaacaatcattcatgccctttgggagtgcccaatagccaaggaaacgtggaaacgatgcaggctgtacaaagagataaaaaacgagatcaatccggatatacaaaatttcttatggatgctaaaagaaaagctgtccggggcaaactttgatctctttgtgatgatttcatggcaactatggtatagcagaaacttgtcgctgcacaataatttctcccccaagagtgaggatgttattgcggtagctacaagaattcttgaagagtaccaaagcaaccatggaagacggagtcccaagacaaacaccccagccccggagaggaagcggtgggcccccccagattgtggtacattgctctttaatgtggatgcggcggtcaacaccaccaacaagagtagcagtgcgggaggggtgcttcgcgatcataaaggcagctgtgtcatgtccttccgacagtactggcacttcccgttcaacccatatgttgcagaactcaaagcaatcaaggaagccattctcattgctggtaatcgtaatctcagaggtttttttttatacaattagattgcctcaatgcagtaaaagcgattaactctagttatgttttggatagggatgttgaatttttgttggaggatattaaaaaaggcctcttgtcttgtaattgcttaggagtgaattatgtgccaagaacttgtaattccttggctgactatttagcaaagaatgccttagttgttaaggattctcttgtgtgggatggaggtgtgcctcctgttgccttttcaaccttgttggttgataatttggccttcccctagtttctttgtactgttctctttcctcaaaaaaaaaaaaagaattttttctaaaatatacgtttggacccgagaactctctttaaattaaagtccaatttttacgtagtttcgttccatgaaatctatatgaatgccttaatttttgcatttagattcatttaaaattaattttggattaatttggttgtcaaaattaagaagttacaatcgggtatgggtcgggtccactgtgaccccgtgcagaaaaacaagtcatttgttggaggttgatggtggcctaaaattccgtgtcgttttccacaatatatgaaaaacgatatttatttttttatattaattataaggtagccttttgaaaaaagcgcaaattgttgagtaatttgcggcataaatacttaagttgaactcctagttgcaaataaatacctaagttcaatttttggcggtaataatacctaagttataattctagaacttttgtaggtacctgactgttaagtgttaagtaaattgccacgtagcaatttctgattggtccaagtcattaaagatttattttcttaaaaaaattaatttaaatataccaataagaaaatgacacgtgtataatgacttaatatttaacagttaggtacctacagagttccaaaaatataacttatattttattactatacaaccaaaaattaaacttaagtatttatttacaactgagaattaaatttaagtatttatgccgcaaattactccgaattgttactagttattgtatatttttaaacaattaatttttgaattaaaagaagaagttacatactaattaattaactaatagcagaaacacgtgtcaattagtaaaccacaaattagataccaccttgaatcaggtatcaacatatagtaattataataatttgtagttaactagcaaatgcattactgtctctcccattaatttggtagtaattgaacatattggtagaatagaatgaccataattagttgttgagtttatcatataataaaataatagaattatatgaaattaagtagtagtactagtagtgaagatgaagatagtgattaaataaaataaattaaatgaataaaaaccagatgcaggggttacgtacacaaggacacaatcccgagatctcctcacatgcttaagtttgtagctcaatgctaaagccagaaccaaactataagttattactactataatataatcttttcattttgtcctcggcctgcaaatattcgatacttgcgttcaaattatattataatatatttccaaggattatacatataaacatgagaatccacgttaataatatatctaatcaacctctttttgtttttcaatatttttttttaaatcctcagcatgtgccccagtttcttccactttctttcaacaagtcactttgtgtagtaaatatttttatatatatatatatatatatatatacataaatatacaagaagttacattaaatatacctaatcatcatagttaaatttatttttattcgttagataattattaaataattttagttaatcaaaaaattaattacaaaattacaaaattatttttatatcaaacatgagagagaaaaattacaaataagaagctccttataatataaaactatgcccaaacaatatatatatatatatatatggaacacttcttaaaggggtaatatccattgatgtgcactaaaaaaaattaataagataacaatctaataaccttttat

SEQ ID NO: 310845 - DNA, 1366 bp, Cannabis indica
tttttgagaaaattttgtgagccaagttttaccaaccttccgttcatttaattgaagtgatttttattttatttttatttggaaatatcataatattccaaataaatattgtaaagaaatctttaaatttaaatacataatcaattaaaaaaatccaatgtgccattaaaaaatactatttttattactaattttgagtttttctttatttattttacatttatgtcaattccaaggatttctccttccaaaaaaaatttaagaacagacaaatatattttgttaaactatagaatatcatatgttcaaaaaaagaacaactatagaatattactaatttatgctagaacaagagttcaaaatattactaatttattagacactatcagagatattgaagctgtatgtagggttttcttgtggaaaggccaatacttgtttcaaggggcaggtgctatagcttgggacaatgtttgctaaacaaaagggggtattggctttaagaaagttaaagaatggaatcaagttgcaatgatcaaatatgtatgggcagtggctaaaaaataagaaaacttgtgggtcaaatggatgcacagtgtttacatcaaagatgagaactagtggagctattctattccttttcaagggagctggtattggaggcaactagtagctctgaaaaactagatatggcctctcattgatacacaacaattcctagcaaagagatatcaaattgcagcaggttacaaattgctttgctctgcacaagataaaaaaaggtggagtgaacatctatgaggaaggtttaatactcccaaacacacaacttcatcttatggattgctatgcaggagagactgagaactaaagcaagactacacaaatttggcgttgttgaagatcctttctgtgttttgtgcagacatgaggaaacaaatgaccatttattttttgcctgcagcagatccatggcatgtctttctgaaattgcaacatagatgcagtggagagtagctgatacatcattgcctcgattaaccaggtggattcaaaggattaaagcaagcaaatttaaaaagaaagtgatggctgcttgtcttgctagcttagtatacaatctctggaaaaccagaaatgaagttctatggcaaggaaaagagccaaatatggcacatgttgtgaatagaataaaggaaagtgtaaagcaaagagttgtagtattgtggcctaaaaaagttagccaaaaagaagaggaacgattttattctttgtaaatcgtgtatagaaaaatgaaggtcgtgacttgaatgttatggtgcttatatgtaacacactaactagcataggcatattacgtgatttt

SEQ ID NO: 310846 - DNA, 3312 bp, Cannabis indica
gtgtcttttttgactgagcaaggagacttaaatgatcactttcctgatgtgtttcaacatttccttgaccactttcgaggtatattgcggaatgctaaacccactttcatggagttacaagaacatagctatgggcccaagatcaatctcaatcagcaggttcaccttctaaaacccttttctctcaaagaagttagagctgcgacgtttagtatccctaatactaaatctcctggccctgatggatttggcccggggtctttcagtcagtttggcctgaggtgggaaaagatattcacatggctatagctcatttttttgacaccaaccgattcccgacagagctacatagtacaactctctctcttattcctaagactgagaatccttctaaggctattgactaccgacctattgcttgttgcacaaccttatacaagtgtgtttcaaagctgatatgttctcggcttgctaatgttcttccttgcttagtgagtcagaaccagggtgcgtttgtcaagggccgttctattgcttacaatatccttatcctttaggatctcttgaagaattacagaaggaagaactgttccctaagatgcacaataaaaattgatataagtaaagcttatgacacggttaactgggattttcttgagaagcttttggtggcctattgcatcccttaaaagtttattaagtggatcatgaactgtgtgagaaacacatcgtactcgttacttatgaatggaagagttcaggggacgtttaaatttgaacaggggcttagacaaggggatcctatctcccccctcctctttgttcttgtcatggagtatttatcctgaagcattcaaaaagcggccagagataagaaattcaggtaccatcctttatgcaaaaaaatgaaactcactaatctttgttttgcggatgatttagtgatattttgtaaagggaatgagggttctctcaatgctatcagagtatttcttgacaagtttagcaaaacctcgggtttatccatcaactttgctaagtctcaggtttattttggaggaatctctaattcgattcctcttgttcaaaaaataaacctctctattggagagttccctcttaagtacctcgggcttccccaaagaccatttaaagagacttgatgattgtgggtcgatattgaagaaaatgaaactaaaactccattcttaggctaataaacacttgtcctatgctggtagaatccaattaattcaatctacgttgattggattaaggaattattggatgagagtctttcttcttcctcaaagtgtgataaaagagattgagaaactttgtcagggcttcctttggggattgaaggataatcggtctagagttcagtttgttagtcgggagagggtgtggcttccaaaagcctatagaggtcttgggtttaaggatggaactaaatggaacaaagcttctttagctaggttcatttggggcttgatgaataaaaaagacttactttgagttaagtggatcaactcgatttatctcaaagggaatgatttttgatcctataagatgaccatggatacaagctggtattggagaaagctttgtaggctgcgaacaacctaaaccaaagcagatatcattgcagcaaggggagggaaattcaaattcagtaagatttattgtagcatgcttcaccaggttgtgttcccggcagcaagggcgatctggaacggtattaatgtgccaaaacatgctttccaactttggcaagcagttcaatccaagttgttaactagggatcaattatgcagtttgaacatctctattcctaacaagaactgtgtggtttgtgacatagaacccgagagccacaaccatatatttttcagatgtaacttgtctcaacaggtgttgtcccacatatttctctggctgggctttgaaggatggtctaagagttttgatagttggacggtttggctgggcaacacaagaccgggcttgaaggatagaataagagttctaactcttgcagcagctctttatcacttatggagcaaccgaaatacttgcttattttctcattattctaactctattgtttgtatagtgaacaaaattaaaagtgatgtaaaatatagactcttgttgattaaagataggaaaggctatagggaggagaagaaattacttcatagtttgatgtgtaattagttctctttgtgtttttgttgcttctcttagagaagtgtagttgcttgtatttcttgagtagagtaacgaagtttccttcttcttgatcaaaataataataataataataataataataataaatttaaaaaaaattaaaacgtcacaataaatgataaatataaccgcttagtataatcaattgtatgaatgaatgtacacacattcatatataaatattaatgttgtgtaacacattaccaatttattttctcatcatctcacatcttaaatttctcaatatccaaacaatatgtattcctactgtatatatcctacaatctgaaagctttctttatcataactagcaagtgatctccatagccactaaaggtaaaggtggagctgcttctgtttaggtattgtttaatattttcaatgtgttttcagattgattgttactttgcccacaaaagctactcatgttcataagtcactcatgttcataagtcactcatgttaataagtcaccatgaacaaatatatatctattcaatatgattattgtatgatttatgtttatatttatatatgtatatatatataatgagagcacaatttaagtgagataattttattatattttatatttttcataattcacactgaataattctttataaatgataaaatatcatcaaattattcattaataagagtaatagtatttttttttattaattttcaatagtctttttatttttttttaattctttataaataataaaatatcatcaaatcattcattaatgagactgtattattttagtacaacatctcaaattttttttttttttcattaaaaaaaaattctcaaaagtttaaaaagtaattaatctttatattcttaattaataacttatttaatatttataaaatatattattaagatgtttttaaatttatattataaaactatctcaagaattactgttattattgtgtttcaaaattctagaaagagaaacgagtgttgcacctaggttagagaaaggatgaaaatatattttagggaaattatagtaaatggccccaaatcataggagtatgtta

SEQ ID NO: 310847 - DNA, 1132 bp, Cannabis indica
tctttacgtagactcaagttcgtatgagtcatttggacttcaaaggtagaccatgtatggagcactgagtgtcaaaccaacgtggagcactgaaagtcgttggtcacgtgttctcacaactctagctctaatggtcgttagtcacgtgtcctcacgtggccccacgactatagctctgaaggttatatattagtcacatgtcctcacgactctaactctagaggttattggtcatggtcatcacgtgtcctcacgattctaactacgataaccaatattctcgatgaccttttcaatatttagaaaaaaaaaaattatacccatctctttggattttttgaggaaacatatatatatgtgtaacactttattagagaaattttgaacttaatttttggattaaatttagcacaaattttctatcatttattgaagatggtccaactctaaaatatatatatagattgtgtctaatactatttaaaggtggtgccttgaaaaataattaacgatattatataataattattaaattaaattacatgagatctgatgcttaatcatattaaaaaaaaacaatataatacttgccttttagcatttctcatatttgtatacatatgcaacatgaagatctttgtttgatttggtcacgcttaggtgcaagtcaaacataatttatgctacgtttaggtacaagcactagctagctactatattaaaaggcccttttaaacatgatgccagctcttccacactcaatctagctctttcacattgcaatgcatgagaaattgcaaaacccacttctatatatactaataaaataattcatgtcctaatctttaataaattcacagggcaatgcaactgagatcaagcttgtaatgtagttctaatctttgttatgattaaatccaataaacaaacttaaaagggattttcatttaaatcagtaacctaagaacctaataatatcattatcaagcttataatgcagttctaatcctttaactattgattgatcaataaagtcatattgtaatccaaataatattcattcccctaatactctcccttccaagacaaattcacaaaaccaactgactaaacaccattatcattataacca

SEQ ID NO: 310848 - DNA, 1964 bp, Cannabis indica
aaaggaaaaatataattttcccgattatgtggaatacaatttttttacgtgttatgcatgcgtgccaagaaaaaaaaatcttcaaacatatgttgtcaaatcaaacccacacaaaaagaaacaaagaaaattatattattggaaaatcgtatgaatatgatgagtgaatataagagaaatggcttttgtaaatatcaacaagaaaatcgcaaactgagcaatttgctttatgtagaaatcattaaaaaaaatggttacatttaatttaattggaggtaataaaatgaaatgaaataatcttcattttattatattatttataaataatataaaatattgattaaataagcgtcataaatttattattttttataggggagtggtgcccatcaaacagaaagaaactctttgagattacacgggtcatcaccaattcaaattgctacttcatctaaccctgtagcccaagatgccaacttatgagcgaaagtatttgctgtccgattgacgtgtgagacataggcaccggggaggagagacaaagctgcccgaatttgattaattatatcaccaaagcaagaaagatctcttttgggatgctcaagagcatccgagatagctttacaatctgtttccatgcaattaatatgaaaacattcttcaatacaccattgcaacgagagaaggagggatttggcttccatagtagtaacatcccctcctctaacataagggaacgcgacagcagcaaccacgaaaccatcgctgtttcgaatgactccaccaaaaccagcttttaaagaacctttagtgactgcggcatccacattcagctttaagcaatcaggatcaggaggtctccaggatgagatcgagggggccctattcgcaaaatctggaggtttttgagctgatactgatgatttgtagtccgccaggaagctctgcgctaggttcactactgcgtgggtcgggtcctgtgattgtcctctgatagccctgttcctgttatgccaaataaaccacgcaacacaaagaaagcattctacatcttccttggttaaagcagcataaatataataagcaatgtcatgaaaagtgggtagggggagaagaggaaatatattcataaaaaaatgtacatttccagactcttcgaacactcttgcagaagaatagagcatgagaaacagattcaacgtgggttccgcatcgatcacaagttgaggattgaattcattttcctagaagccaaattctaagggttgggagggttgagttagaggcacgaaaagcgaaatgctttatcttaggcgggatattaagatgccagaggtttttccaccaagatgaaggggaagatgaggaagggatatcatgaggggaggtagaagagagactaatatggtagccagaatcaacagagtaaacaccagattttgtgggctcccatattaaagtatcactagagggttgaaggggaaggggaatggaggtgatttcctggacaatgtagggcgggaaacagtttctaataagggtaagatcccaggtcatgtcattcctgatgaaggaagacaccttgtccggcaccggattggaatgtcgataccctggaatctagtaatcacgggaggtgaatgtgttttgcccattaccaatcttagagatgaacccttctgcaacaactctttaccccaaaaaatacttcgccaaacaaacgaaggagagtgtcccaacgaacaatttatgaaagaggagtttgggtaatacctgacagctaaaacctttgcaacagttgagtttggatgtttaagaaggcaacaagcttgtttagcaagcagagcctgattgaaatggaccaaggatcggaagcctaatcctctatacttttttgacctacagagcttttgccaactttgccaacgagtcttgggacggttgtttgttggaaattattttac

SEQ ID NO: 310849 - DNA, 814 bp, Cannabis indica
aaaaaattataaataatataatttacaaaaaaaattgagttcaaaataatttattttacctaagtataaaataaaatagagttttaagaaattattaaacttaagttttgatacaataaattattttaaaaataaaattaaaatctatcccctaaattttgttataaatgcatcttaaaattaatcatatttatttattgttatctttatttattactagtaataataagctatctattgctttcctctaactataactttatttactgtacatttattaaggaaagaaacttgtactatctgtatatttattttttatttttatatatatatttatatattttgagataagatgtgctatctgtgtattaaaatcgaaacttccacgtttctaaatttcttattattctgagaaaagaaatcttcttcttaaaaagaattaatagttgaaaagggaaaaaaaaaaggcatctacaagacgtacaacaaataccacatgaggtgtcggcactttctttatactagtgatgatttttttttctttttaagaaaaaattgttattattaatgagaagaattataaatgattattttagagacggattgcattttagttattcaaactattcttagttcactatttatgctttttatttttggtctatttgttcaagattgtcaatctattttatcttatttaagtagtgtttctctattggtcatgttaaacggtctgctaacaaagtcgcgcattgtatggcacgtggtgcttgttattagtcaggtccgtcgttttactgtgagcgatgttccc

SEQ ID NO: 310850 - DNA, 1403 bp, Cannabis indica
atttaaaagcctggatatgatgaccagatcacagatctggaagattaacaaaaatttaattaactccaagtagaaattgtcctacagatgacttacacattaattaaaccttaccgaagatcttatgtttgcaaatccaccaaatatttttgcataaatgaaaccgttactttgtttatttggtactgtaagaaaaagaaaaacaatccattagctaaattctctaatagtcttccctttaccaaacacagcaagaaaatattttcaactaaaacccagaatgacatagctaaaaccgattcagtatcattgcaaatcctagaatgtttgatgtaagatagaatcctaaaatcaacaaataaaaagggtgatagaaacaagaaagaaataagatatttgataaggagcatacacaaacacatgtgtacataggaactctttaaaatttacatgcataagatagcataagaaataatcgaatcaaacaaaagtttcttcttaatggatagtatctgttacacacaacaaattcaactgatggaggagtatcctaagagaaaatcttaccaaaccatgacaattgacctctcgggaaaggcatactctcagaaaaatattgttctagattacatttaatagtaagttcatggattcattaaacaaagaagtttccaatgcattggactctactcgatactgataggagattcaattcaattgggataaacttaatcattatacatgatttataaattgtatcatgctaaaccgtacaatacgcaggaaacaagaaattctgacaatagtacttgcaaaagactttgtcaccatatttgctaaataattaaggatcataattctcagactaggcaacttattcaattatttttttctttttaacaataataataactaattcatgaacgatagtaccaaattcttacccgcgtaattgcttctagggttggcataaggctgcaaggatttcagtggcttcacaacaccccagagtttcttattccgatatttctgttccaatgtatcaaacattcccataaacttatatagacaagaaaaagaccggaatttgaacccatacaagctagttgaaattcattgtaaatcatcattcgcatacctgtcttccaaggatagaagcaaaatcatcgcgaaacccggccagggcactgtactgaaccaagtcgacagaggaagaccttgcgatggagagatggcgaatcaaagacacaaaagacaagaccagaacaaacagagcaatccatttgatcttagatttgaataccatctgggcaaagaaataacgaatttagaaaattagtcgaatcagaaaggaagataaaaaaaaaaaagtacacaaatttcagtgacattctaaactcacc

SEQ ID NO: 310851 - DNA, 981 bp, Cannabis indica
tgatgatgatgatgatcttgatcttgatgaagttggagttggtgttgggcaggatgaggctgctattagaaatgatcgtaatgatgagggtgttgttgttgccgaagttgtttcaaaggatgatgatactggcaaagtggattcttcttctaaagatgccaacattgctgatgccaacattgttgttgggcaggtatattttttttgttctacttttttgtgttgttgttgtcttgttgttttaatattttcttactgttgtttttattgtcagtctgaacaacatcaagttgatgatgagaaaattgatgttgatgcaactattgcatctgctgttaatgttgtggagaaattggtttgttttatatttttctcttttttagtgtgtttctatattattttattgttgttttactagtgtttttaatgttctttttttgtaaatataataaatcattttcttaaattttccagatagtttcctcaaatattgtttctggttctgctgagatttctgagaagaatgtgttggattatgttttaccaggatctatgcagcggaattaaatgaccatttcgctcagatctctaacccttgtatcctttctgtagcagagtatcgccaagatctgagcctgattctctttctcttgaattagactcttcacagtcttacacactatgattgagtaccacttgatgtgtgtgggcacgtactctatcactatagggttcgaaatattaaagagagaaagagagaggaaggattcaaaaatagagagaagagatggctcaagatttgactgaaggcaagtgtattcatcatcttttaatttgaggccatcactatctatttataggaatccaatgaggtttaggtttaaattatttggcattaaaaaattgataaaataaatggtagaataaagcataagtggccgaccatggatgtgggcccccactttcaattttgccattttt

SEQ ID NO: 310852 - DNA, 946 bp, Cannabis indica
taatgataaagctattcgaatgctatgatatttttatattgggtaatacacgggttcgtatagacgttatactacatatgcatgctgaatgataatgaatgacgagtatgtatattacgttatgataagaatacttgcatttttattgcttttgatttaatagctttttttgctgagtcattgcgactcacaggtgcttcatggtgcaggtaaaaggttaaaagttgtgctcacactacaagaattatggttaatcgcactagctactgttgattaaaaattcctaaactttaatatgttattgactattttatttgactaagtgatcttaatagagtgtggagatgttaaaaaatctctattaataacgtgtagaaagatagtaatacatataaaatagatgggctaatatcctctcattgcgaacattatacatcttataattctatcattgttaacttataacttgacatagtagtttttataataagctttagattataataaattatttggcagatatattggatttatgtaagtcatcatgaatatatatcaagagaaaaatcaacaaaatatttgcattccacaaaagactttgactctatatgtgtatattttctattttctttcactttacatacacctaaaaatatatatttccaacgtttcacactagccctaagaaaaagtaagagataagacaaaactaaaacataaaaataaaaataaataaataaataaaaaaatcaagggcagagaaactgctaactccattattgcagtagaattattattgtatatggcaacccatgttttgtaaaaaacgattttctatataaaggaaattaaattttttagttgttcatttattttggggacatcatctataaaagtaggtatatctaaaaaaatatgaaaatgaaagtaaaaattaaaacaagta

SEQ ID NO: 310853 - DNA, 2897 bp, Cannabis indica
taatagattattgtaggtttggctaacataaatcacaaggttgatgaaaaaagccaagccatcatcttgttgagaccgcttctaattgcatatcaagaagttaaggcagccatcaagtatggcagagacatgattgcattagaagatattcttaccgcacttaagtcaaaggatttcaaaatacagttggagaaggaatccaagaaagaagaagtgtacttggcaagaggaagatcacctaagaaagtaagttccaagaataaaaaacatcactttcaataaagatcaaagtccacagaaaaagaaataaggaagtgttacttatgtggtaagtctggacacttgcaaaggttttgcaagaagagcaagtagaaataaggcttcaacaaatctcacaatcactacaagaaaatgttccaatactggcgaaattattaggggcaaactaaatctgccggtaataatgtgttttttttaaaaaaaaaagtaataatattgaaagaattgctttgtgcgggaattttccaagtattaaatttcaattttattagcagcggactattactggcagaagtccgccgctaatgacattaaataatatttaaaatattatatttttaattattaccggcggacctctgcccctaataattttatatatatatcataacccttatttatctctccctcatcgtctccctcttcatccccaaaaattttgatcagaaacattcatctctccctttttatcctcaatatcaaaactcttattcacctctccttgttcatcgtcgactagcccaccgtttcgaccatgcaatgacaagcccactgcctccactgttgtcgacattgccgtctctgcgagactcatcttcatcattcaggtatatatgtatagtttggattagttaaacctctgaacacgctcaatttatggattcaggtacatgatttaaaaactggttacatgactgaacgaactcttactaatgtgggtaattatattggggaatttagagaggcggatcctaagaattttttaggattgtggagggactatatgcgaatttgggtatctatgtcactcgataagccatttcagcgtaagatgaaattgtggaaaacgaagacagagttcatttggatcacttttaaatatgaaaatgtccctcttttctgttttatttgtggtctattgggtcattcaaatcgcttctgtatgtgactattcgatactcctgcagaaaaaatcaccaaaccttatggcactttcatgaaagcaccactgagaagacagacaaagttaatcggagcaaaatggctgcgtactgaactgggagatacagagtttgataaaagacttgaagcggaacgccccatgcagccacagtccggtggtcataaccagtcgaccggacatcgtactgggaaggatgctgataccgtaattagtgggataccaaatcatagtaagtccattcaatctgataccaatcccattaatcaaggagatatggttacagctgccattcacaatattcaccatatccatcataaacaaccattaaagttgattgatacatcagctgctaatttggggggagagaatattgcttccaaagctacagatgtgattgacattaatgaagaaggacttaccataacagaattaaagaggagaagattgtcacttagtggagaattatctatggggatgaatactgaagatgaggaaatgacatgtggcaacgtggatactgaagatacgactgtgatgttgaacttgggctcaaaaaatgggtcgatggtgggttctggttcccaggcccaccgtacattatgagcatcttaagttggaattgccgtgggcttgggaacccaagggtgtttcaattcctaacggaccttgtggtccacaagaaacccaattttgtttttctttgtgaaactctaagtcgaaaggagttggtagagagacttcgggtctctttggggtttgatggtgctctttcggttgatgcgagaggtcatagtggtggcgttgcaatgttatggagacacgatgatgatgttcgggtgctaggatactctgcctgccatgttgatatcaaagtaggggttgaagacggtaatgcttggcgtttaacgggtttgtatggtgaacctaatagatcctttcggtacaagacttggaaccatttaagatcactctcgactgaacacacattaccttggtgtgttattggtgacttaaacaacaccttgtctcatgcggataaaagagggggcaatccgtatccgcaagctcttatagatggttttcaggaagctcttaatgactgccatctccacgatatggacttgtcgggttatccgtatacttgggagagaggcaggggcaccgttggttgggttgaagtgcggcttgatagggtgcttgttaacatggaatggtctcgaatgttcaattcagctcagttcctcaaccttgaagtctcaatgtcggaccattgtcctcttttgcttcaaactattgtgatgaatttttctcagcccatacgtcattttcgctttgagaatgcttggcttcgagagccaatgtgtctccaagtggtaaaggatagttgagagttatgtgagaacaattctgtggtggagaaaatttcagtatgtggggataaactttcagcttgggggaaagattacactggggactttgaggctcggattactgattgcaaaaaaagatccgactgctgaaaaaagccaatgacagcgactctttggttcggtacaaaaaggctcaggaggaacgcaatgagattttcagtcaaaaagaagtgttttggcgccaacgttccaagcagttgtggctagaggcaggagaccaaaat

SEQ ID NO: 310854 - DNA, 1887 bp, Cannabis indica
taattctattctaaaaaatataataaagaagaaaattaactttaaagataacataaataataggctaaaaatatcctaacagtgataaaaaattaagtctaaaatttcaagctaatttttgacaatgatttattaaatttatttaaaaacattgtgaatacaagttctacatctttctaggtatccacaacatcttgaatttttttattctgagatatattgagagagttatggctaaaataccatcaattttcccgattggatttcaaaataaaaattttgtacacagcttgaattagagtcgtggtgcccaaatgaagggccactgtgataatgcccatataggtcaggagaattcagttttaaaggggcaaagctgttttttatcctagcaactatagaattactatataaatatctttaagtgtgatttttataagttttctatctctaaaaagctcaaaaaagcattgggagggtagggattatgaagattggaagctttttcaagagtgtttcttcttttcttctttaatttcttcctttaatggttttcaattttaatttgataaatattattgttatcccaatttttgcttacctgacgtggcatgtctacgtggccaacatttgtgccacgtggtaggatagctcgtcaacaagaaggcctagtcatctactcagcactacaaccaatgaggagtccaaacactcaagtgggataacgaaatgatgaaccagccacccttggctggccctatggccagcataggccagtcaggttctagacgtctcatgggcggccaacatgcatcctgcaaatgcattggtgcacagcttcacacgtggatagcaagccagactgtaaatttggctttaatagcccacaaaaattgagaaaaaataactatttttaaggggcatttcaatcatttatattttactattttaatatgtaattatagtttattttacctatttttaaggaatttgaagggtgtaagctctactatgtaaagagccttacttaaacactaaaaccctaagccattaagtctgaagctctaagtctcataactcacctccctctctctctctctcacacccacttgttgtactcatacttgagaattttcaactctgattcctacattgtaaccttcccatcaccatagtaatctaagtagcattatctctctgtatcaatataactaaaaagggagtaggtcattaaccgctaactaagggaacagaacctatataaaattctgtgtttatttactttatagttctaattgtgtgacatgtggtaagcatcagtattacattcgactccattattggttggccaaatctgaggtcaacagtttggtgcttctattgagaacaagtcaaactcaagtaatctgatcaaatgatatggttaataggaagagaactttggctacagcctctacctcatcgggtctccctcaagaccccttgactatagatcttgatgttcatgttccagtcacaactggaatttccacaaacacttcagatgtggtcaatccttccatctcagcaagcaccatgaatctggccactacagctggccaggtcgacataaacatcctattggatctgaacaatcagctctagcttgcctcctagggaagaccctccattggcgtctgtaaaactacttccactcttgtgcatctgcagggtgcctaagcatgccaccctttttagatctcttagagtagtgccatcgcctgtcctctgccgagtgtcttgaactgtataacctcttcagtctcaaaattaaaggaaagtatcgcaaaactttttgagtaacttttttttctgtctccctttctctttttccaacgactctcgcca

SEQ ID NO: 310855 - DNA, 1208 bp, Cannabis indica
tactaattagcctataaaaataaaaaaaaaattatattaaaaacatatataatagttaaatgatgtagaataaaaaaatgttaaaaatttgatttatagtgtaatgtaaaatgtgagacaaaataaaaaataataatgataaaaatatgatccttactttttaatatattattttttatagagtgtctaccataattatgttttatttaaatacagtatcgtgtattttcaataatatttatttgatattttataatttaaaattatatatatttattatcttaacttacatcgataaaattttgaaaatttacaaagtgttatatttataattttacgttcaaatatataaatatttttttgcatttaacggtgttttataaaaacaatacgaaaacaataaaaaagggttttttcataaatatgaaaaaatggggtaaagtttacttttttatggcataaataaataatgcaaaaaaaaaaaaaatataggactaacaaataattaaagtttaaataatgggaagaaataataaataaatttaataaaacttgtaatagtaagtttcgccagaaaagtcactgacgctaaaaaagtcaccgaaaattcatcggtgctggaaaagtcatcgtcgcctaaacagtcactgaaaaagttacaagaagtagatgtctcagttataaataaaaataaaaccgcttctataatataatgaataaaaaccaataactcaaaccggttataagcaaagcatgcccagacatcccagtagggcaagccagcaacaggcactccgaaggctggcctccatctttgaaagttggcctccatctctggaggctggctaccatctttggccaggcacacaggaaggtgccagcaactctgcccaaacctccagtggcaggacactcaggggccaccattggtggatcccatattgcaggcaagactagcaaagctagggagcgctatgcttggacactctatcacggcccaaaagcgacatctaggtaggcgaagaatgagactctaagcaaccaaagcttggagagcccacaatctctttctctaaaggagatcctacccaagtcagtttcccgcacaacgacttcctggtcgttactacacaaatcaagaatatgactttagcaagatacatggtggacaataggggtgtgcagaaagtcatccaatccaatcccaa

SEQ ID NO: 310856 - DNA, 1654 bp, Cannabis indica
atttaattgtttaatatttttaaaattaatatttagcaactttaaaaattacaagttaatatgaatgaattcacaaagaaaggaacttacgtatgattcagaaggcagtagtctttattggaaataaacccgtcgtccaaaagatgtcatcattaaaatttgtcttgttgggtaaactaactatgagcttacggtcgctagtataggccccaagataatagaagccccccacagtgttctttctcgcaggaatgactttaacagagtaaaagcaggttatctacagaggagtagggcactccaaacctaagatgtgatacagaaccttgaggctcgcaaggattctataggaggtgggattcagctggaatggggcaactccgaggtagttacagtagtccttaaagtaatccctgaggggaagaataactccagccttgatataatcaaggctccaagctctcacacctgaagagttactcgtgctggaaccactacactcctcgcgtattatcctttctagaggataacagctgaattcccaaggtgccacagacctgataacgcaccctttccagtgcttaatgccacaggactgaaggatgccaccaatgtaggccccaatagacctaaccttggactcaataagttctgcctcaaatgtaacattggggtcctaaggggtcttagatttgcggggcttaggagacatgatttcaaactcaaggtcacctggttcaaaagcaacagtgacggtgggtaaaaacattggccttgcgagtggaatagaagataaactcacgggtgcacgccaggccgcgtctcgcaaaaagcgacgcttgccctcagaaatttcttgcaagaatcttttataaggactggcagtctcttattggttcgacttaatcaaatggtctctaatcctgacatcattcatttccaatttggactgaggtttgaaatttatgggtttatatgggcaggctatatgtttgggacattctggtgttgaggattctggagaataaatttatgaaccagattgggacatctctacaaaagaaagataatcccaacttttggatgaaatttatcaaaccagaggcttgaggaatataataaacctcaattatagctaaacccataaaatcacccaggagatacgaaccctaattgttaaaccaagtgatttaatgaaatgtgagacaaatcataactcaaataaaagcaaagggagaacgagatacttactatacgaagtcaaaaagctggatgttggagacttctgcaaatggagacgcgatggccggcgggataagttttttgaacatcagtattcgaaaagcaagtatgaatatatttgtaggaagaatgtcaaagataatgatggcatgcacagattcagaaagctcgactggaagtttcagaaagcttaagtttttttggagaagatgaaaatggcaaaaaatttaattcttaccattttatactctatatttttcaaccatcagatcataataagaaagatctaatggatgaaaatagaagagaattggagaagacagtccattaatgctattgatgtgtattggaaccataaaactgccaaaatcaaagacatgcattttttcaaaagggattatgacaaatatac

SEQ ID NO: 310857 - DNA, 1294 bp, Cannabis indica
ttgacattcaaattattcagaattttttaaaaatttacaagttgtcctaaataattataattaggggtgtgcataaatcgatgcaatccaatgagaaccgaccgatccaattacaactgaccgtcaaacattggatatccaattgtgatctattcagattggatgttatttttaaatatccaattggattggatcagatggtggatggggtgtctaaaaatacaatacatccaacatccaatcaaactaatttgtatttttatttagtttggatgagtaattagattttatattgttatacgttaaatctatatgtatatatgaaaattaacattaaaattttactctttttttcttggatttagtggattcagtccaatccaatacatattagatctaaaatattagatgtatccgatccgattcaaaaaatactatgtctaaaatattgtataaaccaaaatcaaaccaataaatatatatgaattggatgttggattgattgaatgacttaaattgattgaatcagattggatggtaaaatctaacatacaatttatgattggatcgaatctgaataggcttaaaaatattggatgtgatctaatgaacactcccaaatttataacacacacaatcattaaaaaagttatattaattttttttttaaatgtctgaaacagataaaatagtaatatagacatacctaataatactacgcgactctttaaattttaactattgaatgatttagtaaactgtattaaagtaaatcttaaggaaagtgataatatagagctttactacatttcttgtactttaatctcaagcctaaacgggtccaatctcatcactattttaaggccatatttctaagcaataccacactaaatttttcatcatgatcaacaccaaattcttttttcaaaaaaaatttatgtgatcaacaaactttgatgggatttatttgatcttcaaatcacaattcctttctcttaaatatcactgaaaataaaccaaaattctccttcatttcttaacataccaccttcatattagagttctttctttctttcatttctcaactcccacttttgttgcatcatatatatatatatattttagttttactcttctcttcatctatatttcttcaactttgatcaacctaataagtaataattgatattgataacactttcattttactagttttccttcaaaattattatagcttgagtaatttaacttgtaaaaataaagttagtgtcattgaaaagaaaaagaaagtgaa

SEQ ID NO: 310858 - DNA, 1560 bp, Cannabis indica
agatactccgacaggggtactttttgccaataatgatcaaagacttgaaggactatgtcaaaatatgtcacaagtcccagagattttcgaaaattcaaagggctccacccaacgatctcacggtgatgcagtctccttggcccttcgcagtgtgggggatagacctaattggtcaactcccaaagggtaaaggagtacagtttgctgttgtcgcagtagactacttcaccaaatggacaaaagttgaacccctagcaataatcacctccaagaaggtccttgactttgttgtcaagaacatcatattcaaattcggatttccccagaagattatgttagacaacgacaagtagtttgatagtgacatgttcattaatttctgcaactgacatggcatcatcaagagcttctctatcgtggcccatcctcaagcaaatgggcaggtagaatctatcaacaaaaccctcaaggaaactctaaagaaatgccttgaggaagcaaaaggcaacttgcctaagttgctaccagaggtcttatggtcacataggactattgagaagacgaccactgggcaaactccattagctctagcttatagatacaaagcgatgttgcctctagagctactactactgtcttacaaaagaacaacctatgaccaacaaataagccaacctatgacaaacttgcctaagtcccttgacgaagtagaagagaaaagaaaacaagccaacctaaagttgtaagctttccaacaaaaggtagcaatgcacttcaacaaacaagtcaagagtagattcataggagacttggtgcttcgaatggtgttcctgaacactaaagactcaataacaggagtgtttagacctacctaggaaagcccctatcaagttatcgagatatctagtaagggagcctacaagctgcgaagctacaacgagaacatgtagctcgttctcctaccaagatattggaatggagagcaccttcgcatatactatgagtaactagcttataaaacactagtccaagtagtaggagttctaccaacttaacattagagtacaaaagtgctagtacgcacgacgtttttggcatggtgtcccaccgttcttcaatggtggcctctactttgttaggcaagtaggggtagccacttgacatctagaagctaaatctgtgtaatgtaagcttgtagattcaatttatgtaagttgcacagtaacaaacaccaattaatgaataaataacaatgtttatattctatttattgtgtctaaacaacttgctcaaagattaacttcttaaagttattcttttagttccacgtgtgtaccatggataacaccctaagaaagaacccaggcaatgtctatgaaacttggtgaatggcaagtgaccaagagacttatctacatggtgacttgggggcacccatattgtacaagggatcgaactagcacaaggaacttatgcagagaaattttaatgcttagaataagctactaaacctgcctctaagtctgcaggcatacttcagcttggcaaattaaatttgga

SEQ ID NO: 310859 - DNA, 723 bp, Cannabis indica
aatatttggtgataaatcaagcacgtttggtacatatttgtctgaactcgttagtgattttattttgataattgtgattttgggtgattggaaaagaataatgaagaatcttgaaaatttcaagactacggtaaaactactaagtttggatgatgatgagaattactcaaactccattattttgtatctgtgatccaattaacaaaaacaatagtgaaaaagaataagtttttatacaaaccaggggagttattaagttataatggggacatagaatttgagctgcttcatgaagttattttttgttatcctgagatgaatgtgctttttatagatgatcaatacatatcataaggatcctatcttgatgattacttgtggaacaaaatgaactcttttgatttgaagatgaatgagttgatagtgcaaatgttttcggtgtctgcttgatataaagaaaacaaaaattcttgaagaaacaatagatgaaggaatttgaaacatatggaacaaaattgatcttaactctgttagggttataaaatacttaaagaaatatataaatcacagatctaaacatattcctaaagtgctttaatatagaaaaccctaaatcataaatctataaagcctttgctaaattaaagaagaagaagatgataaaagatcagcggaagcactaacctgaagccattgttggagattgcagagaaggttttgatc

SEQ ID NO: 310860 - DNA, 2505 bp, Cannabis indica
aaatataatgagtgctgcattcccttagggattaaagaaccctcacatctcgtcatacgatgggactacagattcggtcgcacagttgaataattttaacactatcatgcaagcaagcaatgttacgaataatctaggatgtattttattccctactcactagttggggaagcgagtagctggttcaacaaatttacccatcattcaatcacctcttaggaacagctgtctaaacactttaagaagcagttccaggcagcaagagatagacgactcgaatcatcttctcttactaatatgaagtagtagccaagtgagacacttaaggcctacctaagtcatttcagtacagctgttgcaagagtgagaaatttgaacgacagtatctagcttactgccctccaggcagggatctcgactgatcccttgactgcgggaggcaggctttgggatgacatacagggttgcctagtgaagaacattagtgagttcaatgagagggctcaagtgtttgtttgaaaagaggaagcaagaaaagagatgaagttgttaaagactagctcgcgaagtaaacccagcactatctcgacaagtaccgtgtcgacaaaagctgacaatctaggaggctctaagaggaaagatgactccaagatatcaaccaaggacaagaagaaacagaagaggcacgacaagttcgtgccaatctacaccatttatactgagcttaataatactcaggaaaatatctatctcgcacatgagcagagggtcgcattttgtaaacctgagcccatgaggcatgcgagacacaaaagagatgcaactaaattttgtaagtatcacaaggacatcaggcatacgacagatgaatgtcttcagctaaaagacgagatagaaagtcttatagcacgaggacacttccgacaatatgtgaaacgataaggtgatggaaataaccagccaaatctgcctaataacccaggcaactagggattacaacctcttcctctcaagggagaggatattctggttatctctagagggccacatatttctggggaaagtaataatgcccagaaaaggtatgtaaaggaggttaagaacacgaagtctgcttttgctctggaaccttctaagaaagcaaggacggacgaacctccaattgtgttctcgaaggaggatgcaaagcacgtgaggtatcctcccatcgacccaatagtaattaccatccagcttgccaacaaaagaataaaaaagggtgctggtggacaacagaagttcagtaaatatcctttataaggatacattgaagaaaatgggacttgagaaagctaagttaaaatcttgcacggtaaatctttgtggatttataggcgacagtgtcgccagtcaaggaatattgagctcccaattattgtgggtgaagagcctttatccaccacaataatgcaggactttcttgttattgacttgccatcaacctacaatatactgctgggtcgaccaacattaattggactatgtccaactagttaattaagcacttatccctaaatttttagacaccggcaagtgtgggagtagtgcgaggtgaccaaatgctggctcgcgaatgctaccgcatagagctgcggaatagaaaggccagtaactagctaatgacagtcatgactgaggaaggcaagaagaaggatgaagatcttgatactcaaatttgatgaaaggaatttattgaaaccgatcaagtaattggaagaggttgttctagatccaagaaatcccataaagtgtgtattcatctggaagaacctggatgaacaattgaaatagcaactaataagtttttttggggtggaccaggatcagttcgcctggagccacgaatatatgatagggattgaccctatgattatctgccaccacttgaatgtcgacccatatcactcagccaagagacagaagagacgacccttggattttgagagacaatgagcattcaaacaggaagtggataagttgttggctaacgacatcatacgggaggcattttatccctcgtggatatccaaccctgttctggtcccaaaaccaaatggaactttgagaacttgtattgacatttcaaacttaaataaggcgtgtccaaggattgctttccactaccaaggattgaccctttagtggacggaactgctggacacgagcttatgtcattcatggatgcatattctggatataaccagataaaaatgcatgtccctgacaaagaacatacaagcttcgtaaccaacatgggactttattgttataaagtcatgccgtttcgtttgaaaatgttgaggctacatatcagcgatttgtgaatgaaatatttgtgagacaaataggaagaaacatggaagtctatgttgatgatatgttggtgaagtcgataaagagtggaatgttgggttttatgccttaaataaaactccatttcaatgtaatccattttattcaacatca

SEQ ID NO: 310861 - DNA, 772 bp, Cannabis indica
tattcatttcgttttttttttttgctgtagtctgagaaaactaactggatgtaaaaggtttcttacaccaattacgaatcagaaatagatctatttgttttgatatgcttttatttttattttttgaacagatatgaagctttccacattttgaatgcttcaaaaaaacctatagattttttttatttaatgcttatttttttttgtaatacagagatctgtttatctatttattcttcctcttcatttagaaattgacaaaaatggcaactgaagttttgtgtaatcaaaatctttattgtttgtggggttcaggatttttgggttcttatcctttatagagaaagaaaaacaaaacaattcgtttaaagccggcaatttttgactttatttacttatacatattttaaaaaatcccaaacgaattttttattttttgtaatccaattaaaatttgtcttgatcgttttttatttggattcagatcagtgctcataagaaaataaatatagagaagaaggttagaatttgtctaaatttggattgtttttttgttaatgggtttcgtttatttcaatcaaaatcaatgatgaaatagtcaaatcactttgatttttttttcttttttggttatgtttctctgtttgctgtcactagaaaaaccgaatttttcgtatgaattttcttttaattctttctgaataggtttctgagggacttggttcttggatatggagaaacttttggtctggaaattttcatactgagaccc

SEQ ID NO: 310862 - DNA, 607 bp, Cannabis indica
aagaaatgccgttagatagacacttttaatatataaagatatgccataaaatattaaaacgcttgtgataaaataactgccatatttattaaagtttttcaaaaattcacacatttgctgtaatttccacaattatgaaaggaaggattgggcttatttttattgggctttaaaaattaagagcccagtttaatttagaccatttcatttggttttactccatgcatatactataataaaacaactttttcaagaaactaataaacttataagatcatctccaatataaattttataacaaatattttagcgtaaaatgattttattatgttatatttagctctaattttataattgtacttcaatgtttaaggtacaaaatataaaaatatatatattttttttgttatttttatacttttactgttataactttttttatatttttattgtaccaagttttacttttgataaaatttgaaaatgatgtgtttcagtaaaataataaaacaattaagaaaactaaaaaataaataccatgacttgaacaaggtattacacctttgtccaaaagcttatttccccctatctctaagcactaagggaa

SEQ ID NO: 310863 - DNA, 861 bp, Cannabis indica
attccgctgcacccaatgtaagctttcttaaactttatatgtgtttaatttatcgttttagaaagttcttatttagggtgttaataaacatacttgtgagtagatctaagatcctggtaaaataatttccaacagtatattgtctgaccaggtgttgctgatactcttcctgttggccatccaagttctggtaactttgatatcccaatagctgtccttgccaatactgttgcacgacacacatcaatattcgtccaaaagaaggatgatggcccacacaaagcagacgatgcggaaagtaaatgcgtctgatcctcaagtggcccagcttgccacattaccaagtgccgagcaagatctgcccgttgttgaggaggaggatcacgagggggacattgaagtccatgagatagaggagcagaacgacatccgccctgatagtccttctgaagccgaggaggaaggagtggccggacctccaaattttggaaggtataatgaggccggagagctagtatccgcggagggtgacatcttggtcgagggggaagactatgtcatcgaggagtttacagaggcagtcccccgcaggaggcaaaatggtttatgggccatatgggtgtgccctccgtccaaaataagcgaggggcgtatgagggacctggataaagttaggtatctagggggacttgtgtgttacctcccttctttgaatcaccaggcaactaacccaaagaagaggttttgtgcctggtcgggtgcccacactaaacaaggggtgattctgcctttgcacccgcacttcaagaaggttgcgaatattttgcctttgtcgacccagttcactcccaagagcattaa

SEQ ID NO: 310864 - DNA, 807 bp, Cannabis indica
taagagccattcattccgtgggtgtaagggcccaatggagacttgaagcaaaaacgttacaatcagtactcttttttctttaaagaaatgctaaaacagttaagcacaaaggtgacgtattactgttggtgcaatttatatcgggtgctacatattttaacttaataaataatatatgctaactaaaaacaatgcgctacacgagattatattggaccttaagatgtttaatagcaatactctttttctttatctgtattcgcaaatatcaacttaaaccttgatgaacttcaaaacaatatacttgtaacttacaatgtatatagttgaattatgataaaacaaatacaactttatcatagaattggaatttgtaatcttacatatataataaaataggtctcttactcaaactattatttttcatagtgataattaatgagtaagaatactctctttctcgaacggttaaacacacaagtttttatttcatgaaaagcatatgcatggctactgaatggcaccacctctatggttagttccatattcatctttagcagcatactcattactatcgcggctgccgctgccaccgccatcttctcctccggtaccaccattgactcctctagtactacctcctttgccgactacactttcggttgtgctccgagcactgcgtccatattgtcttgcaccattaattccacgtccatagcctcttgcggcactagtacttatgccatgagtatcaaagagagctctagaggcataagtaccaattaccaaacccaataaaacaaacaa

SEQ ID NO: 310865 - DNA, 681 bp, Cannabis indica
catttaagccatcttcaactgtgtagtcccatacctacactgtctcagaatcatcccacttgaacttccccaggcagtgtgggattgcacaacttacccggtattttcccttacagatcacgggactactgactatcacaggaacaacatcagccccctcaacaagttgattaatgacataaatgggaagtttactctaaatgacttggttctctccactactttctttgcatagaagcctaccaatattctataggcctttttctatcccaaaccaagtatatcaaagacttgctcaatcgtgttcatatggagggtgtagagggctgttccactcctgcaaaatcgagacatacattgtctacgagtgagggggaaccattgcctgatgtcttcacttacaaaagcacagttagagccctgcaatacttaactatcacaaggctcaacattacatacatcatatccaagcttagtcaatttctttaagcaccaacatctaaactttcgaaatcttgtaaacgagtgttgagatacctcaaggaaaccattgttggaaatattttaccaggatctagatttactaacaagtatgtttcattcacatcctaatatgaattctaaaacaatgaaataaacacatataaagtttaggaaaccctacattgggtgcagcggaat

SEQ ID NO: 310866 - DNA, 1036 bp, Cannabis indica
ctggtaaaatatatccaacagggcagtacttgggtaatccttttgtgttttcaagaaaaaaaatacaagattttaattttataaaggacaaactcaagaaaagattggaagggtggagatgaagactttgccatatgtgggagacttgcgtctattaatttggtggctcttgctaccccactttaatctatgtccacgttaaagatcccaattaccctttgtaactagttgaattccctggttcgtagattttgatggactagggatgtcgagaaaacgcgtttcttggcaactaagaattgagagaatctttgccagccaaaacagagaggtggattggggtttaaatgtccacgtttaagatcccgactatcctttgtaactagttagattccctggttcgtagattttggtggacaaggggtgtcgagaaaacgcgtttcttggcgactaagaatttggagaatcttgccagccaaaacagagaggtggatttgggtttaaaaggtttgaggattttaatcgtgtgttgattgggaaattagcttgggagatggcttctaatgtgaataagtcgtgggtgaaagttctccaagccaagtattgttcttgggactcattttggagtgttcaatctaaaagctctgattctatgatttagagaggggttttggaagcttataagcttatcctggaagggtcttgcatgatcttagggaatggaatagatgttggtatatgttggcagtcgtggaatccctggctcaattatggtgaattcagggagatcatggacatgattcgactcaaggcctcccatttgaggaatgtggcaaaccttatggatagatcttgtgacagtcagtagtcccgtgatccataaggggaaatatcgggtaagctgtgcaatcccacatcgcttggggaaagtcaagtgggatgattctaagactatgtaggtatgggactgcacagttgaagatggcttaaattgattgattgatactacctatatcaacaaggtgcatcttgtttt

SEQ ID NO: 310867 - DNA, 1102 bp, Cannabis indica
aacacatttgtatttgttgtttctagaatcatgttcaaatcctatattgggaaaataatcttctttaacattttttggttttgggagaaccatgaattctttcaaagtaggattacataacaccatagcctcgagatcataattatccagcaaaaggagtccatcacagtgatgcatggtaccaaaaagtggtacgtgattaatttccaaaagtggtatactcagatgactcagatttgctgtgacagttctaaaatgttccttcttgccatcatcatcagcatcatcatcgtttatagtgagcaatgggtatttcactaagcgatagtcagggggggaagggtcttcgcaacaaattaaggatatagaaggctggtttttggtaatgagaaggtgtttggccacaaattttggatcattgatgaaagtggaaataaaagaataccaaaacttgttcacagatttacactctaccagagaatctgcaggtaccaacaacatgattttctccacaacttcacttggcaaatcacaaaatctcaccatttctgccatgaatgatcaaactaagcttttaatcaaaaactaaatatacttaaatttcagaacttccaatatccaaaaaaaaaaaaatgaaaattgagaaaatgataataaatttagaaatgggtggctgaccttaatttgtgtatattaagctcttcctcttcttcttttcaatctggttttttttttgccctaacaaataaaaacaaaaatgcaagtaatgaacaagggtatgaacttgaatgaattgatgtaaatgaaatttgaatcaagggtactcactgattacttgtcttcttttcttgaagagcaatagcagaagtgagaagaaatatttctcaaaacaaatacaattcttagtggaagctttgattaaaacacatgaatcaatcaagaaacagcatcattgctagtatgaactcaagaaatagaaattaaaaataaaatcacttgaacaagaagctccaacctggaatttagatgaaactgaataaggagtttggtttcaaaaaaaaatttggaccatttctcgatttgtgcgtgtcatccttgcgca

SEQ ID NO: 310868 - DNA, 534 bp, Cannabis indica
aaaaaagttaaaaaaaattaatatatatttgagtttcagatgaattcaagtgtaattcgatttttttttaagtttcagattaatgaaacctgaacctaaccatgtagttaactgggtgtaatccgaacttgacctctaacttttgattttttttttaaagtttcgggccaagtaaatttgtcaaataggtgagtttttgaatcaaaatattcagcctttaacttaaaagtacaaaataacaatacacttggtcttgtacacttgcttttgtgtaattatcatttcaacttttataaatatacacaattcaataaaaatattattattaattgttgttatcgcaaaagtgatttattttataaaaaaactgttacatgaaagggtaaagggactaattaggaattgttagtattgtctagttagtataaatatgtaatactattttacaaatgggggatcaatgaatgaaatgagagaaaattaaaattattcctattggagtttggcactgactcgaagagtgcaatttgatac

SEQ ID NO: 310869 - DNA, 1483 bp, Cannabis indica
gctaggatttctgcagagtaggttgatcattgcagatgttttcttccctgttaaggtttcttcatgcaggtatttctctaattttatctatttaagggtctgggtcttctggtgctctttacttttctgcttgattctcttttctttctctgagtattactaggagtttcgtttgattttcttgtcttcggtcatggagggtattgctgataatatggctaatgtgctgtctctcactgagagagaagctgctgttcatgagcatcttgatgatgtgggagggggtgttgagcttgggaaatctttctgtttggtttttagggtctttactactaggaacattaagattgagtggtttgaggaagctatgagaaatgcgtggatcactcgtgcttccatcattttctctgagtatggtaatgggatgttcatggttgagtttgggtgtgagggggacatgaagagagttattgaaggtcaaccgtggcattttgatcattcccttgtcactagtgccaaccctgctggacttgacacccttcttcccaaccaaattagatattctcccttttggatccaagttcattccattccttttggcatgaagtcttacaaactggccaaaatgattggagatgaagttggagacttccttgaggctgataaaatgactctctttaaagcttctggtttattccttcgaatctgtgtcttacttgatgtttacaagcctattcctagaggtatcttaattgactttaggaacatccataaggaaaaatggcgcaactttaagtatgaaaacctacccaacatctgttttcactgtggcatgttcgaccacaccctcacaaagtgtgtctcctatctcaagaaatgtgatgagtttgcctacccacctcctttatgaattgccaatctctcaaggacaagttgatcaaagtcttgcagctgctgtgaatcagtttctcaccacccaagatgcagaggctggttcttcttcttctgatgctattcctaggactgatggggctgtttcatctggctttgttgggaacagtcctattccttctcctgaactctcaacttttaagagacataccattgctacagctttcaaccctggctttacttgtcctgctcctgttgatgccttctgtgatgtcacccaagccgcttttcctactcctgccactgctgtgcacaccattgctgagcctgattctgagactgctcaggatatggcaaggaccactgagaagtccaagggcaaagccgttgctggcgctaaacggtctgcctttgtcccccactctgttatggtgggagactctctcagaaacatcctcaaaagagctcgtgctagacctgtgatcaatgaagcttccaatgctgctgattcctcttttcaacaggcgggtgttgctggtgttgctcagcaacacccgcccagaaaaatgagtcttatgagttggaatgcccg

SEQ ID NO: 310870 - DNA, 863 bp, Cannabis indica
taaattacgctttatttactcatttaataaattctcaccaattaccctaagtaagatcataatcttgcttcattaccaaaacaactacatatttaataaaatatatccaattcaataatatattaatttctgggatattacatttatagagtccgacgacaatacattacccaattatttaaaactgttaggaaattcactttgttttagtattgaactaagctcgtttctctcaaaactactagttgagaatcttttgacaatcttaggaattgttttctgttcttcaatgattcctagcgtgagtaggaatttcaaatggagttccacaattaaagataaataggaaggaacagagaaaagttatcaaatttctctctctatatatatatatctatctatctttctcattctcttatcttactttttaaatttaaatttaaattaactccttattggcaaaggaatagaggatatcaattgctataaataaaagatttctctaatcacattttccatatgctttaaacgcctattagagagacccgagattctaagaattcgatctacttctatttgttcttcaagtatttttcaaattcaggtaaaattttaaaattctcgaatttaatttcttctcattttgtaaagctcagtttacgaattctagatctagtttaaaatccttaaacaccattgataaggcctcaaaaaatgtaaaatacgattttcatgtgagacgtttgagctgaaactctcccttcttgcaaggggcaatttgtctaattttaccttaacaaaactgaatagagctcatttgactcaaattatctatttctttatttatttatctatatttgtaa

SEQ ID NO: 310871 - DNA, 878 bp, Cannabis indica
aaaataatttccaacagaatatagcaaacatctatcctccccatatacacccaaaaatttcgaacctcggtcaaaattggaaatgaattattccaggattgaagatcatccgatcaaaccaaaccaagaagagacggtcaatcattataggcgattcttacaagagattttcgaaggtaagaatcattctttctgaattttggcctggtctgaactcatcctttttttaaaacttttattccatttacaaaaccaatatttttacccagcgtcactgatcttttgcctttgtcttcgcatgaatggacgtagattttgagagcatgttcaaaagtcctccccaagccgacaagagatctaggaagaaggtagcccaagctatgaggtctcagattccgctaaagaacctcaatggaccaagactaaggccttcacgaggacatcctcgaacaagcttatcattgatgctgacaagtctcgcgaggcagggaatgaggtctctactgtgggcattgacgtctttgctgcggggactgaggtctatgctgcagtggttatcgaggagcaacctaccgggtcggcacactaggtaaagttatgtggttctcttctgaagatggttctccttgagccctcttgccccctaccccttgaagttgggactgaggggtttcaactgagctcgcaacatgccaccaacaattggcgcaacctctggacactcaggtctcgcgattgggatcctgctattcgcgacaacactgaggatctgaccaaaagaaggcaaactagaagcgcgaactgagatttgcatgtttgtcggaaattctcaggagactagaggtggaatattttatagtcacaaggataataaagtg

SEQ ID NO: 310872 - DNA, 501 bp, Cannabis indica
ggcacaaaacccaacaatacatttcaatctagagtcgtagcttgactctgcttgtgggttaatttattaacttgattgggcctgcttgggctgatattgggccttggaagtgtacacgtcatcaatctagaaatacaaaaacatttacccccaagccttcggggctcgagactcacgaaggcttgctgcctacttctggattcattgttggatgcgaaactatgaataggtgcaaactcttagaattccagagaaatgagtggcggaggctcgcaatcttttcatcttcctggagtagggtacacgtgtagtgaatctcttggcccgtgcacaatacgcaccttgcaaaagcacatgaagcttggagatgcgagatgacagttggtttatgttagtgggattttttaggtaactgtcatcattaaatgtagcggtgttcacggattggtttggtccggattttcatattttttgaactaaaccaacgtagcggttttttga

SEQ ID NO: 310873 - DNA, 1488 bp, Cannabis indica
ttaaacaacatacttgtgagtagatctaagatcctggtaaaataaattccaacagtttgaccttttgaatttgttcttgactagtttttcttgtatccattagaactattctaatttcccttctattctttcttgggatatttttctttcataattagtaaaccctttccactactttctcctttctcaccaccttttttcttctgaatttccttggagttaaagacaaccttcatttctgtcatggtcaggttgtccttcccacacagaattgtatctacaaaatgttcatacattttaggaagtgagctgagctggcatggtcttcatcatcaatcttgacaccaagattgttaagatccaatatgatcttattgaaatcatttatttctcagttctctagtttcatccattcgaagagtgtataatctcttcttgagatacaatttattggctaaggatctcttcatatcaatggaagatattttgttccatagcccgagtgccttttcttcattaaacactttccttagcacttcatctctaagactaagaagaatggaactatgttggcttaaacttcttcttcttgtcttctactaggttcatggcttcctcatctttagcttcatagattcctcgatgcacaaggaatactcacatctttattctccatagtctgaagtcattattgccattgaacttgtccaccttgaatattgaagattccatctggttcttatagttcttgattgtttgaatatgaatcttgaaggtttgaatgcaaatcttgaaacctcttcttggaatcttggctctgataccatttgtagtgaatcaatcactataaaaaaatactattgttatgaattaacagtgaaataagatcacatatgaataatgaacacaaaataaaattaaaaacttaaaccataaaacataaaccaaagcaatcaacttagcttgatttgatgacaaaattaatagttttattgaattggatcaataatgtaaagttggagcacacaactctactatacaagttgcaaagtgaagaattatataattctcacgcttatttcttctaatcaaatacatggaagtagttgtacacccccctcctctctctcaaagtgttttctttaatagagaacacatctaattctcgtttagaattcttttgagttgatgtcgagccaatggtgtggagtcttgtatttacaagcattggtttagagttgatccgagatgaatagagactaactaacttaactaacaccttgtcatactagatttagtaatacattatgtggacaatgagttagtgagccaaatcccaaccatgtcccaaccatgtctttagttattatttattattattttttggggcttatttatttttacacttaaaaataattttttttttatatttttacaaaattctacgtaaaaacccttattgcaactagcgctgcaacttaaattgta

SEQ ID NO: 310874 - DNA, 1628 bp, Cannabis indica
tttctccttcggaccctcggctgtatattcttgatgtccttaccaaaacatccttaccaagaggttactttagcataaaaaagcttgttttcttgatctcaaaaagggcaaggaaatgaaattgatagaaccagtaccactaggtatgacaagctctcttattgacgtccacgctggtggcaaccaaagaccagttgcatccatatttgtagatactcgatcacataagttctataaaccattgttggaaaggctcgacttcaaagccgtacgtggagtatccattcctgtcctaggacaaggaacggaatgcatgttgctacctttttccatcctcttgaaaagtaggttgccatcagcccataagcgggaaggaatgcaatctcttttttcctagagtgagaaaaccattcctttctccagtaaagggtccaacccaccttcaaatccaaaccccatcaagatttttcatcctttttccacatctaatttggaggatcttcgggataaataagtgttgtagccctagtttgttagcattccaccccttcaaacttggttacaccaaaagtcctcatttcaacgagaaactctattctgccttcaccacacgttcctaagcacttactgagtcatgttatccatgtactgcccaggatcgcgaaccttttgtacacaaattttagggaatttagctagcctatatctcatctctagctttcaaggtcagttttctatgcttggctcaggttagaactctatcgggattattcaggcttcaaatcccccagcattgaagcaatatatgcgagtgagtcgacatgcctattctctgcttgggggagagtcggtagagacccgttgttctcctcatagtctagggctcaacgaaatagaaagtattagcattaagaaacttcttggggttcgcagtgcaagacatatcaggtttttattttttctatgatgaagttattttccacttcaacatgcttaattcgaccatgaagcaccagattttgagcaattagaattgtagcttaattatcgcagtttatatttgtaggtgatacttataatgactttagctcttcaagtaatctccttatccacaaaatttcacatataccatgagccactgccctaaactcagcttcactgctacttctcgctacaatattctgcatcttactgtgccatgtgaccaaattaccatttacaaacgtgtagtagcctgaggtagaccgttgatctataatgcttccaacccaatcaacattagtataggcttcgatttttaaatgcccctgtactttgaataagaggcctcttcctgatttccctttgagatatcttagaattttacaaacaacatcaaagtgttctgaacatggtgaatgcataaattgactaaccatactcatagaaaatgttatataaggacgagtgtgagataaataaataagtctttcaacaaatctctgataacgctcctatccttcacattaactgactatgtaggttgtagtttgatgttgggttcaatatgcgtttaagtaggtttgcaacctagcatacatgtctcccttaataaattaattcagaacatacttacgctgacttacaaa

SEQ ID NO: 310875 - DNA, 1042 bp, Cannabis indica
cctttaaagacaatacttgatagagttgtaatcttgagaacgaaaaatctgacaaataaaaataaattatattttcttcataatcttcccaaacaattatttatgatactgaattatacaactttttgtggtaatgagaagggaataccttagtaacaaaaatacccttaggagcaagcaaatgagtggacaacttaacaacatcaatgaccaaagcattctgaacagtggcttccatagcccaagcacggcccatattgggggcaccataatgaagaaccaaatcaaaggcagagcactcatacttcctcatcaccctttttgatctccgacttgcattggggtttagtgatgtcttgctgaataaaaatagcgcatgggattggtttaaccaaaatgcaaatccacacacacaaccaggcttccacgtaggcaccctccgagtggctatctgagtcctaaccacttggagaagtacagagatcgagaacaccctctgtcttgcgaaataatccatacaaaagtttctctctcgagtcaattttatgtaaatctccttcttacgcctttgactctctatacccattgattgaatgaattgatcaacaacaacaacacatcctgcatttttttttcgaaatgttacgtaaattattactataaaaccaaaaataataataaaaaagaaattgtaaacatgtcacaaagacacagacatgtatatttatatctcactcatatacagtaataaatcacaaaagagagagtcttcatcacacgaatcgagaagtgagtgaagaagatcaaatgcaattatatatatggaacactttttaataggtattaccatgaattattacttaacaaatttaactttaaatattaattttaaaaatatcaaactattgaattttgatctaataacgaataatgaaatcacaaatttgaatttttatgtttaatttaacactacttaattaagaaaaaaaatcaaaaaaatatgtctttttaccttatatcaaaaatatgttcatacaaaaat

SEQ ID NO: 310876 - DNA, 2478 bp, Cannabis indica
gatgacaccgaagataataatcctttaagaaggaatcaatcatcgcctacagaaaagaaccattgagtcctcagggatctattgagccatcgcatgaacagactgcaagacctagaaaaacccagtattggggtacctagcttgacggactttggataaatggcaatcggccacttcctaaccaggttgatgaggatggcgcctacgacccaaacagatacataccaattgtggaattagaaaatcgtaatctgagtcgtcgattggaggaagcaaactggtgtaatgccgagtgacagcatgaaatagcggcagtaagggcaacacaggagaatggtacccaaatgaacctgaccttgggagaagagattcatgaggaaaacctggctgctcgctaaccaaggggcaggggacaatccagagatatactcggaactctcaagagatgcaacctgaggaaactgaggaaattctagagacacagcctgagatacgtggaatatcagacaaaaatcgccaagcctctctttaggctcatcagaaagaaatttgcacaaacccttatagggagaataagtctaatcaaaccttaagaagaaggacaaggtccgaccgcagtcacgacaagagtgatctacgatagcatctaaacttgaagaagcctgaccttcatcaacgactcggttcaaagcaaaaggattcactccatttgcgaatgaacgagttagagaataagttgagaagacatcaagtcacaaaacccaaaagacaaccggggcatggtactgttggagaacttgattcggaagccttaggatcaaagagaaaagacgattccaaaaggctgcccaaggataaaagacccaacaaatataaccctctttatgctgaatataccgagctcaatgaaactcaggaaaatatctacctcacacacgtataggaagtcgtttttagcgagccaaaacccatgaaacatgcgaggcgtaaaagggatccaactaaacggtgtgaatatcatggagatattggtcacaccacggaagagtgtcgtcagctgaaagatgagataaaaggtctcatatcacaaggacactttcaacgatatataaagaggcaggacgatgtccctgatcagctcgatctgcccagtatttcgagcgaccctagattataaccctcctttgtaagagggagggacacctcgattatctcgaaagagagcgagtcgcaagaatataaggggcagttaccccgataaagcaattttgtaaaagaattgtgacaggaatagatatcggctcactatggctgtcatgtcaagctgtcacgtgaaaagctggacgtcaaccagtaacagtcgaagacaaaagtaagaccaggattactttacctggaacatcgggatatgtcagggattgaacctgaatattgaaacaattgtgggagtatgtcagggattgaccctgaacatcataacccgttttctcaaaaccagatgttcctggaagattgataaaataagcgatggtactggggaagttcttttgatattaatgattataaatcacatcatatgaaatattttgaactttagttgtgaacaaaataatcatttttttcaaacaagtaattataaagcataatccctttaaaattacttgaggggcatatatgtgtgattaaccgaaattaatctagaaatacatagtacaatgcaaacccatcattaaaaaaaaattattttttgaaacctttttaataagggccttgacaaaacctttttgacgaaataggggtcaaactgttataactccctgaccaaatatttttgacggaagaggggtcgaatctttataacgccttgatcaaacctttttaacgagaaagagatcaaacaactgtaagttttggtttaaaacctatctgacgagaaaggaaaatcaaacggtacgattagcgcataaagctgaatactaacggcttgcgctaagggaaagtattaaacaagacgtcaaagtgtcttgaaaaatacttaaaccaaacatgtgggtagaaaatttaactactcatgtaagcaatgaaagtatatacaaaatgacaagttcattgaaaatatatttgaatttgcttaaaataagatcatttctgatgatcgtgaggtagaatcaatgatggctcgcagattgagggacgggcagatcagctgctcgcacgtaaagtataaaattaactacttaacattggaggaaaatacaggcaatggaaacccctaataaacttcatgcatgtaattgtttatattgtgaataaaatgcaagcaaacatccgcatattaaaagtttaaaaagcaaagttcgccgtccaaccttaatctgtctttacaaaaaaaagtgagagagtgccaccaagggcaaacaattgtttcggccaaagggccattttctaaaagaaaaaaggaagataaataaaaaccaa

SEQ ID NO: 310877 - DNA, 1309 bp, Cannabis indica
tttttaatttaataattactaaattattaaataaaagcgtaatttaaatatttttattatcttaacaacaaacatcataactaataaaattacccttttattaatttatcttcttctatttttctattttctctaagtataaaaattctcataattaacaactaagcccactaagagattaaaatacattattatattgacattaggtcgattaggtgaggcctgatttgtgagatactcatcatccgtacggtaccatttgatagtgacaggtgggcatgcgctgtcaacagtgtacaatatatgtcatggtagtggacattggacaaaaatatatgtagctttttatgttatccgcctttctcaagtctggtgtaggtccctaattttatgggatttggtattagaggggtgccatgtaagacaacattcggacacctcttcaatcgcctattctggattaccatgtgagagtatcatgatatgttctattaagcatttctttctctgggtgagataaccttctggaatctaaaaatgctcggctttatgaagatctgatctagcttgtcatttgatccgaagtcatggttggactacattgtgggctgacttattggcctaattgggcatgtgaataggcctatcttggttgatttttttaaccttgaaagtacatgtgtcgcctttatggaaacatgtataacatttacccccaagccttcgggactcaagagttgcagaggcttccagttgtcctctggatccccttagtgcgcaggaccatgaaaagcttgtgccctacgaaattccatagcaatgggtcgcggattgtggctgacctttcaatttctatgagtggagtacacatcttgctaatttattacatctgtgcacaccacgcgacttggggaagcgtgttaaatctcgaatcacaaaacgacgcctagtcgcttcaatgaaacttcagaggcaaatgtcatcattaataacactcaaccttttacatggaaatcaatggaaacctttggtattcttggaccgttggatcttaataaatgtgttttctcaaatgcaatatgagtcgtcggatcatgagcatgcggatcactaccttgtatataaatggggcaaaagtcgactagttaccactttttctatttcagccttttgagcacaaattttttgagagaaaaattagaccaataactcagaaattttttttggtgaatgtctgacgtagccactgagtgttgggaagtttttaccatgatctagatttactaacaagtatgttgaattaacatcc

SEQ ID NO: 310878 - DNA, 748 bp, Cannabis indica
ctagccattgctcggttttcataactaaggcctcccagtccctaattctagaatagttcctacagtggtaccaacctatcaccagctacaggatattctactagcaaaattggtattggagcaatatcaatctgtggaagaggaacaacttgagggccttgctgcctcagcctaagaatctcctcattttgttgatgtattttggcctgcagctcagcaagccttttctcccaatcttgtggagcttgtggtggattaatattacccacaccacgagcccgtccaaagtctcttactaagcctcagagatgagggggtttctagtggccttgactaccactagtttcgaccatattatcttaacttcctatattatgctgggtatctatatgatactagcctgcaaacttataagtcagttaaatcatgcagtggtcaacataataaacttaggactccatacatgggatcttagacatgcacataatctaccaatatatcactgacatgttcctatcatacttttattttattataataagctattgtaacatgtaaaggcaactgaaccgtgagtcgaggttatctctgatgatgattgtacatatcttgatggtctttgatagagaacctagcggcacagataccaaaattgtaatacttgacaagtttagccatgctacaatgctttttataattactgtgcaacctttgctaataaaagagtttatcaaaaagtgataaaatt

SEQ ID NO: 310879 - DNA, 1832 bp, Cannabis indica
aaaaaaaaaaaataacaacatattatgcgtatagatgactatattggtaaataaagatggagaaagagtgaatatttatattaaaaaaaaaataaagaaaaagaactaaaaacatatcatgtatatatctgcttttttttgctgttgtttttggtgcagattttttatcctttttaaattttaatgatacacattttcatcaaacaaaaaaatagttataattaatagtatatatatgattagtaatgttttagggttttatataatagtctcttttttttttgttttgttttaagtaattaattaattgttattatatgaaaaataaattagttattattatatgtttgaaaaataaattaagatacgattttgattgatggatacatttgaacaattattcaagtattttgccatcactttatttatacaacaacaacaaaaataatcttataacaatgtagtgttcataataaactaaaaaaataagaatggtataaaaatatagagttcgatattaagttttggctttcatatataataaataaagagaaaattttaggacattattttttttaagtacaaaaaacaaatatttagtgcattcttcaattatataagcgcaaagaaagaatatattatcacataataatttttagttgataccggcaacaatgcattatgagcctttaaaactcataaagtttaaaaattaatggattattattattatgaattatcatgtaagattgttaattaaaaacacacacatatcagtagataattattagaatgaaaattttaaatcaaaataaaaattagataaaaaagattgaaaattacataccttcattaaacttaaaaactgtcatctatcttagaggaaccaattagtagaagaagtatgataatcttagttttaaataatttttaaaatttagggtatatattatctaatcaattaatatttatgaacttaataaaaaattaatattatgagagaattaagaaaagaataaattaaaaagtacatcaaactaattataatgatgaaattcatatcattgtttaatatgaatatgaatgaattaatagtaattgtgtatataaaaactaatatacatattgatgatgatgataatgaattgatgaaagaggaattaacacaacattaaaagcattgataataagaaggtaataaaaaataaataatatataagtttatatctcatttgtagaaattttctcaccattagaccacttcatatacatattcttgcagggaaaatatttcaccaagttggactggcgaccagtaaatctatacatgtataaaattataaaatgttcctctgcctatttattacttatttatagtactacttatactcatacatataataatatatacggtaggatttttattttttaagtgactttggttatgtttttaattttaaaaatagtaatgaatatttataaacttaataaaaattaataaaatgagagaataaatatgattattaaatataagattaatgaattaattaaaaaattaagaaattgagagaattaattcctcattgaagcactatagaacttggaattgaatacactctcagttatatagaacgctctatatgtaccgcgatatagatacgttatgattatccattgttacaatcttaatactcaaggattctctatagatgatctacactgaatagggataaatttatcgttctacccttcaatgtattttatccttaaaacacttagctacctttaaatgatattttagtaaactaatataattactgaaatgagatctc

SEQ ID NO: 310880 - DNA, 1292 bp, Cannabis indica
ggcataaaacccaacactatgaaactatctttcctctcaatcaaggaaatcacaacagaaccatcaaatagacagatttttttctcatataaatccatcatataactatgatcccaatcaaactgatctccccaatgattctcctgctactgctgatatcccaacagataaacacacaacacaacccgttgtacaaaatcaaatcttcaaacaaaaaaaggctgaacatcgattccacctgcccacttacaagactacatatgttatactcaaacaaaagcaccttctacttcttatcccattgctaactacatatcttataagaagttctctaaacaattccaagcagccatccttgcagctcatctcactgaaccaaaatcatacacacaagcttgcaaagaaaagatatagaacaaggcaatggacactgaaattgatgccttagaagccaacaatacctggattgtagtccctcttcctccaagtcaacatgtaatcagtaataaatgggtatatcgcatcaaatataaactagagggctctgttgaatgccttaaagctcgactcctagcaaaaggttacactcagcaacatggagttgattactttgaaacttatgcacctgtagctacgtttaatacactcaaactactattttcacttgctactctcaaaaattggcatctccatcatatgcacattaataatgtgttccttcatggtgacctccatgaagatgtatacatgaaattaccacaaggttatactcccaaaggtattattccaaaaaatgtcgtttgcaaacttaacaaaagtttttatggtctcaaacaggcctctagacaatggtatgccaaactcagtagcaccttactccaacaaaaattcgttcaatcaaagaatgaccattctctgtttatcagatacaaaatagggatcttccttgccttattaatatatgtcgatgacatgatcgttgcaatcaatagtctggaagaattacaacacttcacttccacacttgattctcattttaaactcaaagatctaggcagccttcatttcttccttggcctagaaatagcacgatgcaacaaaggcatatcagtcacacaacagccatttactatgcaactcttacaagaaactggccatcttggcaccaaacctgtttccactcccatggaacccaataataaactcaataacgaatctggaaaactccttaccaacccaacacagtatagaagtttaattggtaaactcatatacttgactataacaagacc

SEQ ID NO: 310881 - DNA, 501 bp, Cannabis indica
atatatatatatatatatgctcaaagaccaaaacatatgccttaattgttttctaaaattctaaagttgatgttgagttagaaaataaaaaccttgcagacagattgggttggggaattcagaacatttactccatttttacaggagcatgggatcttgcagaggcattcttgccccactagacatgaacaaaatagcttagctgagaagaaccataggcacatagtgcagaatggccttagcctactagctcaagcctctatgtccttaaacttttgggatgaggcttttaaaacaactatttacttaaataacagactagcgaaatattttgagtaaaaaattacctatacaagtattatttcatatgaccgcatattatataaccttttgaatttttgggtgcaccatttatcgcaatataagaccttacaatagacacaaatttgatttcaggtcctctccatgtaccttttgttggaatttattttaccaggatct

SEQ ID NO: 310882 - DNA, 795 bp, Cannabis indica
ctaattagttggtaatgggagaaaactggtttgaattaagtttgcaacaaacaaatagccaatcaaattgagttttttttttaatcttaatttgaattaagtttgcaacaaacaaatagccaatcaaattaagttttttttttttaacttcaatgaaaagtttcatatattgtccttttctcgaattgctatgacttttttctcatttttttttgtttcaagtatttgtgtgctctcttcaacaagttgtgtgaccctattgaaaaatcaacagtctttctatggttatgtgcttcaaatcagaattggcgttgtcaaatatgggtgaaagtgtagattcctgcaaggtcgacgatggtgtaactctatccaaagtgggctcttatattgggtcttttagggttggagctgtgttgtgaggtttcacaaataagtggttcatgaatacggtagtatttcaagtttgaatgggtggccaacatttggaatttttgtcacgtatgtgctatgttttattattattattatttggttgcttttttatgttttaatgttttcaataagagtcctattgttatggattcagttagtgcatttctttgtgtggagtgtctatcatctatctttaatagtatgctgttactctctttggcacaattgactcataccactgatttagtggctcattcatgtgacaaaagttgaattcgagaagcttttatgctatggcatagatttaacatcttcatcaacgaaattgttcttatttttttataatatatagatatatatata

SEQ ID NO: 310883 - DNA, 2952 bp, Cannabis indica
ccgcctatgccagggccgggcctacacgtatgcttaatttactttagcttatttttcttttaaaaaaaaatattatatgtgaactcttatgtgtttaatttcattattttagaaatattcatatttaggatgttaatcaacgtacttgttagtaaatttagatcctgataaaatattctcaacagtattttggtaacaataaagtatagacatctattacgaatgcaattgaggatgaatttgattgtaaaaatgtgaatgaagttgaagatcaagtggtaaatgagaatgtgaatgagaaaagtttagatgataattagaatagttttcctcttgacatagatgatccaggaaattggaataaaattgatcataatctgattaattttttagttgaaagaggttgagaaagagtctatgatgtcacatataccaaggatgattttggtagaagtttttcttcaacacattacactagagatttgccaaataaggagaaacaagatagaaagtggttagtatattcagtttctcaaaacaaagtattttgcttttgttgtaagttgttttcaacaaaacatcacgtgggtcattttgctaatgaaggtataaatgattggcataatatttctgaaaggcttagaagtcatgaaaaaaaaaataagcatcacaatatgtctatcgctacttgggtagagttagagaaacggttaaacctaaatcaaacaattgataaaggtttacaagaacaaatcaaccaagaaagggagcattggaaacgtgtattagagagaataattgctattgtgagaagacttggaaaataatttagtatttcgaggaagtagtgaaaagctatatgatgatagcaatgggattgaatttgattcaactatgcaagaacatgtgcatcatattatggcacatgaaactcattatcattatttgagtcacaaaattcaaaatgaaataatacatgtgttggcatgtgaagtgaaaaaatcaatcactttaaagttaaagaagctaaatatttctctgtgctacttgattgtaccccagatgccagtaatgaggagcaaatgtctcttgtattaggatgtgtgaatgtttcagatagtccaatatttgttgatgaatattttatagaattcattaaggtaaatgacacatcaggacttaggctacttatggacttctacatgcattacatactcttgatcttgatgttgataatataagaggacaaggttataaagatctatgaaaggaaaaaataaaggtgtaagaagcagattactagaactaaatcctagagcattttacatcttatgcttgtcattctctaaatcttgtactttctgatatggctaattgttgctccaaggttatgtctttctttggtgtgctacaacgtatatattccttattttcagcttctacaaaaagatggaaagtttttacacttgtgctaggtctcactgttaagtcattgtcagaaacgcgttgggagagtcatgttgaaagtgtttaagcggtaagctttcaagctcctcaaataataattgttttactctacttggcaaatagtaaagaagatgccaaaacaaaaaatgatgctgagactttagcaacatataatattcaaaattttgaatttttgctaagcttggtcatttggtatgatttactatctactaggagtgttcatcaaaccgctcaaactgtctgcaccacaccgcaccgcgaaaaaaatgcagtttgaaattctttgcggtcgtggtttgaattttttctaaaccgcgcggtgcggtgcggtttgcggttttgaattgttaatacgcggttcaaaccgcaccgcaccacaccgcacattataaaaatacaaatttttatatttatttaggtccaatatgtgaatgtccaacccaaaattcacttgtattgttgaaattaatttttttcctttttattttcaagccttatggtatttttcacaagtgttgctcaaactttattgtatttgtgacagttaaattatttggtgataattcaaaccgtaaaaactgcactgcaccgcatgattttttgcggtgcggtttttgcgattttttagtttcgcggtgcaggtgcagtttgtaaaagtggaaaaactgcacgtgcgggttgatttgaaaaaatagtcaaaaaccgcactacccgcaccgcgaacacccctactgtctactgtgaataaggttagcatcgttcttcaaagtgaagatatgcaaatttatgtagctattagacaattgaaaactctcctttcctttctacaaaaatatagagaaactgagtttgaagaagctatggttgcagctacaaagatagtaagtgaaatgaaaattgaacctttgttcattaaaaaacgaacatgtcacagaaagaaacaatttgatgagagtactagcaacgcattcgtacaatcacctgttgattctttcaaaatcaactatttcctctatatatagttgatcaagctatttcttcatttgaatccaagtttgactaaataaatacttatatgaaatgatttattatatgtatagtgtacatatattgataataatatatttttttcgaaaattaagtttgaataatttgagaggtttgaagaaaattttggactttttcttaacttggagaaattaaagcctacaaatggagatagttagaagagattttgtgataatcttaccaatgtaatgagccatggagagatttcaaattttaacaatgatgacctataattacaaatcctacgacataacttgccaaaagaaacaaaaaaggcgattgatttgttgaattatataagaaaagttaatgatagttacccgaatgcttggattgcttatatgagattatgctaacaattcctgtcacggttgctcacgcagaaagaagcttttc

SEQ ID NO: 310884 - DNA, 991 bp, Cannabis indica
ttgtgaagaaaagagattgtagggtttatttgttaattaagagactttgttgagtctaattaataaatatgttaaatggcaagacactcccataaaattttcaacctaatgtaggttagccttagcaaacaacaatgtgtcatcaacatacatcagatgagtaatcgcagggccttgacaagaaatctgaatcccttctaaaagcccagccacctccttgttatataaaagtctagagagaacctcataacaaaaatataaagagacagcgggtcgccttgtctaatacccctataaggatggaaggtcttagtcggacctccattaagaaggatttggaactttaccgatctgatgcagaacttgataagctcgataaaaaagagtcaaagccattagcttgcaacacaacttcaatgaaacaccattctaaccgatcatataccttagacatataacatttcacctcgataaaagctttccttcctttcttcctccgaaagtcatgattcacctcttgagcaataatagagttctctgcaatccacctacccttaacgaaggccgattgatttggagaaattaatttacttaatacctttttgagtctattaatcaaaagcttagagacgatcttatagcaagaattacagaagctaataggacactaattgtcaagacagcagcagcatattggagccaatacatcactttgatttttggtatttatgaaatattgccttagaaataaaacacagccaaaccaatagcaatatattttttaccatcccctgcctaagctcgtattaaaataataataataataataataataataataaataacaacccaaataataagcaaattgtaaaaaccccgcccaacttctattttataagcctcccaatctcaattctcaaagggaaatttgattttttatacttacataatacttaatattttatccctaaactaatacatatcatcatt

SEQ ID NO: 310885 - DNA, 809 bp, Cannabis indica
acaaatatatcttttatttttcgttttttttcctttgataaattaaaaatcccaagataaaattattttaagtcctgtatcatcgcctttggattggcgcataataaaattttggttatattttggtttttgttaataagttaaaagtgcttgtaaatgtgaagacctttgtcttcggtaactataaaaaaattgaaattgtaggcgtccacgtggagacctttgttttcggtttttacataattactgttggggacgatatcatatcatcccgtaatgatggtgaaggattatggttgaacgaatctatcaacacatgattcatatatcaaacacgtattgatatttagtctttttgatatatttacatttctattaatttgcctattcttgtatattccattgtataattttaaatttgtgtaggcttttatatcatggaacgaggtggggacgatgagtggagtgcgtggttggattatgatggtgatgatggtccatccgtgctagaaggatcaagtgttgatcatgaacaaccatccatggaagaaggtagtggtgatcctgaacaaccaacacagaaaaatactcgcgggagaagcaaacgaaacgatataacaaaaatggttagcgagggaaaaaagttggaggttgagtacaacaactacggacaacactggggaaagggagcgatgacaaaacttactcgaattggagcatgggtgcgaactaatattccacttcgagatattacgtggcctagagtgagtcaggaccttaaaaaccaattatgggaacacataaaggta

SEQ ID NO: 310886 - DNA, 999 bp, Cannabis indica
acacaatgatagctcgtgagatagtgcattctttctcaagaaagaaaggcaagagaggattcatgatgatcaagctggatatggaaaaggtgtacgatagaatggaatgggattttctgttaaacgttttgacccacattggattcacttcccccttcacagagtgggtgcaagcttgcatttcggtaaagcagattaggctcctgctcaacggggcagtggttgggaaattcaagccggagaggggcattcgacaaagggatcctctatcccgaccctattcatcattgccgcggaaactctgtcaagactgctccagcggaatgaggaaagggggcggattgagggattcaaaatgggcagacaaggagtgacggtgaaccaccttatgttcgctgatgacgtcatgctttttggccaagcaactatgaaagaaacaaaggctttccgagagtgtctagacttgtattgcctatggtcgggacaaaatattaacatacagaagtcttctatttacttctccaaaggtgtgcaacgggaaaaagtacaagctatatctcagtattggagaatgaggaaaatggctcccgacacgatatacctcggacttcccctcttcggatcaacaaaaagaacagaagattataaacccatagttgataaagtgctcaacagagtccaaggctggaaggccaaaatgctgtcctgtgcggggagggccagcctcatcaaatcagtgggcactacgctagccaattatgttgcgtcttcggatgtcatacgaaaatccacgacccaccgaattgacaaaacgcttagggacttttggtggggtgactcgaaggataaaagagtgctacacccggtagcatgggatacactatgccgccccaaaacacaaaggggtttgggatttagatccatggaagccatcaacaaagcttttctcatgaagtgggtgtggaagatactagaagatgatgctgttggaaattattt

SEQ ID NO: 310887 - DNA, 2546 bp, Cannabis indica
tacatctagacttgtacaagtaaagtcatattcatcctttcagcaacccattctgttggggtatcaaatccaactgtcctatgccttaatatcccattttctctgtaataagaatacaaacaaatcattacaagactccaacccattatcaaatctaagcacctcaatcctcatattagtttgatttttcataaggaaattctaaggaacaaacctttgaagagcgttatttttatgtttgagtagatatataaaccttcctagattaatcatctactacgaataagaaatagacacaatccccatgtgtactgaccttttcaggctccaaaggtcagaatgtacatattctagtatgtgcttagacttatgtgtgacatttttgaacttcaatctatggtgttttccaagaatgcaaaattcacaaaaatctacctttgttaccttatcttttccaagcagtttctcattagttgaagtcccttctcacatatgtggcctaacctcttgtgccatgcggtagcattctcgtcctctggtgtctatgctactgcgtttttgcatttagaattggttcaccatagagatagtacaacccataatttttcaagcctttcatgatgacaataaggcccttgcatagcttgatctgaccaaccttaatcttgcttttcatattcatgtcatcaagcatacttagtgaaatcaaatttcttgctagtttagggacatacctgactctagttagtgatatagtgactcgatcaaacatcttgaagcttacagtaccaacccctttgatttcacaagtctgatttttacttagaatgactttgcctccctaggtttccctaaaatcacaaagtaaggatttattattggtcatgtgaaatgtacaactagaatccattatccaataatcattgaatgtggttgttgccgcataaacctctccactatcatagccatcattttgattggcattttgatagtcttattttggcttattgtctaatatttcccttgacccttctctgttcttgctactctttttccaaaaataacagactctcttgtagtgtcatggttttccatagtgatagcagccattagggtctagagggcctttgttgtttggttttccttcggtgttattgtgatgtcatttattatgtccctgattgttactattatctccctttgattaggtctgcctctgcttaggttcaattccaaattggaatttcctaatttttcattcttcattagttcatttccaaggcttttgactttaatgctaaaatgacctcttcctttattatggatgttctcccatacttgatcgctcttttaacctacctataggattctggtaggaaatttagaatgatgatggcttggtttacatcactcaaggcttcattctcccttgagttagccagctcaatttacaatctaagaaattcatcaagattctgatatgaagttttaaagtgactgattttgtatccaaagattctttccttgagaaagatcttatttgtcgaggatttttgttagaactggtcttctagcttctttcatatttttgcaggggtttcttccttgtcaactaatcagataattacatcagataggttatatataatgaatcttattgatgtttcaagcatctcttcttgttggatcttggttatcacttcaagctattctatagggtcgtccagcactcttagtaatttttgttgagctagcagggatcaaatcttcctcctccgtatcctatagtcttctgaaccatcaaatttatcaatgttagctttgatattactcatgatatcaaaatttaaatcaaatacagattgagttcgagtgtgctcatccaaagggatgtcaaagaattcttcaagattgaattcttgttcttgatctcctccttcttctagaacttcttattttctctatcagtttatgagttgaattttgatgccaagaaccttagttctgatatcactgtaggaattttgatatacacacctacaccaactcacaaaaatgacattagatatacaaaggtcaacttgttgaccttagttatcacacatgctaccaaaatatacaaccatatttgtgacaatattaccacacacgcacaaacctactttactaatcaatttccctttcttgattctagaacaggcttagaaaagaatcaattttaccacattcaagattagcaaaacaatctaacacagttcatgcaggagtgattatcaacaaaattcaaagagaaacaactagatttatagatgtttgcccgcattatttggggtacgtcctctgtcgagctttccacaaggatttcttagtcaatcttattacttcaagccaagattacatcaatgttcatcaattccagccacaatctagcaggcaatcgatctttcactctctctctcaagtttcttttctctcaataatggtgaatctgttggaatttattttaccaggatcttagatctactcacaagtatgttgtttaaaca

SEQ ID NO: 310888 - DNA, 1235 bp, Cannabis indica
aaatttctttgattagcaaagattgcacaataattgaaaaggcactgtagcgtgccttagcattaggcgttacagcttccttgttctttttcttttgagttttaagaggaaaagttaggtttttgcttgaatctttgtgaattggttctgtttaagcttaaggtgtttaagttctaattctgaggttatttctaagttatttaaactctttttaagctgttgttaggtttgaacaaagtttgagcttttaagctcaaacattggtcattcatggtgatttttgttattgttattgttagttaatgatggaatttttggatgaattatgttgtatatggcctgaataggtgttctaaagctctatggaagatttggggtagttttgagtgagaaatgaggttctttgaaattctgcagttaaaaacggtaggttgtttttctagaaacgatctaccgtttttagcaattaggaccaaaaaaatagcctaccattttttggggtgatttacttgaaatctcattttttagtgttttcttgaaatttagtgtattgccacacaatttatcgataaaaaaacttttagttttgagtttaagcccccaaaaagtgatttactgtatcacttaccaattttacatatgttatgacttagggcctataaatcgtcgagcaacagtttccactcaggttgactggcacacctgaatttgaaatcaaagtaagattagtataataattacatatatgaatacatgtttagcgtgcatattagttgccattagaataacatatcagggtattgataaagtgtacatagagatgcactgagataccaacatatatatgttaggcatatcagtagccattagattaacatattaggatattggtgaagtgtacatagaaatgtatttagatataaatatatatatgctagggtttgtcatactaacgttccaaactcagtacgcgtgagacgtgggataggattataattgggtgtatgggcacctagttaaaatctggtttatgtttatgtttatgttataattatacttttcttaccgagtctgtcgactcaaagatattatttatatgtgtaggtaaaggcaaagacaagactagtagtgagcgcaagctaatgaagattgtacataacaggacaattatacctggagtgttcgctcttcgagacaacaagttttattttgatagtcgctaggcgataactttt

SEQ ID NO: 310889 - DNA, 562 bp, Cannabis indica
ataaaatgtatttattattttatggagttgaaatataactcttatcaccaaaaaacatgaacacgtgagctatgaaaatattaagagtttaaggtcaatatttgcgtcgcctttttaattttattttactttttaaataataaaaagtaatacagatggatggtttcatagaatatgctgtaataataataatgatgagtcatggtttagtgagatcagttattgttgtgtcatgatgatgctcatcacatgatgtcacaccccattaattatttactttattataaagttacctattttttcaaaaacaaacaaacaaattaccactgttaaagaggtaaataaattagtacttggcggaaactggttagagtatattggatagtaatatttttaatagaattactttatatgttattttatttttattttttttaaatttatagtttgggttgctctaatagttttttttcggtctatacagattttagttgtcgatttaagttgttcccattagttgctataagggtttctgtgtagaattctataaaaatacaaaaaa

SEQ ID NO: 310890 - DNA, 816 bp, Cannabis indica
tatatatatatatattctatgtaaaatgtatctatgtaatagaatttttggtttaacaatgtttttttgattttatacgttggctttaacaaaatatagtattacttaacataatattctttattatatatatttaaaaaaaaaaaatcgtgtagatatattatataaagaaattactttattgatttaacaaattaaaataaaaaaaatcatgttaatatttttttaaaaacatatttaaattcaaatttaaaatatttagacggatctccccctcctctaaatatatatttaaatggttattacaaagatctttctattctccgaagctaaagccaaaaacgtatccagaaaactagagaagtcaacatcttttcaccttcgtttacaagagctcttgtggcaagtggaccacaaagcaacactcaagtgatcttgaggcctccaccttctctccctttgagcttcaaagaaagcttgttcaattcgctctctctactgactcctccagcgctatcatctttctcttatatcagcccatttagtttctaccattctttaggtttgtattgttactctatatgttcaatatgttgattagatttgggaatttttgttaatattgttattgtatgtgcttggaattataattttaattgtttttatatttgaaatctcattattttcaaaagataatttaatttgtgctattttttataatcagttatgttgatctcaaatttgaccttccgacaacggagtcatatttatgattgaaatcaccacatgtacacaattagaacaaccaaacaaaaa

SEQ ID NO: 310891 - DNA, 514 bp, Cannabis indica
aaagctaacataagaagttaatagtaataattgaagttcaaaagaaatgattaaaaatgaaaatatcccatctaagtaggtccttgtggttcctctttgaaaaacaaataagctaattagtggtacaaatcaacgatttatccttgatcttgacggtagaaatatcagaggtgataccactagagaaagcccccaaacgaagaagacgacaatgccataagatgaattgaaggtcgacaaactacaacaacgcgagactggatgaagttggagctgagtgattgaatataactcttgaataaagagttatttcttacatttttaagcttattaatttagaaaaatagagttgttcgtgaataatttaattaagtttaattattaaattattacttaataatttaaatctattctatataaaatgtgactatataatagaattcttgatttatgagaaattattgagtgacttttttttttaaataaaaaaataacaaattattagatgttggca

SEQ ID NO: 310892 - DNA, 1465 bp, Cannabis indica
aactactcgatctaactttatttttctctttgtgcttgtacatccttccttcaaatcctcctcaccacgagagttttagtctctgtctagaacctttctccctggatcttggagctgaagtttcaaccaaggttttctttctttctctttttttgtactgtacttttctactgtttgtatcttaattatagagtagtgtagtttgttgatcaagctggaagttagttacaaaacagttgtaactaacttttggttctggtcttgtagaggcaaagccacttaggatgaatcttgttttctgttatttgttgttatatgctgatgtggatgaatgtataaggattggttataagtggaatttactcaaaaatttattcctgaattcctcttataacctgttttgatgtaatgtttatttatctctgatattcctagcttgataggtcctactcttagtctctagggtcgattcttaataagttcatacaatgtatgaacttattaagagtcataatttttgtacccatgtctgctgggttatcttcagtaggcaccttttccacttctacttcaccttgattcactttatctcgtataaagtggtatttgatctcaatgtgttttgttttgtcgtgaaacataggatattttaatagaaatatgcagtttcgactgtctgagtatactgtaggtatccctttaagtagcttaagtttagtcattagcccttttagccaaatagattccttgatagcttctgttgtggcaacatttcagcttttgttgttgatagtgccacaacagaccctctattatagtactttgcattttgtctcttatagaccagacctactttagttgtcccaagtaagtatctgaacacccatttcatggccaaccaatgaacttttcctggattttccatgtatttactaagcacactcatagcataacctagattaggtcttctgcttaccataagatacatgacagaccccactgcatttgaatagggtatatctttcatagcttcaactttttttctgttttaaggcattattctttaggtagagtatactggctggttataggttgcttaatagctttcacatccttcatagaatatttgtctaagattttctcaatgtaatcctcctgcctaattatcaacgtccctttatctctgtctcttaagatagatattccaaggatctcggtggcattaccaagatctttcatttcaattctgttttgagtagatttttgaccatgccaaccttagatctttcttggcttataataagcatgtcatctacatacaatagtaggtagatgacatcttttatagagcttcccttgtagtatagacaagtgtcattataactcatgttgaattaatgctttatcataaaagcatcaaactttctattccattgtttgggggcctgtttgagtccatatagag

SEQ ID NO: 310893 - DNA, 1167 bp, Cannabis indica
ctacacgctcgtatactgcataaaaaatacagtttataatcttttatcatgcacttgttgtttgcatttttgccaaactgtccggtgcagtgcagtttacagttttgatcaataattgcgatttaacctacactgcactatatattacaaagttactaacctttacaatataatttttattttttctttcatataaagacaaatatatgtaatatatgtgtattattgttttttagagacaatttattatattgacttgatgattagtatacattgttatgatatttattaccttaaagtttacacatctgacatgacatttacacgtggcataatctaaccagttcttaaacatgacaagaaaaccccgtcctatatggggctgacatccataagttgcaggtggccttccatgaagcttttggctgggccaccaacctgtcagtctgggatggcaagagtaagactttgccaaagtgattccatgagagaagacaagtctcaagagaggcctggtcgggtgatcaatatgtcgggcagaaataatattgtcgggagtaccggacaaggctacgcgagccttgatatcttcttaatgtctgacaaatatctcaaattgaatcctataaactcggatccaataaatctatatgagaataaaggagcttcaacagatcgtaactgcacctcagattataggaatatttactctttgttcactcactacaaaaaaataggcctatctcggcgggcccagccccccgttattgttttatctcaacgggcgcaaaccaccgtgaatttgaatggcgacattgaaaaagagtcattctcgacgggctaggcccgctgagataggtgagcaatctcggcgagctaggccccccatgataggtcattttttattaaaaaaattacagaaattaaaattaacttattcctgccaatattatacatatatgctttaacccaaattttaaaccacaataattttttagagaagtattaatacataattataacaaaaaaatttcaccaaagttttttctttgaattgaatgaacattccaatcaagaaaattccaacaactatactgacattgaaacaaagataaatatctatatatacataaataaattattattaatcatgcataaataaaaaaa

SEQ ID NO: 310894 - DNA, 874 bp, Cannabis indica
taattgatttcattctctgggcgtgaccctttagactaagagtactatttgaaagaacactgataccacgtatgattttctaatgtcaactttttatattatgcactgttattgtaaatttgtattttgtagcaacaagtttctattctattactgtagatcgtagcaatagtgtttttaattactgaagttttataaatatattgacatttacaaaaacacaatttcttagtataagttaatttagttttgtaatcgtttagatattttttttggatatgactccataaccatagactagtagcaattaccataggcggatccacttgagggccaaggtgggctaatgccctccctcaaattccaaaatataaagtaaagatatatatatatatatatatacttgtggtaatactaataaaagtcttctattaattactctctaaaatttgctcaaattgtattctttttatagctttatctgaacgtttaatataacttgattcttttttaaacatttatcatcttaagcattttgtacttttatgcaaagggctagagttcgatggcttaaggcaggcgatcgaaacactaaatttttcacaaacatgcttcttcccataggaaaactaatcgaatcaaatacctaaaaaatgatgagggggtagtggtgaacactcaagagggcattgctgagcttgtcatctcttatttctctgatctcgtcgcctctcaaggtagtgaccttgatgctgctgcctctatctttgaatctttggggcctgagcttgatgagcctgagatttccttccttgctcaagactttactgctgatgaagtcaaaaaagctatcttccaactttctggggacaaa

SEQ ID NO: 310895 - DNA, 969 bp, Cannabis indica
aaattccaacaagagtatcatatcaagattaattagaaaacttcttaaaatgaatcttatgcaattaatttacagattaatagtccacaatcagtgcacacggtgttgactaaatcaatccaaattcaatctgcctagtcaacagatcatcttgtttgtgggctcatgagacagtctaagcgtattatttactgtaaaatccccaatagaaggaaaaagaaaacctaatgtaattctcaaactactataaataccctacgaatcttatgaattaagggttgaactctcttacaaactttgctcaggcaaacttgtgaacatatattttttgtattctcgaagacatttacaagctaaagaactactaaataatactcactcgtggactaaggctaattaatgccccaaccatgtaaaaaaattatttgtctattttactctttatcttttgattatttgttctttagtttttatcatttatattctgttttcaaaaatctcggtaaatattttggtgctttcgttaagagctaaagaaagcagtgagaccacttgaagattacgttcgagtaaccatggctctcacccaaaccaagtctggtctttgttttactgtcctggtgccaaaggtggagactttagtgacccctaagaggtgactagttgtcagaaaggtcatcaggacaaagatcaaaatcgagatgatcctatcatcaaagacacaaaatttggagaaattagctctaaagacgctgaagttaatgtcaaagatgtaccggagggtatgcaggaagacgactctcaagacaaggttactgatgacaacgttagagagaagagccaacttgacgagtcagaccccgtggtcatcatggcacgacaacttcaagtggccgaaagcagactaaatcggcaagatcaattcaacgagttattacttggcaaaatgaccagaatggaggctgtaat

SEQ ID NO: 310896 - DNA, 1340 bp, Cannabis indica
tctatgttttcgtaggaggatcgtgagaatactcgcatatatcttgatatatgcgggctaaggccgttccttggtcctacatactgcgaatcatacgaatgcgattagatttggtcatgttcgcatcatctcgctgagtttgtttgaggcgagattcgtactcgaggggtctctcattgacatctcggctttccttgaggaaagtgagtacatgtgtcttttaaataggagtctgatctcgagtttctaggtgagaaaaatctcactataacaccctatattgtgtacatattttgtgcatgtatatatataatagtttttaaaattaatccctcttaaacttgatacctactaaaaattcgatcacactcttctattcaaatttgtacatgaacttggtcaaacttagtacatatacgggtaggttcagttacaacttttccatgctcgaaatctaaacctgaactcactacaaacttgaaattcgtccaaatgtgcacccctaatcaaattttttacttatgttatatttttaagtataaataaaagtaaaaaacttactcaaacatggtgaatgtcattttattatttcataacaaaaatgatatgaaattgaacgaaaattttattttacaaccgcagataatttttaataactcgaaaaattttgaaagaaaataatgtatatgttataattagagattagtttttttttcaaataatcataattaaaataaacacatttattaaaaaagaaaaaaaatacctaccatcatctaaggtggtggtatggtaattgaaaatgatgataactacgcttaacatatatatgtgtctagagcttctctaagaaagcgacattttatataaatgtcgttcctttttgttccaacaaggcaccatccaagactgcattttgaggttaatgcgttacagtgcacgacatatatgtcaagcactagacacggtataagttttttttaaaaaaaattaatatttatatatatttatattatttgatttatttattaaattaagaatttaattttgaaaaattcaacaatggacctttttttaaaagtaatgtattgtttcagcactgacaaatttttttaatccaatatttttatagtcgtcatattataattatttaagatatcttgtaaaattttgaaaaattcagaaaaattgaacacgccaaagacaatgtattctttttaaaagtggtgcactgatgtactcctacttattttggcattcaaaagactttttagtctattattatttcatagtcgtgtacattatagttatttaaaatatcctgcaaaattttaaaaaat

SEQ ID NO: 310897 - DNA, 637 bp, Cannabis indica
aaccatgcaacataaaatgttatttctaatctttattattaagtaaatttgattatattgaaatgggttttatttagggcacaaaacccaacatgttcttgatcgggtgaatgcattctaacatggttgtaccctgaataggcatccataaagcttgggatttcatgttcggctattgcatccacgaggtgatcaattcttggaagtggaaagcaatccttaggagatgccttgttgaggtcggtaaaatcaatacgtactggccattattttaggcttgggcacttgtatggggttagccaccaaagccgtgtagaaagcttcgatgatgaacttctttgcgcgctatctctctacctcttcttttagttcttgtgctcgctctttgtctagtagtcttcatttcttctagacgggaagaaaaatttgggtcaacgtttagggcgtgagccatcacagtgtggtcaataccgagcatatcctcatgtgaccaggcagacatgcccaggtttactctcaaaaatttttttaaagaaaatttaatttcgaccagtaaacctttacagattttaagttttctggccgggatatttggatcgatttccacttcttccagttcttctattggcccaacatt

SEQ ID NO: 310898 - DNA, 2210 bp, Cannabis indica
tacaactatcccctccttaaaaaaattttgtcctcgaaattttatctgaacatctcgagatacagctcccgcatctgccactctaaatcgtactaaccttgcctctaaatcgtactaattcatctaatgaaactgagaagccctttttctgacccggctttaaacttttctttttactcttataattctagatcactctctagggctatcttgattctttctaacaaattagactgtaacataatattggctagttttccaactatgaactcaatccctgctctggtcatatcctcagccaactttggtgagatcttcttctattcatagacttctcttagacccttccaacttagaacatttgctaccacatttactttatcaagatggtaaaggatctcttagtcataatgtttaaccagttccaaccatcttcgttgctaattccatatcatgtataggataccgctgttcataatttttcattgcctagacgcataggtaataaccttatcggaaattcttttgagttaatttcgttaaggatgtagagagcttgacaaatccttcaacaaacctcctgtagtatctcctcatctcaggaaacttctaacttcggttgcagacttggatcgaggccaatcttgaaccgcttcaatctgtactagatccaccaaaataccacctttgttcacaacatgccctatgaagcttacttgagacaatcataattcatgtttcttgaatttagcatacaacttatacccctgaagacgttgcaatagcatctaaagatgtttctcatgtgcctcttttgattcggaaaagatctgaatgttatcgatgaagtctaaaaagtccttgaacactcggtttattaaatccatgtatgccaccagaatatttattaatttgaaggacatcaccaaaaattcatagtgtccataccgggtacaaaaagttatcttggaaatatcttcctctcaaatccaactggtgataaccagttcgaagatcgatcttagagaagatagtcttttcctgtaattgatcaaatagatcatttatccttggcaaatgatacttattctctacagttaattcatttaactctcggtagtcaatacacattcataaagtttcattcttcctcttacaaacaaaaccggtacaccccaaaagtgaggtattcggtctagaaaatttcaagccaacatcccttgtaactgaacctttaactctttcaactcagtaggtagcattcgatacggagctttagatacaaactctgccccagggatcagatcaatttcaaagtcaatctcccgcttcggttgtaaccccggtaactcccctggaagacatccaaaaactctcagactactggaacatgttccgctcccattagtatttctttcgtaccatctaccacactagctaagaaatcaacacattcgtccaaaaacaaatctcttgctctgagcgccgagattaatggaaatttaggattcttgaaccttgccctatcctttcccacaaacacaaataggtcctctccttctgattcaaaagttaccatctttcttttacaattgatggttgcattatattttgcaagctagtccattcccagtataacgtcaaaatcctctaagtttatgtagatttccaatagctatacttgacaaatatgaatgtattgcaccagaatcaatttaaaacagtcaacaaggtatcaccaataaaaaattgacttgtcccggtagaaagaccaacatcgacctctgtctgggtcaaagcaaacccctgaacaggaactaaggtgtcatctttcttctgttccggtcgctgtaactgtaggtaatttctttttagatggcccactaccccacactgggagcaggatttagtttaacatttttttcttgatagcatctctaacacctcgggcactctggatagattcgcaaacttttgtttccaccttgtcaaaaatcttggtgaccttggaatctcgaaatatcggtataacaaaaatgaataacatctactaattcgatccatgaaacagagcacaaaatgaatgtagcgaattggaatttgtttgtttgtctattaagaaggtgaacaaataattaataaattatatatattatttacaaaaatgaatataatgatgcttcaaaaaaaaaatgaatatgatgatgcta

SEQ ID NO: 310899 - DNA, 1769 bp, Cannabis indica
agccttatcttcatcaattcgtttcttctctacaggatcttttggtttaagtttccttttctcttccagcatccatatgaaaagctcacgttgctgatcttcgggaattggttctcgaaccatcaaaggtttcatggctggtggagggaatgttgctgtgtcataatcataagttggccaactaatagaatagggatcttcctcttcagctttaacttcctcttcagttgtaactacctcttctgctttgctttctttagcaaccttttccgaagctttgttcttgttcactacgttggcatctctctttctaggacttgcaaaaatgtaagctgcaagaaataaaaacacaactcagcgtccacaacatgagtcctattcttgatttcaaattacaacaaactgaatggtcaccaccttcaatatcaaattctactccaaacaagtaaactcagctagctttttaatgcatcaaaatatgagaagggtgcagtgatgattgacctcaaatggcagacttatggacccaattatcctatcttggtcagaagaggtctatcattttaaatgatgcagaaaaaagtatgctcactgttcacacactgtactaactagcaaacagggctaataatgctaaggactaatcacaaattagtatcaattcacaacaacaataataaaaacgacagaatgcgtaaaagttgtttgttgccttcattatatatcttctcaagcatcatcaatataatcaaagtggcaaactacctagtaatcagattttcctgtaattgcaaatgaacctctacatgtttcacaacaaccaggtctctataagatgattactgctatgtatcagaccaaacaaaccatgattacacagtactaccgtcaaaaaaagccccttctacaacagcttcatctcttataaaacaacacatatcatttgatagtttacaacttcagacaccaccgtagactccataaccaaaacccataaaacaaatcattcgaatgaagctacagctaagacacatttcaaaaaaaagaaaaaaaataataaaaacattaacaagcaatcaaaagaaaacaattgaaaagtcacaaattgaagttataacttataacacaaagctttcaatgaggtaagtaaaagaataaaaagttggaagcttacctccaagagcaagattagagatcaaaagtactcgccaaacgagcttgtatcgcctgataagcgattccgttggaggtgaaggtggtgatgatgagggctccgccattagagattgattatgaatgaaggagtaagtctgttgctggggtttttctctctaattctgggtaaggaagggaatgagtggaaaagcaagttaatgttgagaagctttgcccaacaagttggtgggatcactctcactttttcgtgtccgaactcttctctctttactcaactctgattcttcgcttcattacatttccttcaaaattttgcagtgttaggttattagttgaaaaatcagaaggctgtaattgtgtaaacgacgccgtttgtgtgcgcctagaaaactacattttgtatttagtttgtagtcgtcgttttactgtgtaggtttgtaattgtcgtattgaatttgatcagtcggtcccaagcccaatgtgaaaacaaaagggaaacttataaaaatactggaatttgggttaatttttacaaaaatactgtcacacgaaaatcttttcaaaaatactgtgtttttataaaacacaaagca

SEQ ID NO: 310900 - DNA, 2855 bp, Cannabis indica
ttgagaataagatgagaaaatgagcttgtaactacaaagacatataatttatacaaataaagcgtacaaaaacttataacagaattatgttataagaggacagctgtgaaagaataataactcttcctaaacacacaacaaactaagtgaaaagaataactaatttaagcttagatatataaataaaaaattataaattagaagatgagaaattaaatgaatgtcatcatatatatatatacaaacatatataatatctaaatataaatctgttgtccagtttaaacttaaagcaagaacttaatacgaatattagtgtaataagaagtttatttcttttgttactataaattatttataatattttatgattgggatattttgatttgaatgatatataaagaccctcttcacactagtttattttttactattataaaagtaaggtgtttgtgtgataattttaatgacaataatgcccttatattttatatgctatcactcatatatttatacccttatattttttttacgtacaattgtcaatatgattggtcagtaaactattatttactttttatatatatatatttagctggatttacttttatatctgaaccttatttattttatttattttttccacttaatttctttttataaaaataaaaaaaataatatattattatgcatagtattagttttagtattggttatatctcatatattataaaagtgtggtgtttgcgtgataattttaatgacaataatgcccttatattttatatgttatcactaacctatttatacccttatatctttttttatgtacaattgtcaatatgattggtcagtcaactattatttactttttctatatatatatttagctggatttacttttatatctgaactttatttatcttatttattttttccacttatttctttttataaaaataaaaaaataatatattattatgcatagtattagttatagtgttagttatatctcatatagtgcttttttattttattttacttttattattttttatcacatgtaattaattattctctaattaccacaattattaattattttcgtcatttacaactcatctcatgatattaatattaggggtgtttgcagggtgcggtttttgacaaatttttcaaaccaatccgcacatgcgatttttctaattttctaaactacactcgcaccgcgaaactaaaaaatcgcagtaccgcactgcaaaaaatagtgtgatgcaatagtttttgcggtttggactatcacatgtacaacaaagtttgagcaacacttgtcaaaaataccataaggattgaaaataaatataaaaaaattacgtttcaataatacaataattagtgggctttgggttagacattcacatattggacccaaataaatataaaaattgatatttttataatgtgcggtgtgtggtttgaactgcatattaataattcaaaaccgcaaaccgcaccacgcggtgtaagaaaaattcaaactgcgactgcaccacaaagaatttcaaattacttttttttttgcggtgcggacggtttgagcggtttgatgaacatccctaattaccagaccacttttgccctttacaacaatatataattacattgatactactaaagtgtaaagtgtaacagatatatatacatttttgaaaagttaatttacaataataaaatttgtattctataatttttaagttttaaattgtactaaaatttaaatgtcaaacttaagtttttgttacaaatatttatagtattaaaattaaaccaacaaaaataaaaataaaaatgtagcaagaagagctaatggtgaacctcacctagtataataagaagtgcgttattttatatataaaaaaataaaaatcagagagatttattttaatggtgaaccgcgagatttatatgaagcaaataatgtagcaatggtataattgaaaaagattcgcaatatattggggaaacgcggttgcattttttatttgtttatattgaaaattccatacgtaaacgcattttatcatattccttcttttgtttttttcctttagaatcttcaactttctcatttattatctccctctgcttttcttttttcttttataacaatacattgaaaccaataatttgattttgagctacgtggttgcaccaggttggtcaggtaattttaaaagctgtcgtatagtcacatgagatgttggtttcaactttttttttattgtttgccctaaattacatatcctcttgtgttttcatattattaatatttataaatacaggctataaattcatgatcatttataaatttattagaaaaatttcagctcaaatttattttgcaaaatattggaattatatattttattttttctaagttttatggaaaaaaaatatcctaagtttaaactaaattagatggaagttacctgcaaagtcacacgtatgttaggtttctttaaaaatttgatgtttttgatttttttttagatttaagtacttaaagttgtatgattatcttgaacgatttgtttttgtaaaagttaaatttgtgtctgagtatttgattagtaaaatataattgtgtctatgaatttataatatgtacattgttattaataataaattaaatattgtgaaaaaaaaaactcataacttaataagtttaataatttttttaaaaaaattatgtatcacatgtatctttataaagtgcctatctaacgacatttcttggtttaacagaatatacttaaaatattctgttaaatttaacgattaggtttgatctcccg

SEQ ID NO: 310901 - DNA, 1171 bp, Cannabis indica
gtcttcttcaggatcttcctcttcttcgggatcttttactaggtcgtctttgggatcttcttttgggtcttcttcttcagaatcctcttcttctgggtcttcttcttcggaatcctcttcccatttcatagcaaacgaatgattcaacaacatctgagcagaaggtctctgatggggtctctggtgaagcactcaagtaaaaaatcttgagcagtggaagtaaggtaagatggtagagaaggtgtttcagtagaaatcttgctgaacagctcttcctgccccaaatttacatcccatggcgtacttccagtcaacatctcaagaacaacacacccaagagcccaaatgtcagaggcctggtcttgagtttcttcgcaaacactctctggagacagatacaacgaagtacctctcactcgtttctcaaaatcatcattacttctcttagagagaccaaaatcagcaattttggcaaccaaaccatccacaccatgaggattatcatcatcacaatgaaccatcaaaatgttggatggttttatatcgcagtggacaaaacccttatggtgtatcaactccaatcctttaagaatagagcgagtgtgtactcttgcttgagactcaagcaacccaacctttgttctctcgatcaaaccactcaatgatccacccaaggcattctccaaaaacaggttataaatgattccgccatagtttccatcatgttcttcagaaaatgtatgatcgtggccgtagaacttgaggatgtgaggactggaccccaaagacgtataaacaaccttttccattatgaggtcggcataagaagaacctggatgagcagattttacagccaaaagtgacgggaagtctttaaattgtggtggtctagaacgagcttcgccagggataatcgcttcggaaacagagccataacctccaactcccaacaatttacccctcatccatccccattcttcatctcttctatatatgcttctttgtttctttcctaacgaattcttttctttttcttctcttcctctcttcttcataatcattttctataattcactatgtttttagaacactaacgttattattttctcttgttatcagctacagtgataagtttatatatatagttagaacgctatcctaagtgggagag

SEQ ID NO: 310902 - DNA, 926 bp, Cannabis indica
gggatcaacagcagccactcccacagatcacaacacttgttttgaatgatttcgccaactctgtttcccctgatcagcctgctgcctcagcttcactgctcgattcaggtaattttgtcctctacaactcagattccaagatcatatggcagagttttgagaatccaacagatacccttttgccaggacagattttggagacaggaaaagagcttgtctcagctgtctccgagtcaaatcactcgtctggaggatttatacttaggatgcaggacgatggtaatttggttcaataccctgtaaacaaacatacctcagaatattattcttactgggacaccaaaacttattggaaaggatcaccaaaaattacacttagtcttcatcccaatggccaattagagctgctcaattctacaagcaaagctagtgtatacacagttcaccctgcagattggatacgccccaacaataatgttacatttcgtctaacaattgatgttgatggaatattaagattgtattctcgcagcttggttcaggtcaatagcagctggaatgccgaatggaattcgactaacaataggtgtgatcctactggattgtgtggcatgaatgcatattgtttatatgatcaacatcaacgacccaattgtacatgtctttcaggtcatgatttcattgaccaaagccagaaaagattaggctgtgaaagaaagagtaagatagattattgcaaaagtgataatcacaatacagtttcactagtggaatttaataaagttttgtgggaaaacaactcctactctattgttccaaagaacaacaagattgattgtgaacaagattgcttgaatgattgtaaatgcgaaattgctatatatgcaaccaacacatgcaacaactaaggttgccactgagatatg

SEQ ID NO: 310903 - DNA, 941 bp, Cannabis indica
taatgaaattaaatctgtttctttaatgataattgaatagaaaaaatttcattgaaatagagttttatttagggcacaaatcccaacaactcaatagcgtggagttgatatataaagttagagagatcaagaagagagaaaaggggtcgagtttagggtttcaatacccgaggaatctagatttttggtcaatttggaccgtgggtgactagaagtggcccaacgaacctgaagcagtaatcttagacgaaaagaaagatgaaatatgaattcaaattgctatctcaaaatgaagagaaaatgataaactttctattgctcttaaggtcaagttacaagaatgattttccaaccccctctcacatcttagaaaagggtatttataggctctaatggtgtaaggtacaaagtggtcccaaggggacaaagcatcactttcacgttgcatactataagttcaggaggtgaccttgcacctcatacccttgtctggtgtcaggtggtccccggttgtaggggtggtccccagttgcaggcatgtgatccccagttatagacatgtggtccccatttatattttgtaagagggtggtccccggttgcagacaggtgacccctagttataggcatgtggtactggttataggttgtaggagggtggtccccaattgtaggcaggtgatccccgattataggcatgtggtccctgattacaagttgctatagggtgattgcagcatacccttggttaggtcctcaaacctcgtaggtccattgtcatcgctactcgtaccttctcgcttttagagtcttcaagaggcgtggttgtacgcttttcccttgtacgccttaccctttgatccctcttccaatgtcattctcgttggtatgcattcacctctcaccttacacttacaacccctaaaacacacacacacaca

SEQ ID NO: 310904 - DNA, 1182 bp, Cannabis indica
ctctcctaccaacaaagttagacaattacaagggtaatttttcttactggcattcatatgatatgtttatacaagagtataattttgttacggttactctattaaatgttttgacttattgacacatgtcaacttcttattgatccaaatttattgagtggactaatgaagagcgaccactaaatcaacatttaacaagattattaaagcaacagtgtacataatcaatttttgactaatatttatgtaacacggtagattgaaatttccttgagaatctttggctctttgtttctcttctcgattcattgaaggatcatcacttatgtaagaggtacgttttattctcccacaatgaatgatagaatgcaaggtgaatttttaaggaaaaaaggtttccacaaagggattccgtttctcatcttttgtttgttttggttatagattaccttactcgagttttacataaggctgcccatagtccttaatttgcaaatgatctaattatcttttgcaaatgcactttaaatgtggcaattttgtgaataaagctttttatgaattctgcactaagttgggccttaatgccaatatgaacaaatcaaacatttactttgatagtgttacagttgctgacaaagctgatttgcttaaggagattaattgtgaagagagtaaattccctctaaagtatctaggtattcctatgagacctgcaaagtggaaatctgaagagtgtggcgtaattatctcaaagatcaaagcttgacttcatacttgagctaataaatattaatcttttgatggtcggtctcaacttattcattcagttcttcttaggttaaggagctattggatgtgtatctttattttgcctcatagtgttagggaaagaagttgacaagctttgtagatagtttttatgggatcacaatgagacttccaagaagatgcatcttgtttcttgggagaaagtttgccttctaaatgtgtgtggtggaattggggttcaaagataactctaaggaggcgtttagttgggaggaatgaaaatataagaataagaattggaatgggaatagaaataggaatggaatggaataaaatttaaaatgcataaaaaaaattgataaaaaaatcattaatttttttttacttgttatattggaatggtcattcctt

SEQ ID NO: 310905 - DNA, 634 bp, Cannabis indica
ttatttaggtcataaaacccaacatttttgtggtcagcaaaagccattattttcatgtgctttcaaggcccaaaccattgcttgacttgctatccacgaatgagagctacacatcaaaatcttaccatgccaaaggctggccggccatgcacctacaggatgtaggctggccgcccatatgatccctacaggttaaggtttggtcgaccatgttcctgccagggactggcaagtcatgttcctgccagctttgtcaagagttggctaggtctttgcatttgttggccagccttagtaggtgatggctaaccttggtgatggccagcctgggtgatggacactcttagtgatggccagccttgggccaggctttgtaggtagaggccagcctttgtaggtggaggtcagcctttgtacatactctccttgcaaaggttaggcttccttggccgaatggaccctttcttggcctgaaagtcaccttttggttgactagcttgtgcccaagccttggccggccatataagctcatcctggcagacctatatgctccccttagctggccagacatggtgttacaactccttgacgactcacttaactcctttcgcttgctgcttaatggttttgccat

SEQ ID NO: 310906 - DNA, 2218 bp, Cannabis indica
gggcataaaacccaacagatacgccattagagcctcgtacagagggttttgtcaatgtggagcaaccctcaggcacccactactgactctgaacgccagtattatgttggggaaacagggccaagaattggcgaaccaacaattggtgagtctaatctggacttgggagaagatttaaaattggcgagacttagagcggctgtatgccaagttggacaagctgaagaatcatgcagtgttggttgtaatgcattcgcataatagagacacggatttttgagatggatagatggttaggagtacattctctaatctcatcaagtggagctagatcactttaatagagaagctactgacctgataagacagttcaatgaaataactgtcgggagaggtcaggatctgatcaaagatcctctccaagggagactagtcgataaatcaggcagggtctacaaacaaacaatccaactaggttcttcaagaacaaggaaaaacttttgggtgcccaaaggtggacaagttctgccacacagatctagtggcaagagtgaccagactcttacaaccaatggaatggggggccagccagggatctctgactcaacaacaccccacttagacaacctttggccaaccagccccttagtggtgcacctctggctagcaaatagagtgagcttcctctttaaaacattcaggagcaagtcgttctaaggccaatctttaatcggcttggtttgggaaaaggtggaaacacccaagacaacattaacttgagaaatgagaacaatcatttcaggcagttcgatccaccaaaccccaacaattagtgtgatctaccccttgtcaacacacagggcgcaccagcccatcaggcgagaatgggtgacaagacattgcccagcatagagctggtcgaccatgcaaaactgctcaggtagggctccggccatggccagttaccgaacctagggctggtcagccagagccagatgccaagcttggggctggccagcgttgaacatatcctttcttaaggtatggtcggccaggtcttgtccaatccaaggctacagtccaattaagaaaggccaattaactaggctcctacagcatcatatgcttttgtgcaagcaatactggatcaaataagagacatgataaagggcttaattggcctaaaaccatcagaccttgaactagacaggtcaaggggctctccattcttggcatatatcaatgccttgcccttgcccaagtttaagatgtcggtatggaaaatatatatcggttgagaagatcctttggcacatatcaagtacttcgagatgcagacagatctctagaaaattactagtgatgtgcggtgttggatctttctgacaactttgttggaaatagctcagcaatggtacttcaagctaggtccaagaagattcaattcttggagtgaattttcttgagaattctacactcaattcttgtcctcaagactaataccatcgtagctggaagaccttgtcgaggtcaaacaacgacaaggcaaacctttgaaggattatatccaaaggttgattgtcgaggccaccaaggtcaaaggcctaacagaaaaaggtcattacatggccatactgggggtatccttccattgagtgacttttggaaaggtatctggaggatctcaaccaacaatatgaagaagttccttgaacgagcaaacggttttataaagctagaggaagctgtcaaataagcctaaatagggaaagtaaataataggctgtcttagggtgctgtacaaccccaagacttgccaaatgtgcaggccagcactagtagtgccagccaaatctctaatggcaagaacactggaagcaagtgcattaacaacagttccggtcagaacggtggaagaaaaggggagtacaatacttctcccatgccacaaaactagaaagagaaagaggagaagtatacgtgcttcacctcctaaccgagaaacctaataaaatttacatgcccactcaatctactgtcctatacaagaagcccctcttatcaaaagggagatgagcaagagggacatgtcaaaattctgctgatttcacaatgattttggccatgacaccaacgcatgttagaatttaaagagggagattgaattcctcataaagaaaaacaatccccacttgtgtcgttatgtgtagaatgacca

SEQ ID NO: 310907 - DNA, 1075 bp, Cannabis indica
agagagagagagagagtttaagagatatgtcttaatttccttattttcttgatttttccaaatggaaaaaggattttaattaatcctttggtgcccaaataatggctaggtgtcatccttaaaatcagccacctaatctcccctttaaaaagactaaaatgccctttaaatcaaacttaggtattttccaagactaggggtaaaatggtcaaattccataaccccgctcaaccccgatattttattttctctaaaatatttcccactaagaaataaggttctaaacttacccatgtgatcaaactagccatccatcgcattttccgttgtcgccaagcaaaaattacaaaaattgcatatttcacatataagctaaataatactcctagagtttaataaaatctccgaaattgagaaattataactctaatatttatttctaaatattggggtccacaaataactaattcataaataattataaaataacagaaattagtgctaattgcctttttataatccaatttactaaagcagtcattactttctttttttattttattttttaggcccagtttagggttttcaaacccattttctctaccacccacgagcagaacatccccacccaccacgagaagacgaccaaattcccccacccaccaccgaaagaaattctaacgagaagaacttcgcccacccacatcgacgagaagaacttccaccatcttcagccatggccattttttttttgggtcttgtccttcaatctgaagcagtaactgaaaatcgaaggccaaaggtgagatttttggtatttattttgtgttctatttatttctaagtttagtggagatctttcatacagtgctttcatataaagtatacaaagatctttgttcaagtagtgttttttgatcgttgaacacccctaaatggggagaaagaagcaatatgctggaagaaagaaaggttggctgattcctaagaatgatgagcatgaaattccattttatggtcagttttttttttttttaattcctttatgtctttatttatatttggtgtatgcttt

SEQ ID NO: 310908 - DNA, 829 bp, Cannabis indica
ttggatgttaaaagttggattttttttctttattgagaaaaaaatggtctcattaaaacgttaagagggaaaagatcaatgctaggcaatatcattaatcataagaatcaatctataaaacaacatcaataaaatcaggatgaccaaaccaccaaatataatgagcatttaaggaaagagttagtttagttaaattgtgggccacactatagcaatcctaggacaatacataaaagaaatatcaataaaatgagtacaataaaaaataatatctctattaatataacctaactaagactgatcaaccttactatgtagaatgacattaataacattaaggtggctgttgcccctgattttgcccaatatacgtggaccaaccgtacaatgacacgtggatggaaagggcttagcatttgattaaaagctaagtctttataaagcaaaaagctattgtggatatgcctcccggagaaagcatgcaaagtctcatatgctcctagagagcaagatggcatcaaagcatctccggggtgatgtcaggcttcctctgaacagtcatctcgcatttaatgccgcatgggaggaggcgtattggaactgccacaaacaataaattctgacgacacaacccccgatctgtacctactaggctatgaccaataaagtctagtgacggctactctgtgaagaatcatatcagtcaaaagggattaagggcggccctcataaaatccctacagcacctagggattagattatgcattacctgtaataacctggaattaagaatgcataagcaaaaccctaactagataattatgtataa

SEQ ID NO: 310909 - DNA, 1467 bp, Cannabis indica
ttctaaaaacaattttttaaaacaaaaaacagaaaacaataccaaacatgctctttgttttctgaaaactgttttcaaaaaacaagtctaaacaagccaaattgttttcaaaaaaacaattttctgtttttaaaaacaaaaaactgttttttaattatgatgccaaacatgcactaatctttttatgtagcaaaagataatataagtaataaatagtgcaaaagatttctctatgacttttgaaataaggacatttacttataaagtgctataatttaagaccatttattataatttcttaaaaaaaaatcatttcataactacgatttttttttttttttaataaaaattacaacttgtacaagattttaattttttgaattttaaaaaaaataaaaattaaaaaatgaaaaagaaaaatgtagaacgataatactgtaaatatgttttgaccgtataaatattaaattgtgctaaaattatatataatttgtacaagagtaaatacattttggattctgtgttttgcaaaagttaccaattagactctctattttgttaaattacaaaataaaccatatattttctaaaatagtaaaaaaggaccctgagctcaatttttaacaattttattttttaatataatcaactttaagacaatttctaacacggacagatacagaaaatgtaacaagttttatcataacatctttagaatagattattattaagttttattttgacaaaaaattagttcagggttctatttgtacaattttagaaaatacatggtcttttttgtcatttaacaaaacagaaggtctaattgataatttttataaaacacaggatctaaaatggtatttacctttttgtacaaaattttaaatatttgtacacattatagactttctttatatatatataaatacagactatattcacattcttgtattttcaatttcttttgttattttttatgttgtttttttggttaatttcatgctattttttgtttgattttatataatttttatagaactttgtaaaattgtaatttaaaaataaaaaattgaaaaattaaaaagaataattgtaataatgtaaaaagattataatgtatatatattttgccgtataatattaaattgtgcaaaaattgtatgtaaaaatccccttaaaaaataacataaatgacaacaaagtaatatttttttgtgataaaattctttgaaacaatgaacattttaattttgtatgggccttatctattaaccaaattgagaatctaaagaaggagatcttaattggatatattggcccaaagctagacgtggagttgggtcaagttccatgtggattcagatatgggcttttagagtactagtagggaaatttataaaaatactggaatatggattaacttttacaaaaatactgtcacacggaattttttcaaaaatactg

SEQ ID NO: 310910 - DNA, 1060 bp, Cannabis indica
aatgcactactctcttaaaatggatatattgatgcactcctatctgttcgtaaaatttagtacattaaatttaaatttttcaaaaattagctctctgttccatacaaagaagccagcccaaattaggtcattaagaatatttctcaccataatagggatcacagataagtcatttgaaagaactttgaaattgaaattagctttccaacataaacagtctgccagctaagcgattcgcccccaccctagtagcgttggcaaaacccaaaagatgccaatcctcactcatatgttgaccatttaactttgtttccatgcaaaaaagaacatgtggatcttcacgagagacaagatccgggagagccctctttgctagcaaacttcctagtccacgacaattccataaaagaattttcatgaggaaagcaagaatccaatttctcactcaaaatgagacggatcttcgttgctatcaaaatattgtgccttgagatggcatcatctccacatacttcgagagctcacagagaaaggagcaggctacatagagccaacaaatagaggaagttgggagaaccaagcatattggaaccacgacaacggcaagaccaaaccaaatgttttaaaaaataaacaccagtagaccagagatcaacgacctatacaactccttgttcgcaggctttaaactcgtagaccaacaaaacgtcaaaccaataaccaaagaccccagatctcagagcaaacataacattgagataggagaggattctagaacataggaaagccagagcaagagaaaggtaaactcgaaaaacaaaattgtaggtttagagaacaaacctacactgagggatcttaatatgattttgagccaagatgataagttcgggagaaaatgttgttgtggaggctgacagtaggggtgttcaataaaatttacaaaccgcccaacccgaatgaaccgctcaaaccaaaccgaataaaccgacaaaaaatacaacccgaaataatacaatgaaaatccaaatcgcccaatgaatatattgggtggtttaca

SEQ ID NO: 310911 - DNA, 1198 bp, Cannabis indica
gtgcatattaaatcggttatcttgaattgattactttttaatattgaatgacttaaaaaatttaatatttttcacataactaacaataaaataaaataaattattattattttatgtctctgttatactcatatttcaagcaacattatgttgttgaaacgtataaagaatccagctcgtgttataaaataatttcattcaatagacttgcctcaaaaaatacatatagtagaaatattcaaactcaccctattaaagataagggcaagctatgaataataactaccgattgataagattggtgagatgaacgatcaacttagaaggttcatctcgaaaaatacagaatacacaatggaatgacaatgcttggaaatgatagataataaattatttacagtgtttatagctcattgatttacatactcgtgagtatgctaagagactacgggtcacattcccagcataacttgaatattttatgcttttctattgcaaagagactaaggtctgccaacataactgaatcatattgtaaaaaagtatacttatcaaatttgaatgaaatcaacggtaaatatctatattcaagttattcttattattgtaaaaaatttcatctatttattatacatatttttctttgacaaaatgccataattttttatttgaatgtcatttattaatgcatgtgttatttcattgttcactgttataattcatgtaatataactgtcaatatatatattaataatacaaaatataagactttttaccacaataattataatcttaaaatttttatagtataattgttctatatattattgtttaaaacaagaatattaaattattaaattaatttaaaagttaaattaataataaataaaatacattatgtctttacaggggtagcaatttaatcgtttatagtacatttaaagcacttcataattatccaaagttgtcatagactattgaattaagatgagatcgacggtaaatcgagatcgctcagatatttttttgagtgaaaattttttcatctatttattatatatattttttatttgatcaaaatttattattcaatttttcaaatattattattattattattattattattgcatgtgttattttattgttcaatattatactttatgtaatacaaccatgaatagcactcctgagttga

SEQ ID NO: 310912 - DNA, 810 bp, Cannabis indica
cttaaataactacaatgtacacaatctaataaaaaaaaatagattaaaaatttctcttggatgtccaaacagataaaggttgcataattcttgtgaaaatacaagtcatgttgtgtcgagccataaaataaatataaattatatcgtgttgtaccaatagttgatttatagaataggtccgacacgatccttgtaggctagatattttcatactgtactttactgaggctaactcatttttttttatacagactcagattcatgcttgataactgttaaaaaaatagaattatttagttttttttgcattaattgctattattttcaagtttttttattaattctcgtgacttttaattagttttcttcaattttgcattaatattaattataatatttctagataagtttaaattattttttgtaattttttatttcttttatcattttctcatttaataagtaattattccaagtattgtgtatttttgtaggagcttaattctgggcttgatatttgagtcaaaattgacaaaaaaaattgttatctcatttatgaacttaccaaagcccaaactgaattgaatagctagtgggccacttgaggctttattggccaacgaaattaagagcaaagaaaaaaaaaaaaagggcattttacaaaaatactgcatttggggtaattgttttcaattttactgccacacggcagaattaacatttatactgtcctcccttttttttttcttttatactgtcaacaacaaaacaaaagtatgaggcctccatctttgacaatcacagacataa

SEQ ID NO: 310913 - DNA, 1833 bp, Cannabis indica
acggtctatgtcaccctcctgccacaaaccattgattaatgagcagtatgtgaactcatcaggcacaaagcccttataagttgcatctttcagaagattatccgcattttggatcttaccttgtttgcaatatccatcaatgatagtgttgtaagtaaatccatcaggttcaagcccatcatttaccattgtatgaagatagcactcagctttgtcaacctcagactttttacacaaaccacagatcaatgtattatatgtaacaacatcaggagttaggccttccctctttactccatctaacaacctgacagcctcactaagcaaaccttttttgcaaagtccttgaatgaaaatgttgaatgtaaacaaatttggagatacccccctcttataaaccttgttgaaaagtttttcactctctcgaacatctcctttcttagcaagtgtatgtataagcttattgaatgttgtaatatttggacagaaaccttgagaaagcatgttcacaaataattcataagcctcagcacgatagtcttgttcataaaatccactgatgaccgtacaatatgcaactgcattaaactcacaaccctgggaaggcatgttattgagaagcctcaatgcagcatgaggcctattagtcctacagaatgacttgatcctaattgtataagtatatacatctggttcgattcctttatctttcatcctcatatacactttgtgggcttgattaaaatatccagcctcaatgagtaaattcatgactgcattataagactgcactgaaggttcacaattataaaaatccatcctctcgaaaatattaacagcttcttgaaccttacctattcttccatagtttctcatggctccaatatacactccttcgagtaaaccattatccacgttcatcctcatctccaagagtaaccgttccatagcttcaaactccccgtgaaagccaagcttatcaatcatacatttgtaagtaagaaaagtatgcttaaacccatcttcccttttcactgagttgaacatttcaagtgctttcagtggatccctttggtactttaccacagaggcaacatgtttgggaagtaaagaagcataacccatttcaaaatctgtactataatcactaataaactctaaagcccagaaaaatttaaccctttccctatcaaatcttcagcaacttcaaggttctagaggtacattaaaatagaaaatggtatgcttcatacttaaaaggcacataaatttttctctttgtaagctgcaacactaaaacaaagacaaaaatattatcaccagctgagaattatacatgtgtttggaaaacctaagcggaactggaactaaacatctcattgtcaccaatcctgatgataaaaatgaaaattttctcaaaagagtaaagcattacacctgagaacgcaatgtcgttaactcaatttggggatattaaaacttgtctagggtttgaagagacataaactgtaaggggcttctctgcagtgagttcatgaacaccacaatacactagctacttatataattccacgtcatcaactatgattatctttgttacgtggcaaatgaaaaatgcagctgcatggtgattatgtagtaccgcgacgtatgaaatcacgagtcccttctttttttttcttagctgaatattaccgatcgcttcgttgccaaaagcccatggaaacttaggccataatagcagaggaagtgtttttcgattcgcggaggagaaaacatgacagaatcgacgggacaatggttgcagtagtcgttgatcgatctatgccaaaa

SEQ ID NO: 310914 - DNA, 1122 bp, Cannabis indica
aagggtttcagatgaatttatacattatgtacatataatcatgaaataaatcatgtgaaccatgcaacattaaatgttattttctgatctatattaataagtaaatctgattatattgaaatgggttttatttagggcataaaacccaacattttgtccaacgatacctatctgacatctttgtctactgtagtattgccccgtgcatgacacttgtctcagatcgtgcggatcccatccgtacgaaacctttgccccacgagccaaaatcctacagtgggcctttaagtcatgtattttatgtatttaccctaatagtgggcctaattttcacagtaacactagcaggccacgggtatgcctggatccgtatcctaacttataaatatcccgttataccttcgtccaggaagaggattaattttatagattttagagtttcttcttctctaagctagaaaaactcaagtgaggaaatatagctagaaattagggttcttcaacttgtaagacccacttataatacatcaagccgtttggccaatatatggacttatggactagggttcgttaacacccaaaccacgtaaagatctccatctatattacttaattacttctttaatttctgaagctcttcgttaatttaatttatgaaaatctcgataaataggttccaacattcgattcattaggaaagttaggatccatatttgtaaatcaagtttccaagcatccacattattagcttcccaaaataaaagttgtaagaatcattcttctctaggaaactttaacgagtgaatcaaagaaactaataaagtgaacaagaattcatgattactcaggatttaggccaatatactattgatcatcattatgatatgaataaggtctttatagtaaacaacataattgataatgataacttaattgcatatcggtccatgtcataaagaatctatattatatacatcaccttcacttagatgtagggttgtacatcggtcggtttggacagtttatcctatatattttctaatccaatctaaagttcgagttgctaaaatttaagtacaacccgcccaatttaaaaaaaaaattgtaaaccgaccaacggtt

SEQ ID NO: 310915 - DNA, 801 bp, Cannabis indica
cagataatcgaaatgaatctcgaaagatgagaaggaaggctgccaaaacacggaccaaaaccaaaaccgataccagaactcgaactatactcgacatgtggttggtgtttggattggggaccaagactcagacctgaaccaaaacacggacctagacccaaaccaggactcgaccaagacccacacccaaagcttaaatcataccttgtgtcctgaaattgaaaccgaaactagaagcggaccattaaaccctaaactctttacagttaaccctaagacctaagccctaaatcctaaaccataaatccctaaatactaaacccaaaaccctaaaccctaaatcctaacctggacacgggcctagaccaatacccttaccgtgattggaacccaagacctagacccagaccctgatccaaacccaaacctagacctaaactcaggacctaaacccggacccaaacccagaccagaacctggtctgggatctagaccttgagtgggcccagatcgtgtccccgaccccaacccgaatagggacttggactaagattgagacccggacccagactcaaagttgaacccatactgggacctagactcagacccaaacttgggagccaaactcgaacctgaacttggaccttgaccgggacctaggatccggacctagatgggagacctgggccccaaacccgaacctagacccagatctggaccaatgatcaagacctagatgaggcacttggacctgaaactaggccctaaaaccgagacagagacccaaaacttgaccctaga

SEQ ID NO: 310916 - DNA, 688 bp, Cannabis indica
cttgatcacacccttgacattagacatctctctgtagatcatcaaactgcatgcatatttactaaaccacttcctcaaactcagttttccaagtttcgtgacaagttaactctgaaagaatcgagtgtaacttgacagggggtgttagagctagttatggtttaggtgtctgttatttttctattacaagagtttgttactcttttttgtcacgtttcttgattgtctaatgtaacagtgtactctatataatagaacatcaactcatcttcttccttgagctttttctctcattttctctctgcttcttcactttcttctttctttctcaactcccataaatcaaattattataatgatttcttttcaatatcatataatattatgtttagtagattgaaacaaatatagttatcaatgatcataacacaatatgcgctaatacatgtggaataacaagaagatgaaaaaaatttattacatcacttttccactataataatcatgcaaatcaatatatgaaaaaaaaattacttttgatctatataagttgaagaatacttgaaatcctctcgataaatgactaataatatattttttaggtttaaaggatatatagatataaatagatagatatatgttgggttttgtaccctaaataaaatccattacaatctcattagttatc

SEQ ID NO: 310917 - DNA, 524 bp, Cannabis indica
aaccaaatttgttggagcatttgtaaatgatcgacaatgaaattcaaaacttcacagattaataataagtatgtacaccaattcaaaacacaaatacaaactcaatcctaaaaaatctgaagtaatcataaaaggataaaaccatatataagtaaaagtattgattaaagagacaaataaatgcaaaataaaattaataaattatattcctgatattttaatattatatttatatataactgagtttttcatcacccctctaaccacccattcaaaatttaggataattgggaacacatataattaactttttatatatactgtatacagatgtgtgccttgaatggaacaataaaactatagtaaccacagtgaaaaaagaaagaacgataactgatgaaggtgatcggtaggattgagtcggcagttaaacccattgaaatttgacatttattaattaatattacaccaaacaatatctattctatataaagtgtgcctatataaccgaattcttagtttat

SEQ ID NO: 310918 - DNA, 1905 bp, Cannabis indica
taatatgcgattcaaatcgcacctcaccatacattataaaaatactaatttttatatttatttaggtccaatatgtgaatgtccaacccaaaacccattaattattgcattcttgaaacttttttttttatatatatttattttcaagctttatggtattttttataagtgttgcttaagctttgttgtatttgtgatagtttaattattggtgatagtctaaactaaaaactacatcgcatcatttttgcggtacggtttttgcagttttttagttttgtggtgtggatgaggtttgcaaaattagaaaaatcgcatgtgcaattggtttgaaaaaaggtcgaaaaccgtaccacctgcaccgcccaccctgcaaacatctctacataatacatactaaactattgtgttcaaaatttagtaccatttttgttaagtgttaaatttaatataatttttagaactatattttatctatatatcactaatttgtagattatcttaccataatacacttcattctatatccgtaattaagagaaatatttcaagagcttaacatgaaaaaaagaattaaaggagataaaatcttataagataatctaataatattttaaatatatataattaatttaaaaatattacatcacatagtacaatttatagaaaataataaatacataatcaaaataaatattctataaccaaaataaaaaatattaccgtggtaaaaataaaaccatagtaaaagttaatctaagtagattttggatcctcattggttaaagtatatatataaggattaaatttctgttgttctaaataaatattaacaactgtaaattttaaaaaaatacaatttagtagtgatataagttcaataaacaaaaaaatattaattattctaatatttatttgtttgaaaagtctgtcctaagagtaaatggaccttaagaaaaaaaattaattcttaagcaccaaaaactaattataaggcacttttttggaccttaggtaggtggatcctagcgtgacctactttaagacatatttacttaaagtgaatggaaattaatagtatgatattaattctcgtacaattgtttactaaaatctcgaaatgaagaaagtagtagggcccacacaaattaggagaaataaagagaaaggttctctcccgtttttatcggaaatacctttttcttttcctaatttattttattttaattttattaattaaaaataaaaaaataaaaatataccctttaaaaatctataaacaaaaaatagttacatattctaacaatgacaattttgtcaaattaaagtattttaattactttttttagctatgtaaataaaataatatgattttagttttcttttcggacactttagtaaacagcataataaaatattattttcaattattttttattttaaaccgtttcatttctctcattgattattctgattccaattacagtttagtaaacgcgtcattagtccagagtcaatcatagtcatgctgtattgtgtactaaatttagtacaacttttattacttgttaaatttgacatattttttgatacactgttggaactaatattttaccaaatgaactatattttaacaatatatcactaatttgtatctccatcctagggatgcacatttctcccacggggatggggccccgcctcattctccgcctaaatagggaatggggcgggacgggaattacactctccgcaccgacggggactcgtttagtattttatcttatatttctagtaatattttataatttatatttgtattttttagtatattagtatctttttatgaattttaagttgtattttggataataattagttcattgaataataattaatgtgtaa

SEQ ID NO: 310919 - DNA, 544 bp, Cannabis indica
gcgtcggtagcgaatttcgcgaaaaccgacgcctaaagggctaaaaaaccgcctctaaagggtatttttgtagtagtgattatctaatttattagatttggccattttcttaatttttttaaaaagtggacatttactaacttagttaccaaattgagagtcattttacatctcaacccaatacaaaatactgaaaaagtatattccttattttgaattaaagtaattatattaaactatacaatttaaataaattaattttttaatcaaattactaataaatttaagtgtgattttatattttaccacacaaaatttttaattataaaatttgaatttgtggcaaaaatctttatgtttttacaaaattagatttataactatcattaacatttttttaatttatataaattatttttaaaattaaatttgaaacatattttaaaatattacattaatataacaaatattttttataataagaaaatactaaactcttaatcatatatattcttaatattcttaatgggcattacccataaat

SEQ ID NO: 310920 - DNA, 684 bp, Cannabis indica
atcacaactattccatttctaaaaaaatttagtaaacaacatattacaaatattgattctaattatttttcatttattctgttacatttctccattaatttattcagattctaaatactgtatagtagacgtgaagtattagaatattattccaatggaatgtcattttcatcattttggtagaatgattattctattttgaaatgaattaaagaaagatcattctaatgtaacatcaaaatacatttatcatatttttttatcaatttttggtgcattttaaattttatttcattcgattcttatttttattctcattctcattcatattcatttcaaccaaacactaccttaatgttttatgatattgaatgaagttgatgaatttatagtgtgaaacacacattaaatttttctctcctaattttaataagggaaatttacacccgtactatttttttctattttctttttttttttattgttacacagtaatattttatttcatactgtttttttttattgttgtatactgtcgtgtagtgtattgagcatctattaaacaatttttattattttctaagtttgataaatgcatgatgtgactttgtattatcacattagtgacaactttttttttaaaaaaaaaaaaaaaaaattgtattatattttagataatataaa

SEQ ID NO: 310921 - DNA, 1961 bp, Cannabis indica
aaaggagacattaaattctgctgcaaccgttgtaaggtttctgaaactttatatgtgtttatttcatatcgttttagaagttcatatataggatgtttaaaaacatacttgttagtaaatttaggtcctggtaaaataattccaacattaacttcttttattgtatcatcacctaacattgtttcttttgtcttcgggattgtgtcagttatgcatacaccatggattaacgaagacaagaaggtggtggagctggctgagaaacttggagttgctgaagatcaagttgctgctgctgaaggccaggtgactaccttgaaggaaaaagttgcttctcttgaagaggaggtgaccaacctcaaagatgcagccaaaagttccaagtcttgtgagagcactatgaagaacttggcatcttcttggaagaatgcttttgaccttgaagagtcttcacgtgatgctttgaagaagcaaactattgtggctgaccacttgagagaccagattaagtccttggagaataaggtgactactcttgagaaacaggttatgtttgatgtctctttctacaatgatttgtgcttcaacgccatttacactgcttgggtcaccaatggtaggaaccagtcattcaattagattggttttcctggcaatgaggtgccagccttcttcgagtggtgttagagatgttttactgttgaatcttttgaagatgctgactttactgtaaatgttggcgaatcgactgtcagagaaacttcaagagttgaaggctacaatcttgaccaccccgacattcctccttctgttagtgaggtgcctcttattgagagtgaagagactcttgttgatgtgacagggtctaagaacttctctgagtccattattcttttctgtttttagcatttagctttagtgtgttagttggccattctcgggtggcctttcagagtggataagacttagtagaatgtgattagaattttgttttagttaaatcagaaattatttcaaacttaataaaacttttattccaatacttatatttttttttgctctactttatctattaccgcttgatcatttaacacttgcacaatacaccatgtcttagaaaacttaattactggctgtaatgtcaccgttttcttaaagtcatcattaccacgagagtacttacacagacgtgcaaattttttttgaatgctcgtgtaacatatggctctcgtatactataacataatatatgtgcaacccaagttatcaaagatgtgccttcattggtcacttgccataccaaatctccctgggccttcttgatcatgactcttgagtggtgctacacgtgtgagaactctccacatatccgaggatttatgggtggcggtgtttactcaattaagaaataagtaaagttatctcaagacaaactcaaaagctttactcagcgcttggagagggtggtcaagtctgtgagttgtaattgtttaatttaaatgaagtaccaaaaaaactttatttatgctttttctcattaaattaagtacaattacatccctgtgagctaagttaaaaaaaaaagagaatacattatgatgtagtagatgaataatttcttcttcatccaagcttagctgaagtgatccccactatgctaatgccatgtttgacttttagcataggagacatacgttagcaatggaccccttaacctagggataacttcattgcatcccatttgttaagtggcaatcgattcacttacaaggagtaaggtgaatctcactatgaagcaagttgttttggagacagctgattttattggtagtttcgtaatagatgcaccccgttccaaaaccttggtaccggcactagattcaagttgtagtcatagtgtgccaacttgtaagttttgagttcaagtgctttaaccacgacatatggtccttcccaattag

SEQ ID NO: 310922 - DNA, 677 bp, Cannabis indica
aaaaaaaaaaattgagggttttattaagtggatatcctatgcataagtatgcacaagtttgctctggttgtgcccacaatccactctaaacctatttttttattcttaaagcatttatatataattatattacactctcctatactcactatggtcacttaaactaacctcaagtggttaagcccactccaaaccagtttaggaaaaagtgtcttgttaataatattctcaaatcttctaaaaagtaaaaactcaaaacctcgtatttcagttgtcaaatgttatcagaaagtttaaaaatgccaccaaaatatcttcatatttaataaaaaagaaaaatagataaataacaaagggaaatttgacattttatgcttaaaaatgactaatggtgttaaattatacctaattataacacatagaaaaaatataccaatctttctcttttcttccaaaaatacccttctcatttcaaacttcccacattccctctaactacattctctctcttctttccctctcccaaactcacgaacccacacccaaacccacggacgcagaccaccgaagctccaccaaaacccacaaacccaaaccaccgttcgaacccacggccacccaaacgaacgccccaaccaatcggcgccacccacaaacccagacgtcgaacccacggc

SEQ ID NO: 310923 - DNA, 931 bp, Cannabis indica
tgacgagctacctcaggtgctcttggctcataaaataacagaaaaaatagcaacgagacatactccattttcactaacctttggctcgaaagcaatgttgctagtagaagttaacattgcgacacattgagtcgcaaatcacaaatgttacttatcatcactgaatcacaagacacttcagcaaaagagttcagaaaatactctttaaagtaagggatttggtgttacgacttgtgtttgctaatacatgaaatcccgcattaggattatttgatgggaaggtctttacattgtagaagctgtcataggaacaagactttacaaattagcatagcttaatggctcactgataaaaaaaacacctggaataatgagcacttaaggccttattaccaataacgtgttatgttgtattttattcatcaattatgtaaaagtaatttattttaatagagatatttgtatttcaagtaatcataaagttcttctttaaatttacttaggggcatatgaattttatgggaatcgccagaaatgacagggtggcgtatgccacgtttcagttttaggaagatgccctggtgtggtgggagatggtgtctttgttagaggatgtcaccagaatgacctaggaagaattccgagacttgtttaacgctaaatactataatgaggcggtccgcagtgcaaagcggaaagagtttgttaagctagtacatggtgaaaacatgccagtgactgagtacatgaccaagtttgatcgattggccaaactagccttagggattgtaccaacaaactttagcaaaaaggaaaaaatacttggcggggttgactgcaaagattaagcataatctggttattaataccaatgatacaactgttgggttttataccctaaataaaactctttacaatctgattagttatc

SEQ ID NO: 310924 - DNA, 1574 bp, Cannabis indica
ctatgttccttgtggagaatataatcctttcccatagaagaactacttagagaatctccaatggagatgctatgaaggatgcttgatgacatgaatacatttttagcattttttaattgatgctcaccattggaatgaaaaagaatgccctaccatagcatcttttatatcgtctctttcttttttttttataattttatcataaagtaaaatgcttaccattggattattttagagcaacaagtgccaaaaataatgtggaagagagataaaataaaacaatatatttttacgtgatgtggatgtttttgacacttttaaagaatgtcaccattgtagatgctcttatgatctagccacgaaccaagcactattataggaagcactcgatctcgtagaagaattctgggaagaatcctaaatacgcatgagagcgtaccaaaagaaaagtcgctaaacatttcaattcagaagtcaaagaccgaaagttttcaattggagatctggtgttaaaaggacaagggtaggaatggagcatttgtaagtgggcactctctgaaaacagtagtgtcggacctgttggatatcttaggaaatgaaatagtttcaggcatgtccccccaccttcgataaagacatacttttggtatcacccaaccactgatagccaatttggataaagtagaagtaccccgtttgattctacttcagaggagatttcaagttaaaatagcatctaatctcataaggagtaggctgaggccagcctagctctgcataaagaacaaacatcgctgaaaggtacttgataccttttggggtgatttgtgttgggcacattttaaagtatgatgtaatgtctctaaagtatgggtgcaaaggtagtacttcccctgttgaatgtggtgctcagaccacgccatcaagttgagggccaactggtgtgcttgttggttccttgacggtacctcacactggacacctctcactagtccactctctcttatcttattaagagtctcggcactgataacagatgaaggagagacccaatggtctccctcgagaacttgaggctcaccagcctatattagaacatgttctacaccaatcaccgaaggctagccaagcctattcaagggttgtctgtcaccatgatacgagctagggggttgttggagaaaaaagaataggtcatgtattgtctcctcctagcaggtacaacctcctccacctcagacctgctatttggggtctccacaccatggtcggctataggcacctctacctagccaacctctggatctctaccgtctagaggttgcgtggactcctctacgatattgaccctacccattgttaccagccttaaatgtgagggtcaaaagttggtgctctacgtatgactacttagttttggccataatgtatcaatatcaacccagagttcactcagaaagtcatcagagcgaactagatgctagtcaacaaaggtaagactgactgaacctatgataacacagttgtcacctccccagaccaatacttgaaatcacctacatagaaaagacaag

SEQ ID NO: 310925 - DNA, 1617 bp, Cannabis indica
taattttcgagtttattattaaaaatacgggcgttacacttttcctcattggaaacttctttgaaaacctcatctcctaagctgagcaagattgcactatgtgtttttttctcaatctcatacagcttttgcttgtcttcactcaattccttgagagaagtttcatcaatggtttttacaatcccattgtgaacgagtagaacattcatctttatcttccaaagtccaaaatcatttgccccattaaatttgtctatgtcaaacttcgcaccaaccatgttcttgacagattattaaaacttcagacttaaatcttgatcgatataaccctcaattctgataccatttagcataaaaataccatcgagaaacatcaagactcaatcactaaaacaaaactcaccaataacaacgaaacctaaaaaaaaaaagaaaactcaataaaaacagagtaatattaaggattttaggtggttccaccgaagtcttttaaatcccaatccagtctactgtaggaacatcattcaaagtcacacaggttttgattatctttattcaatcacaataaaaataaaaatggtaacttgtctaagagctttacaacaaattacttggggtttggttaggaggaatgaaaacataggaataagaatgggaatgagaataaaatttaaaatgcataaaaagttcgataaaaaaatcattaaatattttcttatgatacatgggaatggtctttccttctattttaaaatggaatagtcataccaaaatagtcgggcattccattagaatgacattctaatactttaaaatgcaaccaaacaaagaaatagaatgaaattattttatttccattctatttcatttcattatctccaactaaacaccaccttagttcttggagctcaaagaagactctctcctcacttaatctctctgttttgacaatgagattaacccattacaatagttaggatgagttttatataagttttggttctaaacagaaaaagagagcaaaaaagtagaagccttctaactgaattaactgccacagtatctgaatgatgagctagttcctgaggtggcaagtgatttgatcacaacatcacaataatcttgacaatttacgtcaacgaaggatcactttctcaaaccattattcaaaaaaaaaattgatcaaaatgggaccattattagtgtaggctacacaaaatttcacacaagagtcgacttttcattccactgcatccatggatcataagctttagaatctagagagtactgtcaaatttttggccacataattcagaaatgatcagtattagctagggaaacagtcaatcatatcatccaaaagaagtcttgtaacttcttggactctagcttgatatttctgcttcattaattatatctcttctgtgtgaggccccagctaagctagctgtttctttctgctttccttcattatttatatatattttctttatttcatttgattgtttatacatgaagtctacgaaattaaagtatatgttactacaaaaaaatttatttgtaatggcaataaaatttacgattaaaagtaaaaaaattataattaattataaatta

SEQ ID NO: 310926 - DNA, 1378 bp, Cannabis indica
aacaaattgtgatttttgtgactaatacttttagccaagcactttttagttacaacgtaaaaatgataatttatgattagtgacaacttttttacttttgtagtgaatgaattcccgtcgaggaagcgagtgtcgtcccccaccccgtttaacatctggtgacaaaaaataatctcaatccccatcttgttcctcatttagacggagaattctcacaggcccattcccatgggataaatgtgcatccgctgtgttgaatagggcaattctctaagctctggttttcctttgtagctcttgggttttttgaataaattctatttaaatgaataaataaatagctaatatttattacacattgttgaccccacttttagtcaacgacagtaagtcaattattaagcaattataaatgtaaatcaaaataaagaaaaaaccaataagcaataaagaacaccagattttgaagaggttcgacccctttagtacagtaatagcctactcctcttagattgtattaactcgagaacaaagaacacaatgtttcctctctcaaagctcttacaattaaatctctgagtatttctcttagatctctctctaaagcaattatttcgatcccctttctagtgaagctagatcactatataagggtcttaatgcatgagggaaggtttcttttttgcttacaatgtctataataggaaggaacattcattacataaatagaatacacaatatagaggattgagacaacctgccgtatccttctaattcaatcccatgattgtaaggattgtcttagtgcctagactccatgatatcattctgaagtgatcaagtcctgataaatagctcagaaaacaaaactagctctctcctcaggtagtctgccttttaccctactaaggtaagtagacgttgtgcatgtagatgtgctacttgaagtctgtttgggatattcatctccgcccaggtgcaaggaatattagacacgtatcactggtatgtgttggcatgtcgtagtgcaaatactgggataacatttgcccctatgtctacactggacctccgaggtcatacatggactttactcagtctggatccttatctggacaggtggcacgtgttcgacgcgtctgttggtgatccggcgtcactctaaccaagggtcttctcaattttttggctcattaatgctgattgacatatacatcaaaccacgcccaaaaattagcacgttttgacatttaccattcaagtaattgagtgctcaacatatacatttggggggaaaccgagttattcaaattttgatatgattactttgcctcacaaattagcttataaatagggcagaaatccctaatcaaccact

SEQ ID NO: 310927 - DNA, 884 bp, Cannabis indica
agaaatataatactgaggttgatagctaaagcagtgtgtctcaaattcaaactttgcatgctgagtactgttgaaaacgcgtctgtggccctgtggggaacgagctatagctatattgtttgtttggatatagattaattaattaattaatttgtattttatctattttttttgtttaatttctggagtaaaagttaaaacaaagagaattgagagactattctcttcatatagttgactttttcagtattacttaaaatatgtcgatgataatgcacatgattatattaatttaaaataatgatgtgtgcacctaaattatccaccataaaggtgattgattaatataactctctttgtaatgttatgcacatagaattacttaatttgatggcgaaaaagagtgttactaatttaatagatgcagttgatcatacatatgatcatatgatgatttttattatatagcagatatatatatacataaatttatatatatagagatcatccaagttacttgggataaggaattaatgtaacattattgttattaagcattttatgttatgatactaacatttcaaaaatagtattttataagtgagagtttatagtgtccgactaaaaataacagtacattatatactatactatttttttttttatattttaatattaaaataatatgttagtaattaaacttttatatttatatattatataagggtagatactattttagacccaatattttgcaaaagttatcaattagattctctgttttgttaaacgacaaaataaaccctgtattttctaaaattgtacagataggaccctgaattgatttttttgtcaaaatataacttaataataatctaatctaa

SEQ ID NO: 310928 - DNA, 588 bp, Cannabis indica
tattgatctcttgatgaaccttttgctcttatgaagtataaagtagttgctacacttgttgaatccacttcttcgattatgtttaactttactgagcgataattgatactttgtgaatttacttaaaaaaaatcaagaaaagattagtaacaaataataatcaaatatttgtttatcatcaaaataagtgagtaatcaacatttggtcaacatattagtgagttaagtaccaacccacactattcaaggtggtactcaaatctttgtagaagaaagtgaagacttgttgcatatcgagttaaaagaagcaatcaaagtttatcacttggaaatatcctactacaggaagggaatcaatggttagagtgattaaacaaaaagagtcactatttttgttgcaaccaatgtaagggttcttttcctttttgttttgcaagataaggaatttttttccttttatgtgttatttcatatttaggatgttagattactatgtaataatcaaacaaacatgttagttaattaagatcctcaaaataagtgccaatagggctttactattgcgattcaatttttgctattgcaatt

SEQ ID NO: 310929 - DNA, 1212 bp, Cannabis indica
ctcgagttggcaacacttccccacgagtcgatccattaatgagaaatgaataggagacggtagacatgcaccggtatatcagatccaccatgatactatgaaatcccatagcagtaagcattgcagtaacaaagtgccattcaattctatcgaatgccttactcatgtcgagtttgatggcagagtaaccttctttacctcttttcaagtgcttaagcgaatggatcaattcaaaggctaccaagacattatcagtgatcaatcttgatgagagaaaagcactttgtgactcggaaataacttgaggaagaaacggtttcagccttaaaacaatggatttggaaacaagtttatagaggacattacaaagactgataggccgtagctgagtcatatttgacggctttttgactttggggataagagttatcaatgtttgattgaaaatggtaggatctcttctctcgttaaggacttgtaaaacagaacaagtaacaagatcgccaactatgtgccaataattggtgtaaaacataacggacatgccatcgacaccaggactaccatctgaatttattgattttaaggcatcatagacttcagtagcagtaaaaggccgtgtaatctcaatattatcagcctctgtaattgttcttggcaccttagattgaataaattgaagggccgcattatccacaccatcagtagtatagatgtcatgaaaataatctttaaccacctgagcaatagcagtttgtgaagtgtgctccacaccagtagcatcagttagctttttaatagtgttgttcttcttacggctattagctttttgatgaaaaaactttgtgtttgagtcacccgatttcaaccaattcatacgagaacgttgcctccaataatcttcttcttgtgctagtaactcatcaaggatgttctcacagtgcttcagttcttcaaagtgttcaaaagtggtggcatgagagttttgtaaggcagaaaccttgtgttgtgtgctattaatctgccgaggtaattcaccatacttctgcctatgccaggtctgtaggtggaaagaaacagcagagagattatttgtaatctgcagaagaggatcagcagtagctgctacccaattcttgagaataatatctgtagcttcgtcttctttcagcctgttaggctatttttagcctatgttttggatccaattta

SEQ ID NO: 310930 - DNA, 2019 bp, Cannabis indica
tctctcttattaattacttaacaaactttttcattctcgccaatctaacgagtggatatggcttaaaagtctagtttaaatttgtaagtcaacagtaatgaacaataataaaaaaattcaatacaccatgtttgagagaacaaccttagcttttattcaaacgaatctgtacaaaaaatgagagagattaaagcttgatcagatacaaaatggagtttatctccttacagaacacctcacaatgggaatggcatgatcagacacatatgccttcctttacagccttccttccctctcaattgttctctatctctctaaactgtattttcaattaagctaatctagtccttatatagcaatggctcgagtaagtgagcctttagttctaactgactaacctaatttttacatctaggcaactaacataacaaaattaattagaacacctaagatagatgggatctactaacttgtttaggtaatcactttcacaggatcaaatatgagaatatatgggtctaagactatttaaattatgggaccctcacttttagaaatataaaaaaaatatatatatatatatatatattgaaaaagagtgttatgggacttgaatagacactattgcataatgtgccatatacccaaccaaccaagctgtgaatattttttgtttacaacacacttaattaattttacttcaataaaagcctaataagactttttattttttattttgaccactgaaaagtgtgggtcctatgcaagggcctagcccgcctatgcctaaggttggccctacactttcataatagttagtgtgtatatattttagcttttttggtgttttttttaataatgaggtgtgaactcatgagcaccaggatcgaccctaagatatatggacctaaggccatttaaatttcggagccctcactttcaaaaatacatataaaaaaatattgaaaatagattgtcatgggacttgtagccacaccattatgtagtgtgtcacacaccccaactaaccaagctatgaatatttgttgattacatgacaatttacttaaataaaagtttaataagacctttccttttgttatgatcgatagcttgatcatgaaactcatgcataatcaagacaaacaaaaatagtaagacaagtgatcaagatcaattagttgacccacacacaaagaactgaaaaatagaacttagaacagtagacaagaaacttaaaaaccagatgcaacacaaagaagtaacgaggttcgaacagtgtgattttagtgtcagctgtctactcggccaaaatagcccagtggctttgatctttattgagctagaaagaatcgattacaagtaattgtttcactaatgtgttctcaaacacaatcactcaatgaagcctagcttcaatttacataaatctcacttgtggcactaagaatcaaaggccatcacaactttcttttctctcctcttttctctctaaactagctcactaactcatctcaggatctctcttaacttgtcccaagaaatgagaaggaatgactataaatagcctttggttctttggactgtcataacggacagttagttaaaacaattgtaattggttggagccaaaaacaacctcacttaaagacaaattacaacacatttttttttattttgggcccacattttgcacgatcctagcccgccaaagcttaggaccggatctgaggaacactatgacgtttatgttaaaataagataaaataaccttaattttatcaaagtaattaaaaataagtaaaaaaaaatctaacagagggtttcttatatccttagctactagtagcaaggcagaatgatggcgtcacattaatgttctcattttcttagcaattattctcggagattaacatagatcctttaaagaaaaaaaataataaaaaataaatatatatatatctttatatattaaaagtggttatttaacactattttttagtttaacagaatatactt

SEQ ID NO: 310931 - DNA, 1853 bp, Cannabis indica
ataattttttttcatatttttaatcaattatataaatttttcactttcttaattataatggaaatttatatttcccattatgatgattatgaaaaggaataatagttaaattcaaagggagtgtaaagagagaaagaggatattccatcttatttaattaaaaaacaatataaattataaaatgtttgagagatccaagaccgcaaagcaaatactgctttttcagactaaagtaatacaaaataactgaaaactggacattagaataagttttggtaagaagaaacataaataatgttatgaagattccacgtgaccacctggcttttcttataagaaagaaactttgcccctttttgtttgttttattacattgacaccaggatacagctatgagaatgagatctccatctcatcaaaatatattgccttttttagaaattgtgttttgtaaaagttattaattggactttttattttgttaaaatataaaatggactatatactttctaaaatagtaataatagaagctcaattttcaacaattttattttttaatttaaataactttatgataatttttaacacgaacaaatatagaaaatataatcagttttatcatagcatctctagatcaaattattattgagttttattttgacaaaaaattagttccggtcttatttgtacaattttagaaaatacaaggtatattttatcatttaacaaaacagatagtacaattagtaacttttacaaaacacaagttccaaaataatatttactctctataaaattaataaaatgttttttttctttcatccatcatgcacataggacagagatttgatggggagtgctctcaccgtcctcatttttattaaggcttttaatctttattttcatttatttgttatcagagggggcatagaatcctttaacaggggcaaaaacaaagcgaagattcttctaattagaaaataaaatttataataaaaatttaaatatataaaaatattaaattacataaaaattaaaatataacattgttattcaataaattaagtattattcaaaacacaacttataattcataaaagggatactaatatactaaaacaatacaaacataaattataaaatattattagaattataaaataaaatactaaacaggttcccgtcgagacagatagtgttatctcaatccccactccgtttaacattcgggacaaaaaataatttctatccctgcactgttccccatttagacggaaaattctcgccctattaggagtaggtccctgcgagcctatttcatgagaaaaatatgcatcctgaactaattttttctcaaaataaaacttaataataacctgatataagtggtatgacataactagttacgttttctgcatatgtttgtgctaaaaattatcttcaagttggttatattaaaaaaaaatatcgaaaattgagctcatggtcctatttgtactattttaagtgtcgtttagtaactcttttgttttataattttttaatcacaatatgaaagtacaatttttatttttaaaaattttatttttgaaaaataaaaatgcattctgtagccacttttgtttttcaattttaaaaatagaaaataaatttgtattctgtaaagttcattttgattttatctaagtcgggtctaggtccaagatcagattcgggttcgagtcagaggccgggttcagtaccaaagccgtgggggtggggcaggcccgaccctgggcataggcgggctaggcctgtgcctagggcccacccagcccaggggcccaaaaattgtttttcctcttttaaaatta

SEQ ID NO: 310932 - DNA, 1519 bp, Cannabis indica
attcaatcttgttatcttctttcctttgaatctctttagagcttagagcagccttgacttctgtcatggtgagggagtctttcccatacagaatagtttcaacaaaatgttcataggctttaggtaaggaacttagtagcataatttcttggtcctcatcatcaatcttgaccccaatgttgcataaatctaggatgatcttgttgtagtcatcaaaatgccttcttaactctttggattcatccattctcagagtgtagagtttcttcgaggtataatttgttggctagagatttcttcatgtaaatctcagaaagtttttcccataatcacaaggctttctcctcacttgggacttctcttaaaacttcatcacccaaacttaacagaattgcactgtgtgctttggtttctatttcgaacttctttttcttgtcatcaatggctgctagagcttctatatccaaggcctctgagatacctcgatgaaccaacaaagctttcattttgattctccatagaccaaaatcaatggtaccattgaacttgtcaatttcgaactttgagctagacattcttgatcttcttagtgagttctttgaagaactaatttgattcttgagttggcgagattaactgttatcaccgcatatggttaacactctggattattaaataattagggtttatgtatgagacttaattattatttataaaatgcatattgtggaaatttatttaagttatttatatctatttattatgctatttatgtaatttttcaatttttgtagttgtgttcggaagctgtggaaagcgacgttgggcctttagagagtcgcatttatatgttttagaatattattagcaagatatcattgttggatattggaggtgttggaatttttgggatttgaaaatgtctaagttacccttgggagtttgtaattttttaatgttggttagaagggcaaaaaggcctttgggcaagactttatttgtcttatctaggcttgttttagtgctggatataagctaatgttttaaaataaattcttttatttacttagattagaaggaatcaaagaaatttagtgaaaaagcattttaccctttcttcaactctctctctctttactttcgattctcttgggcagcagctggggttggtgtaattggagtggaatcaaggaattttagtaataatagagcgttttggccaaggttatccttccttcattccttccttcttgattttttgtaattcaggttagattttttatatgagattatgattctagatggttgtgtgtattgggttaatatgttgtttaattctggagttagaagttaattattcttgctattttgagctgagatggaggtttgtgttgagaattgttcaagtttaaagttagagaacctaagttaggtctctaatggtgttttcataaattgagttgtttattgtggtttgatacttgatatgtgttatttggggtttagggtttagggttta

SEQ ID NO: 310933 - DNA, 1622 bp, Cannabis indica
caacctggggcacttccaaccacaatacttaaaaaatatcctgagcattttcttcatcttcatccaaaacgaggaaacaagtgctttcggtggagaagcagatcgacttggaggccaaaaagaggaccccatcgcccaggttgactatttgtcaacctaggccacttccattaacaattcagatgaagtctttcgagcatattctccgtttttttcagcaatgaagatttgagtgcttttgagaaacaaacggagccgtctgggggtcagaattgggacccagcgcccaggttgacactgtgtcaacctgggccatttccaagaagtttttcgaagaagtcttttagacatattctctattttcatcaaagattaagataaaattggttccaggaatcaaatagagtcatctagtttccagaaactggacccagtgcctaggttgacacctagcactaggcttagtgcccaggttgacatattgtcaacctgggctgtttccagtcattcttccaaaaaagtgtttcgggcatttttttgtcattagaaataatgaagatacaagtgatcttggggagaaaacgagatttttagggagccagaatgggccccagtgccaagttgatatggcactaggccttgcgcacaggttgacatataacctggttcacatgttttcgctcctcaaatgcaaattgtgctctaggaattcttcttaaaatggtcaaaaatggggtaagagacctctttcgcaatctcgaatgccatagaagtatcaaaacgagttcggggaagcacccaggttgacacctaacctggtgcaatgggttctacttatcagaattcgattcggtttcaagcattcaactatctttttcgtagtaaacaagagctataacttgtgacaggtcaaattctttttcaccctttcaacaaggtggaatattggcaaaattagagagttttgaatctttctaatttccaaaacaacgacatctctaagaattggtgaacaagttcaccagaagattgaatctgactaagtggtgtcattacaacacttaggcatcaaaaaatacaagcttgggatgttttggcactcacccggcatccaagttaacgtcagaatgtcaacttgggcgctgggtgttaacttggccacagggtgctgaacaaccttcagtaaaagaccataactcactcaatattgatcctattgacgtggttaaacttgaattttgaagctatttaaaagatatatcaagttatttctcacatccacatcgcaattttgaagatttcgggtctaaaatttgtcctcaaaaaagttgataacccgaaaatgatccgagggacaagattcaaagtccaaaaattggcaattttcaccattggatcatcatgaatcatcatcaatggccaagatcagtccaaaatgtttttttttcatattttttgtatttttaattattattttaataggttctccttttctataaaaggagggctcctctatctcatttttcacactcttctaagtctctattaacccaaaaattaatcccggtgacatggacatcaatgtttgacatgtggcaagaaagaaaatatcttagagttga

SEQ ID NO: 310934 - DNA, 998 bp, Cannabis indica
ggagaggtgacggaacgctcgaggactccctaaacctcgagcgttccagctgcaaaaactcatttttctcggcggggtcgcgatgcaacacccgccgttggttcatcatcagagagagagggaacaacagcgtcttcactaggggctgcacgagcacgcttcagcatgctcctgacagagtcccccacttgagttgtctgacgagtaaagtgtttcctggtgccagcagaggaaataggagaggactggggtgaagagtcattaatgaccaaaccaataggtctagttcgaggaggagtggatgagggtaaagcaataccttttccttttgcagtgtgggtgacggtagaggttgtcataattggtggaggaatggtggagggtgaagtctgggaatgaggagacgtaggagtagtaggaatggtagtggtgttggtgataggacgagtgggagattgcacacgcagaaactgattgacagcgtgctggagactctagtcatgaggaaaaaattcctcaaacggagtggcattggaaatttcaaaaggattcttcttaaacagagactgtgccggagcacggagagtgtcacggtattctaaaacaggtggagaagggaagttgtcacaacgaaggaggtattgggtacaacggttgtaagtgtgatccagaaggccacaaaagtaacagaagttgggaagactttcatacttgaaacttatccattttggttcagggatggatcgaaaacgaattgtcatgcccctacgcaaaggcttggtgatgtccagcagaacacggattctgagaaaagggccagagttctcaaggagagaaagggggaatagttcaataaggtcacctaattcatcagctatgaactgagccaactgagggcttcttctaccaaagggaattcggtgagcttggatccagaaaggagtgtatctgatactttcaggggtaggggtaggtgagacatcaggatgagtgaaaac

SEQ ID NO: 310935 - DNA, 960 bp, Cannabis indica
ataattaatatagtatattacacactaacgctatgcaaatttgatacgaaatttcacattttagtgttgatataccaaagatgtgaatcatttttgtgttcataatttttcaattttttaatgggttagtaggatagaatttagaagtaatattcattcacattcacaataaaatcaattggtaatttgctctgttagatacattaatgttcaatagtaattttattttacaaataaaagtatgagtatttattataaatcttacaaatcagtcaccatatatataacacaaaagaataataataataataataataataataataataataataaattgtataaataataaatgcaaatattaattcattaatacttggatttataattcattattttcatggtgtttttttgcttaattctttcttcttttgggatgaagtaatattgataataattctcaccttatacggaattgttggtgaaacagaaacaccacacagtaaatgaattatttattacagccaaattttgaataaatacatatatatatatatatatatttaaatatataagcgtgggtaataaatatgagtatttaatatttgaacaagataagaaaagagtacgagaggctcatcaatcactttaatcaataatctataacctatgctttcatttcattcattaccaaatctgctataattaatctacacatttctttatctcaaactatagtatacatatcattgttagggccgggtcttaataaattcatttaatctattattgaccgatttaactgttagacttttatttgggcttacattatattttattggttttattaaaacttgggttgattggatagttctttgctgtgttagcccatgttgttggtgatcaattgttaatgggcttagcatctgtgagtaaagtctaggtgaagcagaagtgtgg

SEQ ID NO: 310936 - DNA, 690 bp, Cannabis indica
gtttcaagtaaaaatcccaaacctataagaaaatttagaaacaaacataaaacatttaaaatgaaactaacaagtaaaccaaaattactatgttagttcgagagaattcttaaccttatacacatctaaaaatataaaaaacagccttatgggatcctaataatcagaggatggggaattctactgcctttatagaccatacttccaaccaacattctcatgagcttagatcacatcaaattcttgttatcatcatttttacactcacaaatgctatatctacaacataacaataaatgagagttacttaagcatgatgttgatgtttgttttgttaatagtttatttagtcaaaatattaagtcaatttcataaattagtaaattttcatgttatatatgttttgtcgaccgagttgactcagacattaatctattctcttcattttctcttaaattttaattctaaaagcatgtaaacacatacatacacataaccatataataagatgccaacagtaattatagtattgaactctagtttatattattctttcatttcttcatgcattaaactcagtagaacaaaatcattttctcaagaaagataaacaaaacaataaaaatatagacaaaggtagactagtttaattgactaaactttctactgagaaatatgtccttaatcaaa

SEQ ID NO: 310937 - DNA, 3489 bp, Cannabis indica
aaactaaaaatataccataacaaatgcacataaactaaaaaatatctagacaataaaacaattatagaacacttaaagaataagtaaaagaatgcttttaagaaatataactgattttggagagcttgtctgcccgtaactttgctctgtggtagttaatatagttttttttttttaattgtctttcttctttttttcaaaatttcccctgtataactgctcccgccactacttcttcttccctgttcttcactttacccataactgctcccgccactacttcttcctcctttgtttcttcacttgcctgcatctattttccctggaattcattcatctcaactctaaaatggaatcctttcatccagttctttccaatgctattactgctcatgaaatagaagttttcaatatatcaaatgttgtttctccaactccaactcctaggcctactctccatagacttttttgtagaattttctctaaaagggattataatttaaatcagaagcaactcaaaattttcatttgtaaacattggtaaggaaggtttgctgttgatattgctgattacgaaagtgaatctttaggagttacttttggatgtgaatgagatgtaagaagggttctttctaaagaaccatggcactttcacaatcttcatatgatattatgtcttccaactgctttggagaatgccacaattgaatcagtaacaactactccctttcgggttcaagtattcaggcttcctttcctcaataaatctgaaagtcttgctaaagttattggtaatctcattggtacttttgttgaagtttttgatgaatctttgaatgagggttggggtccctttttaaggattagagtggaaatcgatgtctataagcctcttcttcggggtcaattggttactcttccatggttggctgatgaactatggttagactttcgctatgagcgtcttcccgatttctgttatgagtgtggaattataggccatgtctttgacaattgtcctcaattcctagaaaaaattgacaatggccttgatccggacttgccttatggtcattggatggaaggggctgctctccctaggaatacttatgattgatatcgacaagatttttccaaatcggggccttggccctttatcactcggctggctagaaacaccatttctccgatcatatctcatcctagacaaccaccagccttaccacgacatatcacaccacaggagaaagggaaatctgttgtatagtcaactcataattcccataacacttttgtcatgctacaccagaacaaaaatctctctataacaccacttgattctctcacaaaataagtaccgggctatgttgaaaaacaaatgcatcaagacaagggaaaagctattgtggaacctaactatgatattcccccactctaacaaaaagccttcaacttcacggctccgactacaccactggcaaattatgaacaaggtttcgaatactacttatcattctcatagagcctcttcaagcctctattcttccatcgatgactcaaggaaacataacagctcgaatccctcaaatgcttatgttatattggcaagtacaaacctgctggtgtaattccaactactgtactacactctgatttcactgctacaaaattagtgcctctatcaattagcactccaccggcctacatttacttggataatcaaacaaacactcattccacaccaatttcaccaaccactgtggatttaaacacaattttagttgggccaaccactatcacaaatgtcgatgctagtgaatccaacttcaataatctgtccactcaccaacattcgaatgtccatgacaatcgtgtagcatttattttttctaaaagacaattggtgtcttctagtggcaatgttagacaagtgttaaagagatgccgcacccgaagttcaccccttgctaattctaccaacatgttggagcaaccaacagtgaatcctgcctttgagttttctgacctctcattgaaggatgacaccaaggatgcaaaattggcgcaggctgaccctcagcctcgccagtcgccacgaatatcattagttggaatgcacgaggtttgtgcagtcctcgtgctttttgttagctaaaactgctagtgaaacaaaattgtcctgatgtaatatttctcatggaaaccaagttaaaaactggtgccctttctaaatttcataatgttttacatttttctaatgggataaaaattcctagaataggtttagggggcggtttaatgttcttatggaaatctcacatcaatgtaaccattctcaattatacaataaactttgttgactgctatatgtcgtgtaataatggcctgcaatggcacttctctggtttttatggcaatccaatcacatcttcgagacatctttcttggacactccttaaaagactacatgactctgctcctttgcttccttggttaattatgggtgatttcaatgagatctttactgttgatgataaaattggaggccccccatgtccaagtaaacaaattgaagacattcgtgatgttcttgattactgtggactcttgcctctctcttttactacagaacctttcacttggcacaacaatactcgttcaaatgctaatgtaaaagagcgtcttgattatgttttctccgatataccatggacgaatcaatttcaattgccaacactgaaacatttggacttttatagctctgaccatagggctttaattgtttctctcttgctcaatactcaggcagcaccaccacgtttcaagtccagatttcattttgagaagctatggcttaaagaacttgagtgtgaagattttattttgaactgttggcaggaaacaaatgactcctcaaccatgaacttgctgcagaatattgcagcactctcttcaagtctgcaatcctagcatcatcataagttcagtgatctgcccaagaagataaaatctgctcattccaaagttcacaatcttcaagactcatacgatacctcaccatcacatttctcagagcttcaccaatctgagagtatccttgacaacttacttgcacaggaagaggagtattggcaatagagaagtcgtatagattggttacaagcaggtgactctaacaccaaatattttcatcagcgtgctaattcttgcaaaaacaataataaaatcagttattttatggatgatactagtatagaacattcctccaaggctgacaatttaagactaattcagcaacactatattgacatttataccttggaagggtctgatatgaatgccctggtccatgttctaagtacgactccatctgttatttctgctgatgaaaattaagctctcactaaagctttcactgctgttgatgtctgttagaaatattttaccaggatctagatttactaccatgtatgtttcattaacatccta

SEQ ID NO: 310938 - DNA, 1908 bp, Cannabis indica
ggttttggtaccttactgcctacaagagaatttgttatctccagtaggtgggttaggtcccttcccgtgcatgtagaaggtagagaactgtcagtagatttaattgaattatatttagaagattttgatgttatactgggaatggactagttagcaaagtatagcgcaaccatttattataagagaaagatggtaacttttgaatctgaaggtgaggacccatttgtttttatgggaagggttcaaggatcctgaattccaataatctcgacgcttaaggcaagagatttattatgggatggatgtgttggctatttagctagttggtggataccacgagggaagtaccaataggacctgaacatgttctattggtacgagagtttttggatgtctttctagaggagctactagagtgaccaccaaagtaagagattgactttgagatcgaattgataccgggggcagaacctatatctaaggctttgtatctgatgacacctataacattaaaagaattaaaggttcagttacaaggtatgttggatttgcagtttactaggccaagtaccttgccttgaggagtaccggatttatttgtaaagaagaaggacagaacactaaggatgtgtatttactaccaagagttgaatacgttaacagtgaagaacaagtatcctttgctaaggatagacaatctgtttgatcaactacagggaagaccatcttctcaaagatcgatcttcaatctggttatcaccagttgaggattcaagaggaggacattcccaagacatctttttgtacccggtatgggcactatgaattcctggtgatgtactttggattaactaatgctctggtggcatttatggatctgatgaaccgagtgttaaaatactttctagatgattttgtaattgtcttcattgatgacattttgatcttctctaattcagaagaagcacaagacaaacatctttagatggtgttacaacgtcttcaggagcatgaactctatgctaagtttaagaaatgtgagttatggctgccctaagtaagcttcttagggcatgtggtgaacaaagatggtattttggtggacccggtgaagattaaggcggtttgggattggcctcaacctaagtctactaccaaggttagaagtttcctgggattagcaggatactacagaagatttgtggaaaggtttgctaagatttctacgcccttcacagaattaactaaagaattgtaagtttgtttggacaaacaaatgtgaaagtagctttcaggagttgaagtagagttaattactgcaccagtactgaccttgccgattagtgatgagaaattcgtgatttactgtgacacttcaaaacaagggttaggttaagttttaatgcagtctggtaaggttattacctatgcgtctaggcaactgaaggagtatgaacagtggtatcccacacacaatattgaattggcaacaatggtttttactgtgaaagtttggcatcattatctgtatggaaaaaagtacaaaatttacacagatcacaaaagcctcagatactttttcactcagaaggacttgaatatgaggcaatgatgatggttggaattggttaaggactatgactgctagatcctctaccatcctaggaaagcaaatatggtagcggatgctctaagtcgaaaaagtccaaaacaagtttagaaattgatgaagatctcaccggaattggctaaggatatgactagagcaagaatcaagtttgtaattgggaaattagacagcattacgttacagtctgatttgctagagagaatcaagataacccaacaaagtgatccaatgttacaagagtataaagagaagtttgaggctagatcaacaaaggattt

SEQ ID NO: 310939 - DNA, 2406 bp, Cannabis indica
gcagacggtggcgtacttggatttaggcaacgacgacatcacgaatgatctaaacttcatcatatccacgtaagttctacatcaaacatcccaatatgtaagcgtgttttttatttataaatttatatatgctaattaaatttactttttctgtagattgttcaccatgtataactaaatgataggacgacctgatcgacgtacccagtggatgactcttatctgtcctcaacaacttgacaacaaacagtgtggatactacgtcatgaaattcattgaaagtttcacgatcgtagaagatccaataaaactgttgacccgacatgataggttctccactccgtacactaatgatgagataaatattatgcgtgatcggtggaatcattacgtgaaagcggaagcggagcgacaacagttaccgtgttagtcagtgtgtatacatctagatttatcgttactacatagatttgtaaatgtatttaaattattataattagcgttaactttattatagatttttaaatatatttagataatattaattatcgttagttcaattattgtgactatacaaaatgttaaatatatttagacgataatagcgttagtttaattattgtaactatgcagatttgtacaaaattttaaaattaatgcagggaaaaaattacagaaaatctatttttttcccgatttttcaaatgtaacgactgaaaaaaactgccgctaaaaaaaattaaaaaacgtaaccagactataaggcacaatttaaaactgccggggaacccacattagcgacggttttgaaccgtcgcttattctgcctgatttacgatggtcgaataggcgacggttgtaaaaactgacgggaatactttacacgactgtttaaaaacattgggaaaacttatttttgtagtagtgaagaaaggcataaagaaagtgaagctgaaaatgcctttcagtctaaaatcaatttgcagtctcaaaaaccaaaaggtgatgtgaaaaagacacaagaaaaaaaaataaataatgacaagtatcctccatgtggcatttataaaaaaaaagtcacttggagaaagaatattggtttataggaaaatcacagtgccaaatttgtaaaaaaaattgggcacactaaaaaaaaatttcgtttaaagaaatcccatcaagctaattttttcgaagagaaaaatgataaaagtaatctctttcagtctgccaagctgtatcagaagaaggaaaagatacttggtatcttgatagtggttgtagtaaccacatgacaaaaaatgaaagcatcttttgtactcttgataaatccaagactaaagccaaaaatcagtaatggtgacttcattgaagcagtcgggaaagataccattgtcgtagacaccaaaaaaagcaagagatacataaatgatgtactcttggtacctaacatcgatcaaaaccaacttagtataggccaaataattgataaagtgtactttttacattttgaaggagattcttgcacaatctaagataagaaagataaatcctttcaaattgcaaaggtaacatgagagaaaatagatattttcctatacaatggagatatgcaagtagtgtggcaatgcaagtacaaacagatgaatcatggctttggcatagaaggttcggtcacttcaactttcacgggctaaagatcctcaagcagaatatgatgcgagacctcctagaaattaaggagatcaacgcagtctacaaatgatgcatgctcgggaaacaatgtcgtcaatcttttctgtcaagaaaagctttgagagctaaaaagccattggcaatgcgcactccatcaaatgatcaaaacaaacacttcattttcttcattgataattttactagaatgatatgggtttattttatgcaataaaaattgcaagtctttgatattttcaaaaaattcaaaacccatgtcgaacaacaaagcgatcactatattaagacaattagaaatgatagtgacaaataataaacttctaatgaattcaatacgttctgtgaagatgaagaaatggagcaccaactcactgttggatacacaccagaacaaaacaacgtatctgaaagaaaaacaggactgttatagaggcagcaagagccatgctactagagaaaggtctcccaaaacaattttaggctgaagtagtaaacattgtagtctacttgctcaatatatgtccaaccaaagctgtgcagaataggatgccgattgaagcttggaatggacgtaagccatcaacaaagcatctcaaagtcttcgaatgcataagctacagtcacattctaacagagaaaagatgcaagattgatgagaagactgagaaaggaatcttcttaggctatagtact

SEQ ID NO: 310940 - DNA, 1377 bp, Cannabis indica
tgtaatttactaaatccagaacagcaaaattaatgaaagaggtagaaaaaaacttcaaattcaatagtcgtagggctttaaaaataccgtacttgaattatcgtaactcagaaagattcgaacatgtccaaaagtggtgcgactcttcaaaaaatttaagaatcaaatgaattaaggggaatgttgaaagggttcttcgtaacctgatggagaggtctaatatgagctaaaggaagagactggatctttgaaacagagcaaggagaaggaaaaaaagaaaaaagagaaacgtgaacgtgggtctcagagcttgataggaagaagaagaggattttgatccgtgtttacagcagcaaagcaaagttaggttctctctctctctcaatctctctatctattcccctgctatggtaatggtatggcaacaaaaatgaaaatatcgactgaatctctccattcccaattgtatatataaaaatcataacatgtatataataaaaaaaaactatcaatatatattttataaatttctttaaattaaaataaatattgatacaacatgtttagccctttccagttgactaaactctaatctcagcctattttaattaatagagttacaataatcacatcagagaacaatctacaaatgttatgctagataactttataactttatatatttatatatatggttggtgaaaccataataagatgaaagtgaaagaatggttaactgggtcaacaacaccataagattagttttagttctagaacactctcatcatcattcggaggctataacaacaaaaacaatatcatcatgggacaattttcttggttttgatttctctaattttgggggaaatgagaatgcaaaagatctcctaatcaatttccaatctcattcttgttgtggaactcgaatattgtacttctattcctaaaataaaatgcatatatacataatcatactctgaaaaatgaaaaataagagacctgagttgctgccgttagcgagggagaagatgtgtcttcgttggggagggaggagctgtgtcgctttcgtcgttggtgaagatgccgtcggcaacttagggaggagatgaccttcgtcgtcagcgagtaggggagaagatgtcgtcgtcttcgatcgtcggcgtctccgtcgtcgtccacgggggtctgagtctgatagtgattaggttaagagtccaatccaatgctaaagtaaaaccacacacttatgcttgaataacagaaaatcaacttccataaaaccaacaaaaacataaattaacaaaacaaatatatttaagataaatactattttggaccttgtgttttgtaaaagttatatattggaccctgtgtttt

SEQ ID NO: 310941 - DNA, 884 bp, Cannabis indica
ttgatgagtgataaagtatttcattgtgtttgatgttgtaacaagcttaaaaggcaaggataaatttggggaaagaacactctagggagggattatgaaagatgattgatgatgacattattagagttgggggttggaaattatggttctgaagttaaaatggttattaataattatgtttaattttattttttatatatctaaatgactattaataattttttttttaaagtactattaataatttttttaattttaaaatgattgtaaaaagtttatatagatttttaaataaaaaataaaaaataaagggattgtatttatttttttgattattttttatatttttaaacatttaaataaatatttaaatcataaataaaaaatttaatgatatagacgaatgaatgagtgacacgtgcatactgatttggcacataacggttagatacctacggaagttccacactactgacggaaggtatttttaccgccaaaaatacgacttaggtacttatctgttactcggcataaaacttaggtatttataccgcaaattactctatataaaaataagtatttgtgtgatatgaattgtataactcgacaaaagcagagagactaattgttaatattttatcttaatttcatttaaaagtggcgttggtgagtgaccggcgggataaattgaaaagggaaatttgttaaaatatacttaaaaatttagattattattttaatataccacctttaaataaatactttaaatattctccaaacaccctaaaaccccaaaattaccgttacaattcaaaagctttcttctcccactctctctgtctaacttcccccccccccctcctctctgttattcccatccagcc

SEQ ID NO: 310942 - DNA, 2148 bp, Cannabis indica
atgatggtggctagggtgatgattgacgatggagcatcaaacatcctattcaagtaacccctaatcagaatgggtttgtccttagaaggcctgaaaccacgcgagtagcttatgtatggtttcagtggagccgacattgctccatgtggaaagatcaaactaccactcactattatcactgccccaaagtagaccaccatcatggtcgcattcatagtggtggatgtgaagtctccgtacaacgtgatgcttagaaggcctactctctatgacctttgagctatctcctcagtgtaccatttgctcgtcaagttcccaatgatgcccaatatcagttgtctccttggcaatcaagaactgcctgcgagtgttataacacaatcgttatcacttgccaagaagacctcctctattgctatggcttcaaaggggacgaacaagacctcctctactattatgacaccagggggacgagcaaggcctctcttgcaaaagccggagagacgatgaagacttgtgaagtccaaattacggagaagacggagacgacacctaaagccacttgaaggtgcgcacaagccggggaagacattgacccctattttggggaaattgacttaggagttggtcttattaaggaactcaaagaacttcctctcaacctatcagacccgactaaggttatcaagattaaaacaaacttgatgaaggtcttgaaggagatgctcatggcttgcctcaggagaaatcaagatattttttcatggtcacatgaggacatgatcgggatcgactcccaagtcatctgtcacgccctcaacatagacaaagttaactttaggcctgtacaatagaaacgtaggctccttgacaaagagcgctccaaagctttcaaggaagaagttaaaactgtttgggtatctaaccctatgttggtgcctaactcgaatagaaagtggagaacttgcatcaacttcattgacctcaacaaagcatgccctaaggattttttcccactaccacaaattgatcaactagtggacgtgacagttggccatgaacttctcacattcatagatgcctattctagctacaatcaaatcagcatgcacgtactagatgaagagcatactagtttatgaactaacattgggatttattgctacaaagttatgccttttagacttacgaatgtaggtgttacttatcaaagactagtctaccgtaggtttcaagaccatatcggaaacaatagagaagtctatgttgatgataggctggttaagtagaaaaggtctaaagaccacatcaaagatctagaggagtgcttcaacatcttgcaggaatatcgaatgaagctcaaccttctaaaatgtgccttcagtgtctagtcatgaaagtttctcagattcattattaacttaaaaggtattgaagcaaatctagaaaagatcaaggccttgcaagatatggagtcaccattgcagataaaagacgtgcagatcctaacatgacaaattactacacttagcaggtttatctccaagttaaccgagtgtgttcccttctttaatttacttatgggaaggaacaaggggtttgattggactgatgaatatgagaaagccttctaaaatctcaaacatcatctggccaagcctcccatcctatcctaaccaatagatggtgaagaactatacatatacttagaaatcaccaagcgtgcatccagtgctagtgcgtgaggaagaagcggtacaacaccctgtgtactacattagtaggcgtcttatcagggctgagtcaagttatcccccattgagaagctagcctactacttggtcctagcctccagaaagctaagggcatacgtctaagctcacacagttaggggtgttcatccaatccgcactattttgctcatagtgcatccgatccgcattaagtgcggatttcattttttggatccaatctaatccgcacaatagttcaaatccaatccaatccaatccgcaaaagtgtggattggatcggttactttggatttattactttttaatattaaattatttaatatttatgaaaaaatatttttttttctacataactagcaacaaaataaaataaattatagtcattttatgtctc

SEQ ID NO: 310943 - DNA, 1163 bp, Cannabis indica
catttgacttgagaaaagtttcaatcatcaaaaactaaacctgaaaaaaatgaactgaagaatcaaagaagaaaaattgaatacctttcttgagaccaggtgaaacatcttctcctttgaaaacaatgggcacatttagcttcaaatttgatccatcttcagcccaaacaaacaccatattcaatatcttcccagtctcctcatccctatgtatctacacaaccaaacataacaatatcttaaataacaaatttgtcaacaaatgcaaaattgcaatgaataataagctaaagaagcttgcttgccttaataggaagaacattcccggattcaagtaaaactgatgacccggacccggctcggatctgaagaggaaacctcgtggagcaaaagaaaggaagatccacagacttaacgatggcctgaatctgcttcttctccgtcgtcaataaaagcttctttgattccgaacgattgttagggtctttctcgagaagggactgactgaaaacaacggtggggattcgaccctgctcacgatctctcgctgagattctggcccccgtacactctcttgggatggcttggatcgtgtggtacgaagcggctttggatgaagatgttgatgttgttgtgttcgtcagtaaaaccctaaggcctccggcaccggagcgccaccatttagccatttttcccgacagttttgtcggcgaattagtcccgaatggagatcgaaacctctctctctaccgttcgtctaagggttttgttgcgaggtttaaggctttgggcctgagagaaacgcggaaggctttcaatttgggcctatcaaagcccataatagaataaaaccgaacgttgtctcattgggcctctccaatgcagctattattattatgggataattacaccacgtactgtaaaatttttaaccttttttacttttataatgaggagcggtatttttttacaaaaatactgtataagtttcacactgtattatgtttagttttactgttatttacggttatttttagttattctactgttattttaattgttctgttttattgttttacggttgtttaataaaaaaatagtattttgtaaaaaaaattatgtgacagtaaaattgtaaactttgactcaaaatttagtatttt

SEQ ID NO: 310944 - DNA, 1153 bp, Cannabis indica
aagtcattttactaacgctatagacatggcaagcggttcaaaataagtgtgtgacttactggatcatataataaaaataaaaaagaataaattagggatacatgatgggaaatttgattttttatgcttacatttggttaaaattttttttctaaacaaataataactaatatttgtaaaatatgacaatttttatgatatccctaaaatacccctatttacatcaccccatttacaccatcggaccacccatcgggctacccatcggaccatccatcgggccaccccatcgggccaccatcggaccacccatcgggccacccatcggacccatcggactaccatcggaccaaatctgctaccaattttttttttatgtttttgtacatacaaaagtagcatcaggtgaccatcggaccaccatcggactaccatcggaccccatcggactaccaatttttttttttttttttatgtttttgcactaaaaaaagtatggaaaatttgagaggggtatttttggattttagataaagtggtcatatattttcaatgatgatatgtattagtttagaaataaaatattaggtatatgtaagtatagaaaatcaaatttccctacatgatggcctgagtgaaccacacgcgttttattagtttgtacctaacgagtagcaaaaagctggaccctgcaaaacagagagggagagagagagagagtagtgagtggtggaaatgaatgatgacttaggggtgagtgagtactgagtatggtctaacgtcggcagcaaaaagattaggagtaggctacaaattccaatccagaaaggggccctcacgaatgattgctccaatcctaatatatggcagcctaaggtgatgggctgctttgcatttttatgtccatgtgaatgcgatatctaaccttttcttctttttcccacaattataatttatttatgtacctttctaccatgtaggattagattatgtcactgcaccaagactaggggtgtgcagaaagtcatccaatccaattccaaccgaccgatccaatcccaaccgatccaatagaatcggatatccaatcataattggatcggatcggatgcaaattttaaaaatccaattggatcggatcggatattggatg

SEQ ID NO: 310945 - DNA, 1348 bp, Cannabis indica
cacataacacatatatatatatacacatgttattacccttataaccctaaggggttattaactaatagggcttttgaggtcttttacggtatactataatttaatgggccaactatagtattaagggtgctctcatgtgcctctaacatataattaagttgctaaccatcccattatggttatgagtaacattaggcacataattaatgattgtgtattatggaattaaacctatgattgtattagtccattataataattctaacaaatgtttgataaataaaactttgtttatacattttttatggcatttctattttttttaggattctctttaaaacatatatttaaaatacaaactaattacaaaaatatctgagcaaatctcaattacaataataaattgtcgtgtcataaaaaaaacaccttaattctaaactaatatgcttgaaataaatacaattttgttgctttcaaaacttatttgtatacattttaataatcaattagttatattatggtagcttattatttaaaatagatttgagtaatttttaagtttattttcgaaattaatgagttaccatgtcgtagaaactataatttttagtaaattgtattttaaaagaaatatattatatacatttatgtcactcatattttttaaatgcgaattatatatgtattttaattaactaaataaaaaaaaaatacaagtagcttaagaataattacaaataatgcacatttttaggatcaattggttatgatgtgataagatatacaaattgatcacttttcataaaatgatccacattaatataaaaaatatatcatatacgtaactattgtgaatcaatcaagatttatgatgcaaagaatacttctaaaccaacaaacacactttcaagaaccaaactatctcagaatcaaaaaacagaataatgaataaaaatagagaataggagaagagaacaccaaaaatttaatttttgactcggtcaatattgggaggagtctattgtgtttgtttttttatttcatatacatattttattattatttatttatttatttattattatatatatatataacttttgactcggtcaaatcgagtcttcacattcttcccttcttaaaaatttcatagacaacctcaagttaaaaattaaacaagtaaggatatttcatatacatctcagactctaactctcaagtagcctcgtcttctctatggtttttccataagaccttaactactgaaatctctctgtttcttaatactcttagctctctcgccaagactttgacaggttgtcttcataagtcacatcttcctgaagag

SEQ ID NO: 310946 - DNA, 1018 bp, Cannabis indica
tttttactattttagaaaatacagggtccattttgtcatttaacaaaagacagagtccaatctgtaacttttgcaaaacacatggtctaaaatggtatttacccgtaatatataaaactttgagagatttcaagatattgaagagaagcgaaggaatagtttgaatgcgaaagagatgattatgaagtatgatcaggtaccttgagaagttggcaatcgtggaaagtctttagagaagtggttgtcaatagtcctttgagaagtccctcttgaaagattaagaaattccaatttagtgagatttccaagctgtggaggaataattccacttaatggatttttactaagatcgagatttgtaaactctttgaaagagccaataaactttggagtgcaactaatgttcatgccatggagatccaatatcttcaaatgatgcagttcatgccatgtactgtatggtgtaaggcacaattattcttgtcggcagactctttggttgatgacttgactcactaaaatactttattgtatggtcaatggtactacaagaaatgaaatttttgtccgcttattttatgttggcaaaagttgagtattaattgtactaataaaatagattttactttcgttatatttttgcactggcaaaaagggttggcgaattcgcgtcgatattagaatttttaccagcatataacgaaaaaagtgagtaaaaataatttttccaaatgcgtaaataccctagtaaaagttaggcttttttccagtacaaatgtgcgctagaaaaagtctaacttttcccagcatattaattaacatgctagaaaacgtctaaattggtatcaaaaatattcgctgggaaaagtttacttttacaccagcacattaacatgttgggaaaaatcttaacttttacacactacaaaaaattttacttttagtcataactaaatttgtgactaaagataaaaaagttgtggctaattataaattatcattattgtgttgtgactaa

SEQ ID NO: 310947 - DNA, 1305 bp, Cannabis indica
agattgtcatatcagttaaaccctgtgtgtactgataaatctaggagtatctatttaatcacataatcttgattactttccactgtgctgacaacacaataaacaagaacataaatgtgaaaagggttcagatgaatttataaatcaaataaacaagtaaatgataacatgaaccaaatgacacacaaaagagtgacgaaaatacttctgtttctttattgatatttaaagaataaagattacattgaaaaggagttttatttagggcataaaacccaacaaagtcacctggtgaaaaagcaacagtgactcgaggtaaaaacaagggtctcgctaaaaggaatagaagataaaatttggagttcatgccaagctacttcacgcataaaacgacattttttctcgattatttcttacaaaaatcgtctataacgacttgaaacctcatcctgattggtttttattagatgatatctaatctgggcatcgtttatctcaagaatagttttaggaacataagttttggattcaaagggaaaggcaaaatttttaggacaattagtttataagaattctgggattgttttttctggaataaattgggtcatgtttatgggcaaatattatcccgatttctggaaaatctaaaacaatttaacccaagaatctatgagccgaataacctagattttatccttaataccctaaaattatacaaactaccaaaataaaattacctaaaaataaccaaatagcactattaaaaagatatcaatgaagaaagcaagaatatgagttcagaaaagaaaacaattaagaagatgaggatgtatcacttaccgttgtggttggaattcatgggcagagaaaagcctgataatggtatctgaaaatcatgagattgagtcttgaaaatctctgggatgatgattgatatcgattgaaatacgcaagaaatatgtgaaggacaatgagggcatgcaaattttaaggagaaaacaaccgggatttacagaaaagattttaaggttcgaaatacaaaaatggtgaaatggattgttattcccaatttttatacctaaattttaataaccgttcgatcaagagaaatttgatctaacggatggaaaatttgcgaaagagaacagtcagaacatttaatgctaatgatgtgcctcgaagttctgaactaccaaaacccaaagcatgaaatttttcaaaaatgggttgagatgaaaatactcttgtaatcatttaaaaagttcttttttaaattaaaaagtaatttttaaggggcaattatta

SEQ ID NO: 310948 - DNA, 589 bp, Cannabis indica
ttttttataattaattaaaaaatgcaaaaagatgacaaaatacataatttttttaaatagttttataaattgcttgtggttggttcttactgtaaatagtaaagaaaagataaccatttcatagaatttaatatattacttaatgatatttctcatatttagaaatcttttaatagtatatccttgtctcattattataaaatatttaagaacaatgctgctctttctttaacaaaacgagcatatattttagatgagttacctatttggtggttgagtctcccaatagatctagttatttaatttttatttttattttatattctttaagatatacccacttttatagatgatgtccctattatactcctttagttaatgtagattatgtgctagagttaagtagagggtgagggtgtattgggcaactatatatttctcaacttattctccgaaaattcctcgagtaagttgaaaaatgcctcttttattaatcaattaaccaaatttgcctctaattttatatttatttgaaacatacctctttttatatgtattgtacctaaaataccttgacataagagagtca

SEQ ID NO: 310949 - DNA, 1616 bp, Cannabis indica
tgtacagagaactaagatcactaaactatgaataaaacattccgtagcatattaaatttaaggaatcattaatcaatgcttgctactacggatcactgatgcccattcttcagtgcaagtattcttagttcgaattacagatgtgacatcaatgtaaaggtgttgtatataatagagattatatatgacaaggaccgatatgaacaaagctatctttatctaacctgccatttactataaatacctaattcatatcattgggatgatcaatagttgatcgaccttaatcctgaataatcataaactcatgttcattttattagtttctttgatttactcgttacagtttctcaaagaagatgattcttacaacttctatttcgggaatctaataatgtggatggatgggaacatgagctacaataatggaatcctcactttcctagtagatcgaatgttggttcccttgaagtgctaattctaggacatgaatgttgtggacaaattttgatgagatcaaaattgtaattatattattagggtaaaacgataatttgagaaaaactaattatgtattaacacatggagggctaatcattggaattgattatattaatggacactgcagtagaactcagtaaatataattctataattactagtgtttaattccatatttatagtggagtaatcgaggaactaataaacaaagattagttggttgatgagactccataaataatctagtttattggagcttggaactatagtttcatggtccctgaattgccaacttgaaacactgtcaagggaaggcattaaaggtactgtaatattttttagaaaaatctattttgaatctgaaaaatattaattatttattttcgtgaattactaaataattcttcaaattaattaaatagggaaaagataaaagttgttaagacaaaatttgtcaagacttgttgagaggaaagatgtcaggataaaggacaccatccttgtcctaaacaacataaggtaggcacctatgtccctatgggaatttctctttttgggttaattaattatttaattaattcaatcaagtaaatatttgaatttaaaaagtggtcaaagatatttcagaattgttgagatattttctcaagtagttgagagattctctcatacaaatctgtactaaatttggttataaacatttgtagggatttaactactataaatagaagcatgattaacaaatgagaagagcttttgacaacattactcttcaaatatagagcagaaaagagaatagagctttttatctcaaattgttcttgctcatttgttgagaaaacaataagaacaacatacacaatttatcctaatagctgacactattccttgtgtgtggtggatcgatttggaagacactagtgtgagtttaattgtatcatcctcatcatctagattaatggatactgttggattttgtgccgtaaatatagcccatttcaatataatcacatttactaattaataaagatcagaaatcgttttatgttgcatggttcacatgatttatttgatgattatatttaatttataaattctattaggtccagaacata

SEQ ID NO: 310950 - DNA, 2004 bp, Cannabis indica
ccacgtattttagacaaaattaagggcaacactaccagattggtcatgccaaataataatcacattatgacacatcaaagtggcactgttggtattactaaagatcttgtgttagaaaatgtgctatacgttcctagtttcaaatacaatatcgtatctgtaagttgtttgacgaatcccaatcctttatgtgtacaattcgcggctaaccaattttctatacaggacaagaacaacaagagggagattggcagaggtgaaaccaagaatggtctctacatccttgattctacacctactgactttccaatcctcaatgttgctgctgaagtttggcattcgagattaggacatctgtccaacaagcatttgaatctgttaaataaaactctgaattgtaatactgttgttgttcataaaaattccccttgttacatatgtcctttagccaagcaaaggaaattaccttttcccaacaataacaattttgcttgtaaaatttttgacttaattcattgtgacatttgaggaccttaccatgttcaatctcactctggttatagatattttcttactcttgtagatgatcattcaaggttcacttggatctatcttttaaaacaaaaatctgatgctttatttgtcatacctcagttcatatcttatgttcaaactcaattcaattgcatgttcaaatgtttcaggtccgataatgctcctgaacttgccttcaaggacctttccaataaacatggcatattacatgatttcacatgtgtagacactcctaagcaaaacgttgtggctgaaagaaagcaccagcaccttcttaacgttgctcgtgctctgtgttttcaggctcatatacctattaaattttgggcagaaagcattatgactgctgcttatctcattaatcgcacgcctactccaaattagaaaaataagactccctatgagcttctatacaacatggagtctaactacacacacttaagagtttttggatgccttgagtttgcatctactcttctcgttaatagaaccaaatttgatccaagagctagaacttgtgttttcttgggatatcctcaaggtgttaaaggatatcgtttatatgacattaataataaacaaatgttcatctctcgaaatgtcatttttcatgaaagcattttttcttttcataaactgaatgaccaatctactaatgttgatccatttattaaattgatactaccttctaataatgtcactaacactcctataagtgattaccctactactgtttcagatactccaaaaatcactacagaagcaaataatgttctcactgatgcagaagatagcaattttgccccttctatccaaccttctgcagacacgactacacaaaccaacagtgataactcaactcctattccaagaatatctaccagaataacaaagagacctacctacctccgtgacttcgaatgttactcccccattcaagacaaaaattcaactccccatcaccttgataaatatatttcttatgctagactaactgaatcttataaagcctttattcttgcagtgacatctctcaaggaaccacaaacttacaagcaagctatccaattcaaggaatggctggatgcaatggacttagaactcacggctttaaaaaacaacaaaacctggatagtagttccattaccacaaaataaaagagccattggatgtagatgggtataccaaatcaagtttaatagtgacggatccgttgaaaggctcaaagctagacttgtagcacaaggctatactcaacaagagggccttgacgtctttgacacttcctcccctgtggccaaaatgatcaccttcaaattacttctttccatttccaccataaaacaatggcatattctacaaatcgatattaataaggcttttttaaatggagacctcaatgaagaggtctacatggcattacctcccagactaactgttgggttttat

SEQ ID NO: 310951 - DNA, 1600 bp, Cannabis indica
tatgttgtgactaaatggtctgtggttatatgtattagccacaaaaattacaatttattgtgacaaaatataattttaatgacaatacttgttgtgattaaaactaaattagtaacaacttgtatctaaatactatgctttagtcacaagtaatattttgttgtgactaaaagtcacatttaatcacaaaaaaattatattgtgactaaacagttgtcactaaaagtagcacttatagtaatatggagtgagttgcactctatttgtttcattgcaattttttttttttctgttttaacaagactgaagtcgatatttgtgttgtgccatgcttgtgcctctcaaatttgtgtcaatttcgtgctatgcagaaaaggttgtgggccaacttgaatgtaattactctaaactacttgtactatatatgttatatatatatattttaaaaaattattatatttattctattaatattttcttttgctttactaactaaacatacggttagaatttgggataaagtaaatggaattttatctcaaaatcaattgacaatgggaggagtagtccattcatcttatatattctattatctttctacacattagcaatgtgagactctctaacatttcccctcaagatggtatgtattattatttactcaccatcttggacaactcgatcacaagcagctctttttttggctcactatccccaatcacaagtggttcttttttactgtacttttgtggatcggtatttttggactttttggttgctctttttggctcactatcctcaaatcacaagtggttttttgactttagctctacttttattatcagtttttggatttggtggctcttttttattttcttggctctttttttgatcgttttttttttgggtcggatagtcgttagaagtttttttttttgtttttgttctcataccatgttagaatttgagataaggtgaatggagtttcatctcaaaaccaattggcaatgggaggagtagctcattatatattctattatctttccacgcattagcaatgtaaaactctctaacacacacatatgataaatatctaaaaataaataaaacaatcaatttatattgtctagtcaatcatcaatatatgtaaaggacaagtataagacggtgacgtgacgttctaacatcagttcaaaataggtccatccattctctctataattctctaattttttattagttttataatatataaatggataaattaattaaaaaaattatatctatctaatttaaattttctcatttttatatataatttctattattaatttaaaatatctctaaaataaacattataatcctcagattcaaagtttttttaaaacatataaacataaactaattaagatttttgtcccccgaactatgacatgtaccaaatcataccccatataaactttgaagattgttagaaatttctcctaaactattgagattgttggatttaaggactcttgtctaattttagtaagaaaagtctaacatagatgaaagttcagggggcatgattttgcacatgtcaaagttcgaggggtat

SEQ ID NO: 310952 - DNA, 2027 bp, Cannabis indica
tcgggacgaaatttctataaggaggggataatagtaatatcctaagattaagaaaacggattatcgaaccctaactagtaaaatgtgtaattatatgaaattatattatgatataattaaatatttattaattatactgataaatgatatgttaagacccgttggtgagccatgggtattttcataattttgacccgagaagggtaaaactgtaattttaatattattgcatgcttatggactatattattatatagtatatttattttgtccttctgcaagtattttctgtcaagtcggcgcggtatagtcacaatcagatatttcaggccgaattgggttcgaggtcgaaatacatttttggaattttattttggcattttataattgattgattaatctgaaatttattcgagtaattcgtggtgtgattaaatgatatttttgcccttgaattgtgcatatgctatgttatggccctaagggcattttggtcttttcgatcatttgagttattttcaacaaattggaattttaagtaaaaggaaatgcatttttttggttttttccagctcttaaccgacccatctacgtctctctattctcctctcttccatttttataatctttgtgaattgaaccttgtatcaagcttgtgttgtgaagattttggtgcttgggattttaaggaacttgaggtagccttctctaccattttgatttgaatttatgctgctgaaattaagttgaacaaacatgctttatttgtgattttgctcatgtatgcatgtgtgtagaaagttggtttgatcttgatattattagcataattgtgttgttgagttgtggataattttcttggtaattttagatgagattttaaggttttgtttgtgtatgaaatttgattataggctttgaattttattgttgtttgtaagctgaaatatgatttaggtatttaagctcttgaatatgagattgtggtgatttttgctcaagtgttaagctaattttcaatattgttaaatctgattttgtgatgcctatttgctgaggattaaagcttgtatttggtatttttactctctgcggttatggctttaatctatggaatatgattttgaggtatatgcatgtttggggtgaattaggtgtgttttgggcttgtgtttcgaagctagaaaatggggtttcctgggtttggaacccaagcgccgcagcgcccaccccactaactgggcgctgcggcctgcccctgtgtaaattctgagttttcaacccaggttctgcggccccatgtggggagtgccgcggctcgcccttcgattttgggcagttttgaatgcaatattcaaatgctcgtaactttgtgatccagactctgttttgggtgttccgagtatcgttggaaagctcattccgagctctatatgtttatatggatttgaatgcaaattttattatgtatgtgaaagtggatttagggattaaccctacctaaaaattgtgactaggattatcggcacttggtcacgagcacccggggattttggaatctccatatttgcgggacatcaagtaagatagtagttaggacatagaggtaagcacggtggcgctcatgttgaatattatatttgtaattaattaaaaatcaagtttagggttattacccttaaaagagtggttttgtggcctagggtttttaccctagtgattgttgatgtttaaatgctatgtcatgctttatatgttgatttaaagaattatgcattcaagacataatttggttggactcagtaattagaaccgagatgaaccgttctaaggccttattataattagacgtgtgagcgtaacacgtgagtctatgccacatagacacaaataggcgtgtgagcgtaacatgcaagtctatgctaaatagactataagtgtaatgacattattattatgtatctgaaatgtataatgtgattatggatatttatactgtcttgctgggcttggctcacgggtgctct

SEQ ID NO: 310953 - DNA, 1374 bp, Cannabis indica
aaaaatattgccaacaggttttgcatcgtatcttttcactcttgtatccccatcaccaagagaaaaactacagagaaaggtttgatgcaaattggaagatcataccaataaaggttattataaaattgattctatggactccggtacgcttccgctaatctatattctattgtttgattctcttgaattaattagggctatattaagttttacagtattcttaacacaaaaatgatgcaaataaagagttataaaccgatgcaaaaactctatatcaatcaattgtgtcggcttccagagttgatcaatgtgttaaatgacacaaaataactattttgagactatgacagttcgtcgaaaaacctgtactttgaattcttatttgagtatgtgaattattcctagctaatttcttgaaaaagaattaaaaatttctgtaactacattatatacaccatcgtgtaagaaaaaagagttgcaacttatccatatgcaaatactgttatcaaagacaaaataatattttgttaaaggttataagccacattaagtttcagattggtacaagattcttttcctcccaaagcaagtaacaaataacttttacttgttagttgatataactataccaaatactcattttctttgtctgaaagagaaggcaaagcatctttgttaagggtcctctactaataaaataaactttggaggaagggacgaaatgggattgatcttgcttttcttctttttttttcatatttgattaaaaatgaccaattagggtagctatagttgtttactactcttcataaaaaggatagtctcatgactcattttggcatataatatgtaaatgtatataatttttgagccttaacagtgcagaatctaggctatatatttataaatcgcacatgaaatttacagctcattttccaaacttcagggcttcttctaagttctgaagtcaatattactcacacagttctctataacccaataacaatataataatatattatataaaactatcaaatcttccatgattttactatatattactaaaatttgtcagcttatctttttgagaacgatgtttctctctccctctttgtccatatagagatataatgcaaaaaatatcttatctcagactacaatagtctacgagttacgattattctatagatgatagatcacatcattttctgccctttttttcttcatattttgaaataatattaactctgccaaaaatttggggtctttttttccaaaaaattggttatgacttattattattattattcgataatggacttgattcctatatttttttttttgaataaaagatgatgattttattaatgcatt

SEQ ID NO: 310954 - DNA, 2697 bp, Cannabis indica
aaaccataacaaaaataaaatgttaaaatcctaaatcatcaactacagttaaaaataagttaagaaaaaatacaataaaagtcatatacaaataaaaatgacataatgagacatagaaaccagttacatgaatcaatctgactagtttctacataataacatatgtaatttttgcttaaagtagctggtttttatatatcattatgtaaattttattaatttctgaaacttgttatttgttgttattatatggatgaaaataactaataaataaaattaaagtcatatgtaaataaaaatgatataataagacatagaaaccacttccataaatcaatgaaattaatttctcattttttattgaaaaaattggtttctatgtcccattatgtcatttttattaatttacgaaactggtttctgggtgttattatatggatactaaaacaacccccttcatattttcttatctgttgtcaagacagtagtcaatcttcaatagatactaaaacaaatactaaagaaggtggagaaaagcacaacaccatgaggagtggcaaggcaccaattcttgatgagcttaaaaaatagagttttttagctatgatttttctagtattcctgtagtgtgtctggtttccctttagcttacaatgcataaaataggaaattatattaattacataattacaatacacaaaacagaaaactagaataggttgccatatttatctgattcaatcccacgattgtaggaattgtcttcgtgtttgagctttacaagatcattttaatgtaataacttcttgtaagtagctcaaaaacgtagacttctacctggttagatgttatgtcttccaccctcgttgggtaattaacaattgcagatgttgatgaattatatagaggctgctaaggacatttacctctgcccaaatatcagaaatgtgagaggcgtgtcactcggtctttctacacatcaatgtgcaaaaaactggataacatttttcccccaagtctatgcaggaccttcctggtcgcacgtggacttcacttgatctggagtcttgtccaaactggtgacgtgtgtcctacgtgttgattaatgaaccgatatgactctgatcaagggtctcttcaatttcgactcatgaatgttgattgacagctttacctcgaattgcatattaatgtttgtgtgtgaagacggttatttttccaacaataagtacacaacgtacacttttgggaagaattcgagatgtttaaattgaaatgattacttcttcctttcgaactacctataaataagattgaaaaccctaattaatcactttagtcagccatcaaccccacgacaaggcttttgatatcattccacagttctccaagtggctcaatgccccccagtattgcggctagccttccttcttcggtcaacccctgaactttggtagcttcggtcataaatctgcttatatatgctctaaggggttcttctgacatctgctttatttccaccaggtcttctagatgcaagggaagcggacgggaggagaaaaactatgcgtggaattctgaggagaaggcattccatgaattaaaccttcttggaggcagcttgaagtaccactgctgggcgccttttccgagtgtagcagggagtattctatatcaggcatcacctcttaccccttgcagatccatctgcatctaaaaatacttcaaatgtgataaaggatccactttcccaatatactttttaggttggcattttgaatttatggggtaattcaaggacttcaatctccgatgagaagggtgatctgtgtgcacggtcaagttaaggattagtgagttttggtccagtcaagccttgtaccatgtttttaagttcatctagttgtgctggcacaaatggatgaacttgtttggcttgctgaccgacctatgtcacattgggatctctttgaattggatcctcgatgcgaatgcatggctggacagctggtgggacgtattgttcgtctaggacccttcttcgatttaagtcagtcctgaggtcatgtacggcgcgcaacctatcgaatattgaagtaccatatggtcttggtgtctgacttgtttggccagccggttggccagagatttcagttggggcaaagttcttgtgtataattccaccaaagggacagtccggcaggatctgccagcctaccgtttggcccacaggttcaacctctggtcgtggattggacggctgactatttcgagtttgtgcggtatgcccagttgcatacccttccgatccgcccgaagggatactggatgcgaatgccagttgtttattggcaacttggtaggcgcttcttattaatacggtggcctgctgagccctcaatgttttctccctatccctccattctataaactgacatctttactcgtcgaatgcaaggtttatagcgccacggagatcctctgtatcatggtgcaacgcgttattatgaccttgcaatagcccaagggctgctcagagattttggatttcggcatcatctttgactaacctctgagcattagtggtagacgggacctcagtgttggtggtggattgatcggccgctgaactggtgttcccagtctcttgcacgactggtgtgatcccagccagaggggaagtcactccatggccca

SEQ ID NO: 310955 - DNA, 1312 bp, Cannabis indica
tgtattttttgatgcctaagttatattttggcctcacttagtccatttctatgttctagcaaagctggtcaccagttctcaaagataatactgttttacaaaaatgggaaactcgaaactgcccatttccaagtagtttaccatgttggaaatgagaaatataaagttgtgaatttgaattttctaactttgtggctctcaactattgtgaaaaactagacgaacggtcgagataaaatcagaatcaaataagcaaaacccaaccaccaagccatttatcaacttaggagttgagtgcttatttcgaaatgtccaggatgtcatttttatacttacaatgttttagaacttgaggacgagatctcctacctcgtttttgaccattttggagggaatgccaggagcaaaattggcatttaagtgatcaaaactagcgtaccaggttaattgtcaacctaggcgctggactcagtttctagggccttgtggttatggttttttacccaagtttgcttctatctttgttattttttatgacaaaaaatgaccaaaacacttttttgagaaattgattggaactagcctaggttgacaatatgttaacctaggcactaggcctagtgttaggtgtcagcctaggcgcaaggtcccatttttggcctcctagaagtctcgtttggtccctgaaaataattgaatcttaatctttgctaaaaaaatggagaatacaacccctaagagttctcaaaaaacatcattgtaattggcccaggttggcaaaatgtgaacctgggtgcagggccaaccccaagtgtcaacctgggcgttgggccttgctttcggcaacttaagaagtgttgtttcttccctgaaagtacttgtttccccatttttgatgaagacgaagaaaatacacgagtcaaattttcaagttgatacttggaagtggcttgggttgacagattgtaaacctgggcgctgggtgcccaggcatcgggtgccccaggtgctcaaaaatgaactttctcttaatctaattctgatgcctcaaatatgtctgtgggatgtctatttcatgtcctaatgcaaagcttgactcattttcactaagaaaatcctagaaattgaaaccctagttaggatgtcaacttaggtgcttgctgaaaccctaagagcccaagttgacttctaggatgaaggttcatgtaatttcagctccctaggcctgaatttgattactccatgtcttcatggcacataatactaaaagatagtgagttggaaacaagttatcaaagtctgaacttcattc

SEQ ID NO: 310956 - DNA, 1116 bp, Cannabis indica
caggctcgttttcaccatcatcgtcgtcctcgctagaggaagccttcgaactagtcccacccaagtcatctgcaaacctttgtcaaaattcaaaaaaaccatgagttcgtttagtttcaacgaaattaatttggggaatttaatccattattttggacctggaacaagatttggatcaaaaccttcagtgaaattgttcagcaacgcggagttatcatcttttggctgcacaagttaatattcacaattcattaaaacgttgaagaagtaaatagagagaattaaagaatatatatataaggaagaagagagagataactaattgttgtgaaataggaagaggatatagcatgttaaggacagcctcatggaacttgcgtcgtttctcttcacgggacattggtaatggtaatacacagacaaagaaagaaccatttttattaaacaacatctcaaaatatatattcggctatttctctctgtcgtttcatttgttgaagattcttatgttaatgtcgtttggattttactcacaagactttccggttggtgtcgtttgctatattttcatttctcttttttaaatgtccttttaaatggttcaagtttcttctaattgatgatgtcgttacgtgagattttgagttagctgtaattacggtgatatgttgaatttgtattcattaattctaaatacttttatattatattttattcaaatctatccatttttatgtgagttgtctaatatatttggaattttttcagttttaatcaaaaataataataatattataaaaatacttctagctggccaaataaacaaatatacatccaacctaaaaaaaattacacaaataccacttacacacacctttaacctaggatctatgcttcctgggcaactatcacgcaaccatcgtgcaactacgcatcaacccaatgcaaccgaaacgaaaattcaatcagaaagagaaccaccattaattctggcgacttcacctgagaagacgaccagaattaatcaaaacagagattgtttcgaattcataaaaaaatgtagaaaaactactacaaactaaaattcaactgcaaatccagtttaatttgcataaa

SEQ ID NO: 310957 - DNA, 1711 bp, Cannabis indica
gagaaattgaaagaaaattttttgagtgatagatagacctaagagaaccccttccatttttccaacaagctaagagaaatgaagaacacaagacaaaattcccatagagaagagattggagagctcgacccgtctcccacacataaaagaaccaaactgatatagaacttacagattttgatggatcgacaggagggaaaactcgagaaaactggagttgtttctttctcatggctagaatcacggtagctaccgctgccatgtgcgacaccagaaaaaagatgttcgagttcgagcttgggtccttccatccatggtagacgttgagggtaagagaaggtacctggaaagactccatgtcgtgacaaagagatgaagaggaaataggaaatcggaccatcatattgggttgtaccttacttgggtcccaaagggcaaattcattaattggaaaaattaggtcaagacatgtgttatagtgggttggatcaggagtaaattgaaataagctgggccatatgtggcagagaagaatgcgacgtgacctttcattaaatggcacatgttctttgatgatgcattgtttgggtcttttttttttgaagaaatattggttaaatgggctgcaccaggatcccattagacctgcccattgaaatgatgagtgaaggtaaggattttgcttaggtgggccaagtttggtgggtttggatatggacgaagagttaatgaagtgggccttatatgatagggctttgagaagtttgttttacagaagtcatctctcgcagtcaccatcttcaacatcatctcatcagcgtgaatagtggggtctgtccttaacgatttctgactcatcccattcgacgccgatgatggaaccgcctctagtaatcttttctcctccaacgccaactcctccggtatcaaatcctacaaatatttttcttccagcaacgttttcctctactggttcttcttcgacgccacgtccttcacatcgttgccttccataagttgatcgaaaaccgttaatggactgttgaagctccgatcacgaggactctctggcacatcaatggaagaggatgatccaccgtgagactcagtcttctgtgacattttctccggtgaaatcattatctcaagcagcgatggtatctcttccttcagctcatctctaacaagattgcaagtcttgtgttggattttcaattgctcttcaacagcagtgcttttataaccacatctatgagtgtcttgggcttacattgaagcaccttctacgccatctcctttggaagatttccaaagaaaatatcccgaaggaacgtgtctggaatacccactagttgtgcagcaatcagatcgaactgttttttgaactccatcaccgaacttgtatatcggagagccatcaaccgattgaatggatcgttctcgattttaccgcaacagttgaacagcgtgattcgaaactccaaccagtgcttgatcggatcttgctattctaccatctgaaaccatagtcgagcaacaccctctaaacatttttcagcaactactattttttctttctcaggaatctgattaacccgaaagtagtcttctatgcgatggacccaaccaaacgaatcctcaccttcaaataacggcaacatcggtattaccgtggaagaccagaatcgttgctctgataccatttgatagg

SEQ ID NO: 310958 - DNA, 747 bp, Cannabis indica
tctcatcaaaaggtttggttaggaagttataacagttcgacacgtttctcgtcaaaaatttttggtcgagaaccttttaaaattttaaaattttttatttttaaagtggtgggtttgcattatatgatgtatttctagataaattttggttaatcatacatatatgcccctcaagtaattttaaagggtcatgctttataattacatgtcaaaagaaatgaatgctttattcatgactcaagttcataatattacatcagtgatgcagtttacaaccattaatttgctatcgatttaatctcgtaagaaatatcctagttcgattgcttattttatcaatcttccaaaagcaaatggttttgataaaatgggttttaatatccagggtcaatccctaacatattctcacaagggtttcgatattcagagttaatccctgccatatccccacgactctaggtgaactgatccaggttccagttgtttgtcctaacaaccactggttgatgacttgcttttctgtgtcacaactctatacaacagccatcgcgagccagtatttgattacttcgcaatacttttatgtaattgcttgaccggacttattgccccttgtccaattaatgttgggagacctcctatagtatccttcttttggggtttctttgaaatatgttatcctcccgagataaccagagtatcctttcctcctacaggggaaggttatggtccctggtcgcttgggtt

SEQ ID NO: 310959 - DNA, 3744 bp, Cannabis indica
aattataataattacatttcatacattacacatgtgcatatagaattgtgccagcgcactatatatcacattttattttcatatataataatcgccactataatttatgtaagtgttacgctcacatgattctttaatatatataacgccttaatagggtttatctcaattatagttatcaagtctaacatgattatgtcttactcacataacttctcaattatccacttaacatattattgtatatttatcacaatatgtacatagggtaataaccctaattcaggatttcataatagcaatcaaataacatatcattgcgctaccccgcttatgtgcttagtttgatgtcttacctgatttgtaatgtatgtagagaaatcccaatccacatgtgattctaaccaagcgtcggtattcctaatcacaatttcccaggtttcacataatagggttaattccaaaatcacattcataaatatttatatttaagactccaatgttggaccaagtaatagagctcaaaatgagctttcaaacaatatatagaatatccaaaatggagttcagagtcaaaagttatgctcaaaacaaaacagcaaaaattgaactgtcgttgccttctcgtcgtgaccatttatcgttgcgaccagatataggctctctgcgaccaaattgagcaagggaataccctattctgggttcgagcctcgttgtggcgagcccatatctggtcacaacgactgggcttaaaacccgaaatgccgaaaaatcaagttttcgcgaaatcgaatcttaaccaaattcacctaatttaacatacttgatactaaaattcaaataaagtacaaatggcataaacccatccaaagtatacatgcctaacacacataaccacaagctcaaatcacaaaatcaaagctttataagaaccaaatcaaagcattaaaaaactaaacacaaattcatactttaagtctacaaatcactcaaacttagctcaaatcctttgagcaatagttacccaacataacaaaatctaaaatcacaaggattaagccttactaacttaattgcaacaaccaaactctaagattaatgaaaacaacatataaaccacattaagttcatcaagataaaaacacaatatacatacatgaaactcaactcaaacaaacatttttaaatattacaaccccttttgaaagattaaacatcaagaattagagagtgaagactacttcaagtgttctaactcccaaaatctaccaaatatggcctcaattcttcttcaagatccaaaaatcacaaaagaggtttgagagaaagggagggttcggttgagagagttcaaatccataaatgatattgtttttctttaatttttcacaaaatgaaacgtataattcatttattacatttttggtcaaatgaccatgttgcccctaaggctaaaattccacacaatatataatcaagggcagtttggtctattcacattcaagaaatatttctatagaagcatatattcatattattaccctaacaacatagttcataaatcttggacctcgaactcggttcgagccaaaatactcaattgtgactataccgtgccagcttgtcaaaaatcacctacaataagataatacaaacatactacataataatatagtccattatcacagtatataataaaattacaattttacccttcttagaaaaaaaaattacaaaaatgcccctaactcgtgaatggggcctttaaatacaaaaagtctaaaataatttcacataattaatcatataataatatgattacccatttatacttaattaatttaattaggttttctaatccatttactaatctgaggatattataattattctctccttatagaaattttgacctaaaatttacctgaacaactaaggatatttttacccatatcagattcaaactctcaggtcaccttttcgatcttgctcttcctccataatacttttgttaacaccagggtcgttttcctcaaatttctttcttttatcaagtatatccactgttgtttgtcaaatgaaagatctagctgaagttcaaaagcttcgtaactcaaactatgagatgagtctgatacatattttctgaacaattgaaacatgaaatacattatgtatatcggctagcgctgggggcatagccaacctgtacgcaacttgccctatcctcttcatgatttccaaaggtccaatgaacctcgggctgagttttccttttttgccaaagcgttttacacttttcatgggtgaaatatggagaaataccatatctccaacctgaaagtcaacattctgccgctttggattagcataactcttctgtctactctatgcaatgagcatttgagccatagtcttattaattgccttcctcatttttcgaacaacttcaggatcaagaaactttatctcacctaacttgtcctggtgaataggtgatctacacctttttccatagagcagttcataagggctcatcccgacacatatcctgagctataaaaccctaaagctccacatagatttatcttttgaggagaaaccaatacagtgttggaatatattttaccaggacctagatttactaacaagtatgtttttaacatcctaaatatgaacttctaaaatgatgaaaattaaacacataaaatgtatgagaaaccttacattggttgcagcagaattaaatgactccttccgctcagatctctaacccttgttcctttcagtcgcagagtataatcaagatttgagtccgaaactccttcagttgtttggattcttcacagtcttacatactatgattgaggactaacttgctatgggtgggcatgcactcaatcactaaaggcttgaattttaatggtgaagaacactataggatttgaatatagaagagagaaaagaagaaggagaagtctcaaactctctagttgtctgacaagatgaaaactaggtcaagagtcattagttggattaagagaccattcttttctttttgtaccaattcacttagggttatgattgaattatatggaataaaaaatgataaaataatagcaaaaatagggcttagtggccagcccctatgtgggcctaacactagttagagtttttccatttttttcaaccatttatctatttttcacaattgccatattttgtaattctaatcccataaatgccaaaactatttatttaataattaaaattaattatcaaataaaattgtcatttatattatttattaattagactctacaaagtctattaattaacaaataaaccctaaaatcttatttcttcacaatcaagccataacttagtgaaaatttataaactagacatagtctaattttagaattataattcattaactgagtcttataagcagtttgtctcaattagtatggggaccatgggtctatataaccgagcttccaaaaagtacatctagaatttaccaagtaaattctttaacttattaattcctccttacaccactatagatttggaatcgcactctcaattatacagaacgctctaaatgttctacgatatagatacactatgagttatccatttgttataatcctaataatcaatgatcctctatagacgatttacattgagtattgacaaatttaccgttacaccctttaatggattttatccttaaaacac

SEQ ID NO: 310960 - DNA, 1766 bp, Cannabis indica
atagtgaattttgtagtagtgttgggtcaatctcaacaggttcattgtaaattgtcgagataagatgctacataccttatcttgacggtttacaatggagtcatcgagattggcccaaataatatagctaaagtaatcttgcctagttatccaacccacacacacacaccgttcttcttcatctcctccttctctgcgaattttatttctcctttgttgcgattttcttctccatctagcttcttcatctgattttcttttctttttcaccaagcttctcttacgaaattcattctcgcaactgcaaattaaaaaacttgttctctctccaaaatgggttttccaaaccaccctttctcctttgcaacctcgatatatcttctttgaagctttcatttcaggtatgggtataatatttatgtgtatatgtatttattttatatattttaaatattcttttttgaccaaaaaaaattatgtttttctcaatctctcagatttgagattagattcatcttcgtaaatatataggtattggcactactacaaaactgctttttcttgatatttttaaatagtcatgtaaagtatcctcatctgtttatataatcattgcctatacgaccatcgtaaaatgagcagaataagcgaaaattagaaatagtcgccaatttaaagttcccgacgattttaaatcgtgccatatagtacaggtgacgatttttaagttcaaaatgtattttttagcgacggtttttttttcagacgttacattagaaaaataggagagaaatgcagatattctgctattttttccgtgcattaatatttaaattttttacaaatctatatagtaacaataattaaactaacgcttatataatctaaatatatttaaaaatctatatagttacaataattaaactaaagctaatatcatctaaatttatttaaaaatttgtatagtaacaatcattaaactaatgctaataatcatctaaatatatttacaaatgtatatagtaacaataaattgagatagatacaccgatcagtatggcaatcgttgtcgctccacttctgctttcacgagaagaatctaccgatcacgcataacatttatctcgttatttgtgtacaatgtggagaacttacctcataaaataaagttatatattaattagtaaaggcctattatcatacgctatttaataaagaataatatttattataacaattattaactattttaccggttgtgtcaattttggtattagatctttcacggtcatgaaactttcattgaatttcatgacgtaatatccacattatttaccatctagttgttctggacatataggagttatccattagataggtatatcatctcatcatgtaatttgattataaattgtaaatgatctacacaaatagtaaagttatcatataaatttaaatataaaatatgcttacatattatgatattaaatatagaacttacatagaaataatgaatttcaaatcatccggtatgttgctattgttggaatacaagtacgccactgtctgcatacttggttagatgagtacaagctgttgggttttgtgccctaaataaaactctttttaatataatcagatttactaattaataaagatcagatttcattttatgttgcattattcacatgatttatttcatgattatatttaatgtataaattatattaagtccataacatatataaatatgtatatatttgttc

SEQ ID NO: 310961 - DNA, 884 bp, Cannabis indica
ccgatggtattcccctaccccgaatccgttggttattagacggggatgggacgaggattgggggtataaataggtagcggggatgggagcgggattgcattccccgtatattaaccgtccaatttccatctctactagagagttgaggcgcttgactatttttggcaacttttcaatttcaataaaataagcttgggttaggtttgggggctccattcgatttttctaagtcttgaggactaagggtgacagctaaaaagaggacaccattggagactccactttgtgttttatctgttttatctcaatcttttatgtttttaattgaatctttaaatgtttaagatgactattttgagctaaattcaattttagggttgttatgtgactcacttgaatctcttttattatgaattaaggtagttttaaattgtttcttcatcttctattcagttgcatgaaatctatgttaatttagtaattatttattggtcatttataattattgtttatgatttcgaatcaaaatctgaaaaagtgagatttgattatgctatggttattgtgcaatttaatttagaatgaaattatctaggttgattgtatgatttttaagagttgctatgtttattactttttttgtgattaaactttgtcatagaaatataaagagttttcacatagattgagtttataagtcttaaccaaataattatgaactacttttatcgacttgtcaattgattaaaaagaataagaatgtaagtaaattgcattaaggtattaaaagagaggataggttgatgaacataattgtcctaattagtttctcaatgttattctcttgattttttttaattgtttttataaataaaaaagtttaa

SEQ ID NO: 310962 - DNA, 2908 bp, Cannabis indica
caacatacttgtaagtagatctatgatcctggtaaaataatttccaacaagaagtgccaagattctatctcaaaaggagaaaagtctactccaccaatactcaaatcaggggctgtgatgaggaacctggaatcctcctttgctaatcatagtagagagaagaaggtcaaaataaccttggaggatatagaagaggaagttgcttattggaaatcagccattgtctgctatgtcttaggtgctaatccacctttctcggtccttgaaggcattgctcgaaggatttggaaggacaaagttgataaaataggtatgatttcttatggcatttttataatcacattcaatagtagtgagaccagggatgaagtgttagctgggggcacatattctttaataagcgtccagttattatgaaagcatgggatccaaatttcaacctcaaaaaggaggatattcgaatagttccaatctggatttagcttgaggatttggaattgaagtatttaggttaaaggtctcttttcaagataataggtcagctagggaagcgtcttatgattgatgaggttacaaagggcagagataagctggcatacctgagggtgttaattaaggtttccatgaatcagggttttcctgatatgattcattttgagaatgaatataggaatgatgttttggttgcggtgaattatgagtggaaacccataatttgtaagcatttcaaaggtatgggtcacaaagtggaagattgcatgaaaaaagaaggaaagaaacaagaatgggttgtaaaggagaagaaaatttagcagcctaaggaggacaaaggaaaagaggctgatggtgaaggtttcaagcttgtttcagatggctagaaacaaaaaaatcagatagcaatatctgaccttcaaacctcgaatgcttttaatgtgctataggaaatagcaggtcatattcaagagcaaagagaacttaatcaagagtaatggcccaaaattggagacacaagaggagggggagatcatcctcttcacaatggataagatactaagttggaacgtccggggaatcaacaacgaacaaaagcagtaggaattcaagaaattcattgagaagcacaaggtagggctggttggtctcctcgagacgagagtgaaggctccaaagcttggagccttgtatgttaggatgttttctaattgatgcttcattgcaaaaattgcatgggctaagggggaaggataattgtggcttggaattcagggagtttcactatgaatattctattttgctcaagccagttgattcatctttaggttacaactttagataatagagatagtttctatgtttcttttgtctatggctttaatagtgaagatggaagaagtttactatggaaagaactaatagatcttaaggtgcatgaaccatggctagtcctaggggactttaatgacatacaggagaagggggagagaattgagaaaagagagctttattgccattcaagtttaaggactgtgttttggagtgtcagcttgaagatgtaaagcaaagtggtagttttttcacctggaacaataatcaaaaaagggaagatagagtttactcgaaaatagatcgggtcatggcaaatcagagatggatgggtaaattcatgaatgctgaagccttgttccttagtgaagggctatttgatcacacgtctgcttttattgacagtgttgcctattatcccaagtggtaggaagccgttcaagtattttaggatgttgtctaatcacccttctttcaagcaggctatagaagaggcatggaaggttaatatccatgggactagtatgtatcaagtagtgacaaagatgaaggctttaaagcatggtttcaaaggaattatcctgcacgggttctcatatattcagaccttggatttgaaggctaaatctaacctggaggaatgtcaggaagctgtgcaaaagaatcctagtgatctggttttggagtagaaggagtaggatgccctagtgaattttcaagatattcataaaatatatgtctctttcctgtagaaaaaatccaaagtaaattgtattaaagatggggatgggaatacggccttctatctttctagtttaagagataggagacacaaaatagtattatttgttgttaatactagtgttgatagagttgacaaaccaaaggaggtaacagaggcattcatggaatattacaatcagatacttggatcaaaattgcaacaatggaaaaaaaatcaagctggctgtcattgcagaaggacctgttttgtccaaggaacaagcttaagtattgctagctgaatacaccagtgaagaaatcaagcaagcagtgtttaatattcctagaataaagagacctggtcatgatgggtatgggagattctttttccaagataattaagatttgataggacagaatgtgagtgatgctattagatcttttctccagacaggtaatcttctaaaggaaatcaattcaacagcattcaccctcattccaaaggtcaagagtcctaatttggtgagtgattttaggcttatctcatgttgtaatgtgctatataagattgctacaaaattaatacgttctaggcttaagaacatcctccctgatttagtttcacttaatcaaggaggctttattaagggtaggtatatagcacacaatttcatgatttgcaaggatttaataaggaactatggaggaaaggtagctaagcccaattgcatgatcaaacttgacctgcgaaaggcctatgatacattggattaggattttcttaaggaaatgatgcaagctttgtaatttcctaagaaattcatgttggaaattattttaccacgatcttagatctactcac

SEQ ID NO: 310963 - DNA, 763 bp, Cannabis indica
ggtaaaataattccaacagagcattcttagacttggatgaatcaagagaacaagaggctgactttggttgtgaggttttgagctgataaagaccatctttaagaattaatccctttcaccaaacgatagttagaatgaaattttattaatacattgttgttagaggtgagcttagagatactcaataaatttttagtgatatctgatacaagcatcattttatttagtagtaaagttttctcagtttcagtttttgaaatgacattaccaagatgagagaaagagagcttgttaacatcaccaattgtgactttctccttaccaccatattcttttggtgggttcataaatgaaagatttgaggtgatgtggttgctggcaccattgtcagcataccaagcttcattgtttaggatcttaggtgtagctgcaagtggtgtgtgagcttgcttgttttttcttgttgcattgggatcagatcctttatagctatcatcatagcgattatatcatacaatagcactgtgaccaaatgtaataccctagaattaagaaatggattagcaaaatcctaattagataattatgtataattgagaaattatattattatatagtttaatatatgagaatttatttgattaattatatattaagaccccgttggtgagcaaggggcattttcgtaattatgatccgagaggtaaatgatgaattaattaattacgtgcttatagactatattattatatagtatgcatgt

SEQ ID NO: 310964 - DNA, 2774 bp, Cannabis indica
acgaaatgcgtcggcaaaaacaccttttcttgtagtgagttttatttgtgaaaaagaaggatggatcccttcagatgtgtattgactatttagaattgaataagctggcgattaataacaaatatctttagtccaaaattaatgacttattcgatcaacttgaagggaaaacaattttctctaagattgatctttgcttaggttatcatcagttaaaaatccaagaggaagatagtttgaacactacgttttagattggatatggtcattatgaattcttggtgatgtcgtttgggtgttcaagcttttccttgataactacgtaatagtgtttatcgatgacatcctcatatactctcaattagaagcacaacatgagcaattgttttagaacgacttagagatcacaagctctatgttaaactaaagaagtgtgagttttagttatcacaagtttctttcttaggccatattattggaaaagatggaatcatgcttgatctagaaaaagttgaatcagttaagaactagctgagaccaaagatagtttctgaagttagaagttttcttggattggtcaggtattatcgacgttttgtggaagagttttccaagatctctatgccattgacaaaattgaccaagaagaaatcaacaatttgtgtagtctgataagtgtgagacaagtttttaggagttaaaacagcgactgattttggcaccagtgttagctttgccatcaaactaggagaaattttggtgtattgtggtccatccagacacggtatggggtgcattctaatgcaagttgatagggttattgcttatgcttctcgtcaattgaaggagtctgagaaatgttgcccaagtcacaatttacaacttgatgttgttgtttttgccttgaagatttggcagaattatttgtgtggacagaaatgagaaatctataccgaccacaagagtctcaagtacttctttacccagaaagatttgaatatgggacaaaaacggtggttagatttagttaaggattatgattgtgagattttatgtgattccgggaaagcaacatggtgctagatgctttgagtagatgagatctcatgcaggtttttagtaccaaaatgatttcttcgtaactagcagcaaacatgatcaaggcagactttgagtttatagttgacaaacttcataatctaacacttcagtctaatttactagaaacaatcagaggttgatagttggaagacactgagttaatcaagtttcgagaggaagtgttagctgattgggctaaggacttctcaatcttggatagtggaatgttactttataaggctcagatttatgttttgagcagtgatgaactcaagaaagaaatattgaatgaagctcatattactccttattcgctacatccaggtaccaccaaaatgtaccaagatttgaaatgctactattggtggtgtggaatgaagataaatgtggttgattttgtgtccaagtgcttaacttgtcaacagatcaagttgaacaccagaaactagtagggttattataacctttaacacttcttgaattgaaataagaggatgtcacaatggactttgtagttagtttatctagaaccgtatacatatattatgggattagtaaggcaattagcattaattaattatattataagattatatgttattagtttataatgtggggcctatttttttaagggattagagttataatttttcaactatggagattttattaaactctaagtgttttatatgtgatatatgtggaaattatttttgtaatttttgctcggtaacaatgaaaatacgacagtttggccattagagtcacattagttttgattaaaaccttttagttagcgagaaaaatatatttgatatttagaatatcgatattaggcggggttgtgatatttgaccatttcacccctaagccttaagataatatacttaaagtggtaattttgtcttatgctaggttttgccctctagcaagattagtagtaaatcctaggagtttctagttgagtaattatattaagaaaataagataatactaagcttctattcattttcatcaattaagaaaaaagtcaaagtttatcctttgctctgtcttccctatttggccctaagagaaccaaaagaaccaggattttttattcttcatttctcgtagaattcatcagagtttggaggggaaactgatagcaaaacttgaggtaagtcctagaatcctttttctttgattttagaaagttttaaattggtttgagcatgcaatctgtgaaactaggttccgtccaaaccctagaagtttatgggttactttttgaggttagatagagttgttgatgctttttgggaaggttttgttggctattttaaggtgtggagcaagtttgagtttaagaactcaaacttggctcaacaatggtggttttcatattactgagttatttttgcttttgttgcttgatttatgtttgttggactcaaattagttattctggagagtttcacaaagtttgggttagtttggagttgaaatgagaagtttggaaattttgcagcagaaaacaacagaccgttttctcggaaattatctaccgtttttgctggcagtgacccaacaaaatggtctgtcttttttatagaaatgttctctgaagtctcgtttttggtgttttctcaatatttagggttttttcacgctatttatcgataggaaaactt

SEQ ID NO: 310965 - DNA, 4039 bp, Cannabis indica
atagaataccgaatttaagcgggattatagttttggaccattttacctctaggtttagattggcttaagtttaagtaacaagggcattttagtaatttaattagtgagatgtggtggatgtttggaagcttgatagctgaccatttgattatctcagctaaagtaaatgattttagacactatatatttagaaaaaaaattaagaaaatcaagataaccttagaaaatcacccttttttttttctctctctctcttgctcgacttccacataaccaaaaaacaagccaaccaaacccttaatttttctagatttcagtaaggtctcaacaagattggaatttgttcaaagtcaaggtaaaccctaaatcattatctttttgttatttaagcttttagttaggttttagcttgtgatgtatgatgtagtggctgttttaggttaggttttactctaaggtcttttctgaggttgttttaagtttgaactgattatttgtagctgggtttgttgctttgcttgtgtgatgagcaattttgagcttgtgagctcatacttgcatcattaatggtggagttggattctagagttgtgtgtttcttttagtgcttgaattttgttgttggatgttattctaggtaatttagaaagtttgggaaagtttagacacgttttggacaaaatttggtctgcttggggaaaactggtgcaaactggttaactggtttgccaggtcttataaaactggttaaccggtgtagggacaggtttctcgaagagtccattttgtcgattcgtgttattttcagagccttggttggttaatttcttgattcttagggtattgttatagtagttaccaatagcagaacccttagttaaagtttgggtttcttggattagtgttttgacatatcatttatccgtttacgtgaatgtgattacgacatccatctagcacgaagtttttcgttcaggttggtcaactcacttgaattcagaaacgaggtaagaatagcatagaatatattgtatatgtgaatgtatgtacgtgtgatatatatgcatgcttgttgtgatttgtacacttccaacactagcacgatagcagtactgagtgcattgatgtaaaaagtacattacggtgttacaagcactagtacggacaggtacgtagtgtgtgtggtacagcacttagtggtacttggggtaagaaacaaaccctaccaacactcgtacaatagcggtacgtagtgtatgtggtacatggtcgaacctgagtaaagaatgttcttacttatctattaagccttgtagatgggtgtatgggtacctagatccaagtcaaaattttattatttgttatatgcttttcttactgagtctgttgactcacaatcgctacctccatgtgtaggtaaaggaaaggcaaaggctgaacaggagtgagctccgggcttggatggtgattgtacatgttaggaaggtacgacctggagtcttcaatctcaggacatcttggatagtattttgtaattgctatgcgacatgtatatgaaagtattttggaaacatttgtaaaagtttaattcgggatcccgactatgtaaatatatataagtttataaagtttaataattaaatcaaaagttttaatttgacacaattttcaaggaaaatcctttgattaacaaaggtggcatattaattgaaaaattattgtaacacgcctaagtgtcagggcgttacagtaatttattaattacggagatttaattgacatatgtggatataatgtaagttatttatgaaataaaaatatttttaagttcggcaatcttggatatccaattggagaccaaaaataccacaacagttttagttagtaaaattgatggaattattgagataagttaattttaggaatatcgaggtattttatggtacccggagttgaccaaataccttaaaattataaattttttaatgactaagaaataataagataattattattattattattatattattatgacattatattattttattattattattaatgaaattttaaaaaacacgtatcagtgaagttatacatattaagttttaaaacttaatacaaaaaaaaaagagtaaaacgaaatcttttcttttgtgcgacaaaatcttcttcccttttaatatattttcttcgatttccaacccaaaatctaataattcaagctccatagtagcagaatagtaaatcatcgaagagagaaagcttaaggtaatgattaatttcgttttaagttgaaaataattagttttatatagtgactttgtgatttagaatagttatggagattctgacttcatagaaatgttcttgggtagctacgggactagtttcaatgtttacttgttgaatttgaggggactttgagttagaattcgagtttggaactttttaaagcttaagtccgagctttaatggcattttctgtttatgggctcgcttttaattttggctacgttgggactgtagtatatatggaatttatgtgtcatatgaagtttggaatgatttggataggtttcggtagtgtttcaaagagtgcaaaatttgagattttcgtactagaaaatggtctgccgtttttagaaattctagggagatcagaaatcgtatttttgtcataacttttcacttgggtgtccgttttagacgttgtgtataccgtttcgaagcttacgatgagctctacaatatggtgtatgttttagagtcaaaatataagtttattttagtgtatttacaccgcagcattttgtaaaaaattctagattgtcttatgtgaatattaagtagtgttttggaatagacacttattgatttaccattattatgacatagggcccgagatcgtcgattattcttaaagtaggccggccaacatacctaaactgaaacttgaggtaagaaaagtatattgtattacatagcatattatgttgcaatgcaattaatattgttgagagtttattgatattaaggttaagatacagttattattgttatgtaatgaaaagattgcctaattaggtaatgtgatatacaggctcatttgattaggtggtgtgatatatggattccaagctatggtatgagcttgcctaattaggcaatgtgatatatggatatcgagagaggtatttgggttgttcctgtgagacaaccttgataagtcatgactataaactgaaactgttattacgtttcttcctgtcagtgatgcctgattaggcacgggcggcagtgacatgtgaatgacaggctatggcacgggctcgtctgattaggcgatgcgatatgttggtgcgaggttttggcatagggtcacctgattaggtgatgcgattatgcgatatatgggtaccatgttttggcacgggctcacctaattaggtgatgcagggttttggcacgggctcacctaattaggtgatacagttatgcaatatatgggtgccagggtttggcacgggctcacctgattaggtgatgcagctatgtgatatatgggtgccaggttttggcacgagctcacctgattaggtgatgcagttatgcgatatatcggtgcgttttagcacgggctcacctgattaggtgatgcatttatgcaatatatgggtgccaggttttgttttggcacaggctcacttgattaggtgatgcatttatgtgatatatgggtgccaggtttttgcacgggctcacctgattaggtgatgcatttatgcgatatatgggtgccaagttttggcatgagctcacctaattaggtgatgcaattatatgatatatgggtgtgaggctatggcactggcttgcctgattaggcaatgcaatataggattatcaaatcaaagcattgacttgcctgataaggcaatgtaatgtaataaagatggttattttatgaggtaacatgtatataatttatagtattatatgaatatgaattctattattggtataatggttttgt

SEQ ID NO: 310966 - DNA, 1185 bp, Cannabis indica
aattagaatatttttcttagatattgttgccccagtttattcccaatatacgtggccgctgctatgtatgacatgtcgacaaatagacccgtcacccgaagataagttaaaagtcatatggaagcagcaacgagtacagttcatgtcgttagctcttagacaagtgaaaaaggctcgccttctcctccgggagtcaagatataggaaggcacctccgggccaagagggctctacttgaacagtcacttcgtatttaatgcagtatgaggaaaacatctgggactgcccataagaggacgtgtcagacatcgtaagcctaatttaaggcgattacacgataatcaaaagggttagtgacgactccattttgaagaattacatcaatcaaggaaagatgaaagctaatctcacttaacatctatgatgcctactacgtaggtaatgcatgtcctattttgtatcttttgggaacttgtgcttatccgtagttggctctcaaagataagttacccattttcgagtattcccactaatctctataaatacccctgagaaaataaagaaggggattgaaaaaaggagagagaaaaaacacaacaaagaacattctctgtaagaaagactctcattaatataagagactcgtggactacggctcattaatgttggaatatcttttaccaggatctagatttactaacaactatgtttttaacatcctaaagatgaatttctaaaacaatgaaaaaaaacacataaaaggtatgagaaaccttacattggttgcagcggaattaaatgactccttccgctcaattctctaacctttgtatcctttctatcgcagagtatcacaaagatctgagctcgaaactccttcagttgtttggttcttcacaatcttacacactatgattgaggactaacttgctatgggtgggcatgcactcaatcactaaaggcttgaatttgatttgtgaagaatactaaggatttcgaaaattagagaagaaaagaagaagaagaagtctcataaacctagagagaaagaaaattaagtttattgcctttgaagcattagttggataatgagacttttttttctttttatactacttctattagggttagggttgatttatttggaataaaataatgataaaaaatggagaaaaattaccctta

SEQ ID NO: 310967 - DNA, 1317 bp, Cannabis indica
tgtgcagaatgctagagtaatgctgaaccgatgctgtaacacctgggaaaaaacctgactagaaggaattagctattcaagccatttttaccatattacaatttttatcttgcagccaatttttctagcagcagtagttttaattctagcaagtttaattcatgtcatttttaattttgaatcgttactcaaccatttgcatgttaattcctcttactttaagttgtaattagttggttttacatcaaactttgtttgcaatccctgtggagacgatcttacttatcactttattacttgtttgactgcgtatacttgcgtatataattttcacaacaagtttttgacttgtccatcaatgtctcttttcttctagtagattcattttgtacctaacaaccctaacgtcacttggtgctactactagattcaagattgaattggaatacacgaaatccattttctgtttcactgctacgagtttgattcttaattccttatcaacattatccattgcctaaaggaaaatagttcgttgtcactagtgttactaaccagcaagttaattttactgtcaaggccataatgagataggttctttaaaactctccaactataatttggtactgtgactgtctaatgaggaataacagtggtattttcctcttcatttaatacgacttgtgtcattatcgttgatgatttttttagaagaaactagcctcatcgaaacctcttgagtaaacccaatgagcgaaatctcaaaagggaaaaaagtgtcgaggaatatattaatcaataaaatccgactgcaaagaggcaatcgtaaaattagagtagcccggtcaccatacatagtgatcattcaaagataaaagttagttttgttaaaaagtgagtcacactattagcagtcccatgacaataagaaaatgaaagaaaatatacaataagcaacaatatccctcactatgcacccaagataagaatgataaaaagtagggttaattgggcaaaacccccaatactttcatttcattagcaattaacctctaaaactcaaattttggcggtaaaacccctaaaaccacaatattgttagcaatttacaacttccatccaattttagttgttaagtgccagaatggcagtctacgtgtatcgtccacatgtatacgcaatacacgtggcacaattttattggtccacgtaaataattattaaaaataaaataaataaatttaaatttaaaataaatcattttaaaacaaataaaaattagaaaaaaaaaacataattcccaattatatttttttt

SEQ ID NO: 310968 - DNA, 1882 bp, Cannabis indica
aaggaggctacccaaaaagtatctttccttctattttttctatacaggccttaaactatacatgctttaacttagtcttatcgtgtagctcaatttgaagatagcatacacatactcccgtgctaagtctgtggctttaaaagtcataaccaccaccaataatctgaataaagaggtggaggaggccaggaaggaaactgagcttaagagtcttcaattaggtgaagttaataagaaactccttgctactaataagctcattgaagacttgaagaaggagatcaacaacatgccatccaccgcttagctcgaggcagacaatgaggcattggcaaaagatgtaaactctgttaaggatgagagggaaaatctctgtactcttctcaccaatctggagaccaaggtcaatgattcgactgaggagaagagggtcttacaggagacccttgattctaagtagatatcttttactactgaatggaaggttcttcaaaaggaggtggacaatttagagtcagttggtttggacgtcttctatgagttttggaaggctaacccagaggctaactttgattacctcaatgagaataaggaggcttatcttggtttttaggaagctcaaaaagccaaagaagatgtcgaagcaaccaacaccaatacttccactaacaaagagactgaaaaccatgtcgttgaagaatcatctgattagtacatagtgatgcggtgcttaggtaagttccctttttatttctctttgatgtcacattggagacaatgtgtcaactaagttcgggcggtgaacttaaaatttttagcctttagttttttttagttttcattttagttttagtttttggttgtttttgtgttgttatgagtcaatttgctaaatgtgagtcaacttgaaagtaggtagatagcatagtttgaaaatttcatttattttttcaaaaaatccgtatgcatggtgatattacattcttgactaatttcaattttgtgctttaaaagaacatggaatcataaaaggtaaatttttagcaattgaattggtttatgtaagctaactgtgaaatgtggaaagttctgtgaaaaaatctagaacatgcttgcttgctatttgagacgaaataataaattttacataactaggaaagtgatttaggtattttttttggatcgattgtgcctttcaaagtcatccttgtaattttatcttagttaccctttttgagccttaacttgattctttgtttctacatagttggagcctacacaaaataaacccgttaatctctataatttgaccataatcataccataagtgaatctttagtgtgggggaatttagatgagaagttgtaaatgtgtatgggaatgagggtgaaaattgagggaatgtgagaaaaaaatttatttattagcaacaacttggaaataaagaaaagaaaaaaaaaataaaaattaagttgtggcaatattgtggaataaaattctctcatggaataagaaaaatgggatatgagattgtttgtgagaaaaatattgggtgacatgattggagaagcttctggtatagacaagcctaaatgaccttttaactacccatacataagcctaacattacaagcctagaaagacattttaattcttagttaggcattgatttatattagtggagaatagtaagtattgcaagcatatgaaatattttggattagtggattgatggttgtaattggcatgcatacattgtttcaattgttacttaagtgcttattatggtttcgtgagctgagtgaaaaaaaaatttaaagtgtgtcaagggtgtgattgaactaaaattctagattattatgcataggtgaaatttttcata

SEQ ID NO: 310969 - DNA, 547 bp, Cannabis indica
acaacaagtcgtagatggggatcagacgacagatacgtgtcgtatagccagtgacagagagggtcagagccggaaccggagagaggcgaagagagggctgccgagatagcaaggtaagcgtcgatggaagaaaggagtgagagagcagggcggtcggaatcggcgagagaggagagagagaatgaggaggaggtggaggtggggtcgagaattgaagagagagagtggatgcgagagcgagctttggagattgactcccaccacgagtgcatagggtcgtcggaagaggcggggccggtgccggtggcagtagtgatggcggggttaggtgtggtggttgtggaagaagtggtggaggaagaaggtgagttgcggaagtccatggccgtggaatgtggccttcagtactcaattacaactcaattgtggtttggttttttatttttattaaaagctaggaagtatgcatattagggaaggagttattatgctttatgggtatttttcttttctttttttcttttaaaggctttatgatatgatatat

SEQ ID NO: 310970 - DNA, 1218 bp, Cannabis indica
gaatatacgattggttagtgatagatactctataaaaactaggggaattatcccatatacttattttttttaacttttttttttttttcaaatttacaatttgggtttctaaagtagtttctccggtggtttctatgtgggttgctataagattttttgttgcgatttaagttgcggtgctagttacaataagagtttttatgtagaattatgtaaaaatgcaaaaaaaaaaaaaactgtttttaagtgtaaaaatgaaaaagtctctaaaaattattatattaaactatattggacttgatacttaattgtaaccatagtaatattagatatttaattgaactaatagtaatgtttaagagggtgctacactagggccttctaacattctctattatacagtaagaacaaaggttgtttctggattctggtacaatatgtaggtgtcggtatgtccaaagcattaacttcgacccatgtgaatattgtacgtggtgagaaagaaatacactttaattaacaaaagtaaaatagaaaggaaaagtagttcaagtgggtcgtaaggttgacttacctgtcatagtctgattagacagtactaagaacgttaaaaataattaaaaggaaaggaaaacaaacaaacacagaaaaacttgatgagctaagagacaaaagggatgaaactacatggaacctgggttgtttaaacttatgtgagaataaagccacacaacacaacctcaaagtccctttctcatctgatttccctaccaatttttttactttcattttttgtcttcccaacaagttcctttttaaatttgttgttttctctttgtacgtattttattttttgagaatgtgtacaaacttggtggctttgttgctcattatagttatattatttaaattttaattaatttaggggtaacacttttgttttttaattttaaaaacaaaaaacaaaagtaaaatttgtgtttttaaaattttgtttttaaaaaataaaaatgtgttctataaccacttttgttttacaattttaaaaacagaaaacaaaagtgtgttctataactttcaattttatttttatttttaattttatttaagtcaggtccaggtccgggtttggggccggggccgtagtccgagtccaggactggggccggcgccagagtccgggtcccaaggtctaggttggggtcggagtccaaaata

SEQ ID NO: 310971 - DNA, 960 bp, Cannabis indica
tcctccggcgcgccagcgggcgtgggatgatgctgcgcgagccgtccgtacgtgtgcgggaggctgctgcccagcagctggaggagcgccagagcgattgggcctactcgaagccggtgatcgcactggacgtgctgtggaacgctacgttcgtggggattgggatcgctgtgctctggcttagcgttaacgagaacccttcggtgccacttaggctttggattattgggtatgcgcttcagtgcgtgttccacatgggttgcgttgcggctgagtacaggaggcgccagcgcgagaggggtggggaggaattggaagggagtcaaggttgggagagcggtggggatttgaattctgggtctggaagtgatgtggaggaatatgccgttgaggagggtcttgttgaagctggaagtggaagtaggtaatttgaatactggaaatatattaattgaatttattttccaggaaaattatttcttggttaaaaagaatcgtttttgtttgatgtggtttatatttatacgaataattgtgtgaaaatcatggtaatttggagctgttttgcattgtattgctttgtatatgtatgtatgccttgtatatgttggaacttctgttaatttgaagactctaaaggtgttgaagtggttttctttgaaaagaattctgagatcaaaagagccattgtattttatatagaattcacaattgatttacttcttatttgaatgtgtgttagatatgtgaagtatataaacatatttgttcattgactaaagtttgtattgtattgttatgacagtcttgcaaagcatttggagtctgcaaatacaatgttttcatttatctggtggatcgttgggttctactgggtaactgctggtggtgatagtttgattattgactcaccacagctatactggtgagtttgatcttgtttatttatttatttttttt

SEQ ID NO: 310972 - DNA, 3030 bp, Cannabis indica
ccccccccaaaaaaaaaaaaaagcacttacatagtacatttgggaccctttcttcacttactccacctacacgacaaagaaacaattaaagcaattatttttctacagcaaataagatcggacagtcaaggcaaggtatttcaaaaggctaaaaatgcagcaactcttattcagcaaatgctatagtcgtcccgatcgcaccaatatagctggtaagtccctatccatacagacatctgcatagagacttggggggcaaatgttatcttgattttttctcacctgacgtggcagtgcttatgtggacaaaattagtctcatgtggcaataagctcaccaacaagaagaccaagtcaatacctaagcaaatgaggacactgacactcaaatgggcatcaaatggcagactagcttccccataaaagctcgttggccacccctggccagccaccctctggacagcaccatggctagccagcctgctccatgcaggtgtctaactggccaagagaagacctacaggggtttcatgtgtaatttcacacgtggacacatgatttgggttgcgaaagtggccctaaaagcccaatagaatagctaaataatatctatgttcaagggcattttggtctttgtaattaactaatttaatattaaaatatcctagggttttaactgtaaattagagttgtaggcttcctatataaaggtctttactctaacctagaaaggctaagtctctgagcctaatactagcctccaagtgacaaagttctaagtctgataactctctccctcactctctctcacacgcgcatataagctgttatccgcattttggttgtcatgacacgtggatttttaaccaaggaaggctaagaagtcatcaactgtcccacttcctcaattgatgctctgggaagataaaggcaccaatttcgcaggtagagcctctataaagaagagttccctgactggtagctacacggagggtatctgtgagtcaaggtctccctccgttctaggaactaaaggcatctgctcttgagaagaatatggattttcttggaaggcctaaggcattcgaagacacactaaactaggcaatgcctttagcccacggaagcctcacctaaacgtgtcagactatggacctagtgaccatgctttttttgggtacaatgttagaggttgtctcccatgacacgctatcgtaaagagaatgtgtgtcattgtgtacctaagaaaatgatccaacggctagggataaagggaaattcaaaaaggagaagtcttgaggtgacacgcgtccgaggtccagctcgtacaatttgacgcccttaaatgccatatgggaaatcttccacctaccaatccaatggtcgaatttcgccctaacgataatccatccaaggcagcacatgcaaagaagttggactataaataccccataaaaatcaaaagaggagccttttttggggaggcgaaagatcgattcttcataattctaagcaaacacatttttgtaaccctactatcaacttcagaatattcttactaagcttcctcttcttcaagaggaacacagggaaaaggagttctagtccattgtatttctatttgataagcaataacaagttgatgagcaaccacgtaaaaatctcttaattattatcttgctatttatcctatctttaccttcccaagctctaaaaatatttagttgtcgaaaaactcaataaacattttggtgctttcattgagagttgaagaaagagatatgcacggcgatcactgacgcaagtctgccagaaagacaacccatgtaagaaaagaaggaaaatctcttgatctcttgccgaggtccggtcgaaggtcgaaaatgtgcaggtcgggggtgttgcccagactaagggtcgatgccttcgtccgcataagaaaaatactaaaggcgaatgcatgtggtcttaaaacatttgtcgtacctgtattcgtcttaaaaatctcaaatctagccagccaactctctggggggatgactggccattggcatccttaggctcaagttccccgtcctccactacggcataactacgcacgcactatggggtgcaagaggcgttggggctaggcaaagaagctatgacctaaggcggttacaaagactaactcacaaagattgtcaattataacgactctatccaaatcgaaacttcggcgttggtgctgacgtgagggcaagatccattgccaacggctacttcccttgccttttagctgagttgtgaagttgatcagaaattgatcctataatggcagcgtctgagaggagaccatcagtactgtcagcgtctgctgggccttcagtcaggcctgattatggtactgttggttaaggcaggcaatttttggcaaagtttgctcagaaggtttctgtggcatggcgtaactacaaccctagagttacatcagagaaagcaactcgagacattataaacctgttactgttaggatatctctgctggagtgttgttcatcctactgggggtctgagtctttgccccagtagtcatgaaatgccctgcactctactggaagaaacgaactgcctaggagttccaagggcacgtgcacgcatctcttggagcaacttggagcttggaaaatgcatgcgcatcgcttttcttgtgtgaaaggtcactggggatatggcacgtcttcaaccctccttcctagaatggaaggactggttaaagcttgtcttactccctgtggtgctttctccttttgatcttttcaagcgaagtcaaagcttgaatttttatacaccttcaaccttcctttgcacaagatgaagcttgcttcataaaaattcaacatgactcttgcatgcgcgatgtgtttcgtgcaagaaagatcattatgggtatgacatatcttcaaccctccttcttggaatggaaggactgcttgaagtctatttactcccggtggtgctttctccatttgatcttttcaagcgaagtcaaa

SEQ ID NO: 310973 - DNA, 1010 bp, Cannabis indica
tctgctccatgttggctatttgcttgttcacctcaaaagtcttcttatttacctctgtaagtctactctcctttttcttggcctcatctttggctacctagatggttttcttcagctcgctagacaaaattctagcctgggcgataaaggtcttggccctagagtgtcagtgaccaagcttcaagttcacctaaaaaatgactaattaaaaatatgttggtcggtatataatgagcataagccaaaaagatagaaaagttaccttggtaagctctctcagctgacttccgactaggacatcaactgattgttcattagctcctcacaactgttcagtgatgtcgtacacgaccctatcctagtagtattacaccacctccttagccgttttatctttagatcacacatgaacgattgatttggaagatttttgagcctacaaataggagaaacaagatgatgagtattggatgtccttttagatgatacttgaaagggaaatggggggctagtcatctagaattacaacttcttcctcttggacgggaggaacaagaggtggagtcaaaggcatgcgttctctggaaggaggagtcacttctccttgtctcattgctttggcaggagactattggctagaggtatctttttctttccttttcatcatgcaaataagcattttaatcagcctgtatgcacacaaaaaatggacttagtcaattatgagaaaaattgggtaaagcaagtatgataaggccctactatttctacccttaatctctagaggggcatcttcatggaggatgatactaggtgattcattgtccaatgagtccaccaaaggctcttcattggccaccttttttgcagtgctaaacaaccttagcaacgagctcatttatgcctattgggcagactggaggtggtgcatcagttggtcacacttgaaatagatttgaaaaaatggcacttgtcttgggatgaattttggacttgaaatcatcaaaatt

SEQ ID NO: 310974 - DNA, 1760 bp, Cannabis indica
ttacgtggaccaatagaattgtgccacgtggataatctaacttggcagttaacagctaaatttggacgaaagtgttaaattgctaacagtttcttggttttaggggtttacccgcagaaatttgggttgtggggatttaatgaaaccaaaacgaaagtatttgaggttttaccgccatttaccctacaaactaatataaattattttttatgtattaaataatatgattcacattgtattaaaatttatagtcataataattaatacaataaaataattatttttataaaatacttaataataattatttagaagaaaaaaaaacacttaaattgacttataagccaaatatatattactttttttgattaaaaataatttttataaaattatataaattaaattaaaattagcctaataaataatataatttcaataatttttcttaaggtagttttatatttttatagtataatttttcaaataatttgttctaatgaaaaatatttatttatttataaagctaatagaggaaagaaatagtggaaaatatagatttttctgccattaaatctgtatttttttctttttctttttacattcccaacattaagggcacagtttaaaaccgtcgcatataccatgttataggcgacgattatagaaaccgacgggaatactttaaacgactatttaaaaacgtcaggaaaacccatttttgtagtagtgtcacatttttgttgtcaattaattacacaatgtcatcttaagtgtattttttggatgtcttaacaacgtatgactcgactaacaaacttgtggaatgagacttcctattttacatttcgtattttgcatggctctaaccttgttatgttggctaaacaatggtggagattattatataatccatattccttagtgggttaaatttataaagctagatatttctctcatggcgactttctgacaacaaatctaggtaatcctaatttcgtatggcatagtatttggagtgctcaacagctagtgaaaatgagggacatactattggatcgggtactcacgttagtatcataggcggacctaggggtcttaagagagggctaaagtccactctgagatttaaaaatatattaatatacaattgttatttttatatatacatatagcaattaaataggacaattggttaaaattcttcaaatttacatgaaagaccatgttttgatttttcttgctcattttttttctacttgtatctacattttatttattaaaccactagaatagggggtgctactaaactatcattccacttaaatttagctagttatttattattttagattatattaaatgtataactaagtccactctaaaattcaatcttgagaccgccactggtatccttgatcacccttgactacctagtatggagtacccgtttgtgacaataatcaatcttgatttgcttaataaacaggtcagttcctcatttcatgttaaccatcatagttgggattagggctgtacaaaaaaatttgtaaaccgcctaaaccgaaccgaaaaaaccgataaaaattacaaaccgaaataacccgaaaaaattacaaaccgcccaatctgttaattgggcgggttgaaaataggtccaacccgcccaattaaaccgaccaacccgaccaacctgattttgcacttttattttttttttaaaactttttagtttttatcatatataatataaatgattaaat

SEQ ID NO: 310975 - DNA, 589 bp, Cannabis indica
tcaaattttgaaaaacaacgatctataaagtagaaaaaattttgtaagaaaataaagctgaaaatttaagcctaaattttactatgttatgttcatattttggaaaaagtcaaaacacaaaagttttagatatcttttttagctttccaacgcacctagaattagctcatttggagttggcatttgaaggttgtgcacattttactgagagaggttgaagtagaaaataaactagtcgcgactaggtttttcatggttgccacgaattatgtgatcacgactatactagcaactatggagtttaggcaaaaagcttgtttttcaagattagcatatggtcgcgactaggctttaggtagtcgcaactatgggttaaagacgagatttttgggcacttttgtaattttgccattcgagatatttgcattattttctatataagggttttgtgttttagaagcaaaacactcagaaattaaaccttagaactgaagaatgaggcaaagaaagcaattgtggtgatccggagcaagatcaccaactagttctttcttctcccttttatgtctttatgttaatttctgtttca

SEQ ID NO: 310976 - DNA, 3156 bp, Cannabis indica
tttgtaagacacactctggcttttctatggtacccagacatagctttcactctcttccagagatgtagccatcctctttagaccacaagtactattatagaaggtgcatactatttattagtagatggatttaagatagctcttcccattacatttgaaggaggtagcctttttatctggagaagatacaggctcaattttgtacaagataaaactagtgagaaggtgatagtatgaacaacaaaaaaatgtgctcatgtcatgaatttgaaactcctttacttatagtacaaaaaatgtgaccagatgaaactgtgaatagtttagatggtatagagaccaatgcatgttcttaaatgagtgaaagtttgagtatctaacgctttagtgaataaatctgccagttggttagttgtgggcacatgagatattgacagcatatttgattcaactagatcacgaatgaaatgatacctgatgttgatatgttttgtttgagagtgttgaactaggtttttagagatgtttatggcacttgtactgtaacaaagatggtcaaagtttgttgtgggtatctataatccgtaagcattttgttaagccaaattaattgagtacaacagctaccagcggaaatttattctacatcgacaatagaaagggaaatagactattattttttgctataccaagagaccagattattactgatgtaaaaacaacccctgaatctatcatctagacatcctgcccagtcagaatcattttatcccaccaaagtggtgttagtatcaaatgaataccaaagaccatagttaacagtccctgcaaggtatttgaaaatttgtttgactgcagagagatgtgactgtttagggtttgcttgatatctagcacatagaccgacactgaatgagatatcagggcaactagctgtgagatacaataagctgcctatcatgctttggtatagagtgggctcttcagggtcttcagactcatcacgctttaatttagttgttgtgcctatgggtgtgtgtgcgtgcttgacttgtgtatacccaaacttttctaacatggacttgacatactttgactgtgagatgaatgttccatgatctaattgtttgatttgcaatcctagaaaaaaactaagatcccctatcaaactcatctcaaactcacttgtcattaatgtcacgagtgtttttacctctctttcacaagttgaaccaagaatgatgtcatcaacatatatttgggccacgaaaatcccattttcaagatgtttaatgaatagagtgctatcggaagtacctcgagtgaatccatgggaaatgaggaatgaggtgagtcgatcataccatgcacgtggagcttgtgtcaatccatatagggctttgttgtgtttgtacacgtggttgggaaggtgtggatcttcaaatccctgaggttattagacatatacttcctctcgagttactccatttagaaacacactcatgacatccatttggaagagtttaatcttcagaaagcatgccactatgagtaggagtcttatggactttaatcaagccactagagcaaaagtcgattcaatctacctgactgtatccttgagctacaagtctagctttattttatgtaactgtcccaaattcatctgacttgtttttaaacagccatttagttcctatcacatttgctccatcaggccgaggaaccataatccatacaccaagtcttctaaagcttcccatttcatcttgcattgcagccaaccaaaattcatccaacagggcatctctaacacttttgggctcaacttgagataggtaacatgcaaacgccaatagattctgaagttttcgtctagtgaccatggtgtcattaggatttccaataaccactgtctggggatgagctttttggagccaggatggtggtccatttttgtaaagtttggcatgttgtgatttttagggcatggcgctgctgactttaggttcaccattctgaccgctgatgtctggttctaaatcatttgaagatgcaggttcagtgtttagggactcaataggagtgtcaggataaacttgagtaggcttagtggtgattgatccaggtccagatagaactggggcatcatcatcgacactcacttcttcactaatttctaagtcatcaaactttacgtttaatgattctaatactaagtgagttcatttgttgaacaccctgtacgcatgactgttgatagagtacccaagaaatatcccctcatcactttgaggatcgaacttcactaagtgatcatgatcatttagaatatagcaagtacacccaaaaatgtgcatgttaccaacatttggtggtttccctttccataactcatatgctatctgcaaagtccttgtatagagatgaactcgattgcaaaagtagcaggcagtattgactgcttcagcccagaagcgctttgacatgtccttagcttgcagcataacccaagccatctcttgtagagttctatttattctctcaaccactccattctgctgaggggtttttggggcagagaactcatgatgtattcccattccattgcaaaaatctgagaaaataacatttttgaattccttgccatgatcactccttagccgaaatacttttccaacttttgagtctttctcagtttgaagtctcaatattagagctgagaatagtccaaaggtctcatatttttctctaagaaaatcaaccaaagtgtaccgtgaataatcatcaacaaggaccattacatatctctttccactaatactttcattttgcatgggtcccatcaagtccacatgcattagttccaacccacaagaggtttatagtctgttgatcggagggtgagataccttaatttgtttccctagctgacatggtccaaaaattctatctctggatactttcatctctggaattcctttcactgcttgaagcttcatcagtctttggaggtctctgtaatttaggtgccccagcctgtagtgccacaagttcgatttatccaggaaggttcgattgcacacgatggtattgcatactgcatagcactgatctacaatcatgtttctattggaatttattttaccaggatct

SEQ ID NO: 310977 - DNA, 1714 bp, Cannabis indica
aaccattctctatctttgagttttactttttttggcattacaagcatcactctaattttaacatttttttagctgctataataattcggttggctgctgagttttctcagtccagatcaagtcatttcttcttctccatatcaaatacacaagggctgcaatactagcccctcttacacccttcttgaatttggattgctttgctttccgtatgttttttaacaactgagaaaaatcacacttgaagaacaggtggtctattgtttcttcttcattattgcagaaggggcaggtagaagagtcgatcaccttgtatttgtatagcctatctttagtcttcaacctatttaacatagctaaccctgtgtttcagtatattaagtctagaccaaacttcattacaccattccactctctcatgatcttgtgcaaggcttctataacctgctgccactttaaactcattctttgcaaactcgtctggctgaaacttctgctttactatgtctctaatgtccaccatttttttttagtaccaattactgctttggggagctttatactcccaccagttgtggtgcttaatgtatacacaatgaacccatttcacccataaattgtccttgtttgccactgcccaaacctgcttaaacattgttgcaacattccatttagcaacattcagcaagcctagacctccttcttttttcgggttgcataaactttcccaagtaactaatccagcccctgccattacactcttccctgtccacaaaaagcatctgcattctccctctatttctttaatgactttttcggggatcataatttgactccaatacatatgaattgtaagaagaaccgagttaaccaacattaaccttccagcaaaggacagatttctagtggaccaaactctgattttccttgtcattttttgagcaagactaatgcaatctgcagctgcaatcttccttgcacaaattggaaccccaggtatttaaatggctcttcttgtctagtaaatcctatcatgtccagtattcttttaatctctctctcatccattccgctacaatacactgctgattttgtgttatttagtgttaaaccagatgtgtttgagaacaatttcagcccttgcatcaacaaatatatgctcttaaaatcacctctacaaaacaaaagcacatcgtcagcaaaacttaagtgatttaatttcattttagcacatctttcatggtaaccaaagtccctttcttcccaatcttgctcatgattcgactgagatactccatcccaaatacaaaaaggaaaggggacattggattgccttgcctcaatcccctttctgcttcaaagaatccatgcatagatccattgaacattaaagagaatctaggagttctaatgcatgtcatgattaaccttatgaacttctctgggaatttcaaagaatataacatttcttccgaaaaatcccaatccattgtgtcataagccttttgaagatcaagcttgatcatgtaattcggcttagacccttttctaccataattcctaatgagatcttggcatatcatgatgttatgtgctatttatctaccttttataaatccatcctgatttagagaaactatatcagggagaatatttttgagtcttatgcaaatcaatttggtagctaccttatatagtgttggatatattttac

SEQ ID NO: 310978 - DNA, 623 bp, Cannabis indica
tggcttaaaagtctagtctagattttttggtcaacaaatcaatagatccttctcccaaagtcttgaaccataatagtgttgatcctgttaaggtcgtagagaatggcacacctgattgttgtattattggtctacaactccatcttttgttcaaattggagcacatgttccaacgaatctccttcaccattgaacaatgcaaaagttggcatggtgaagtcttttggtttgggttcatcaatgatctcttttaaaaatagagacttagttgtatttctcatcgcatttctattttgatcatccaactatgtgatccttccctttctatttttcataatctctttcaccgtctgttcttttatctgcgccaaattgcctccaaattaatcatagccaaaggttttgtttgtgcagtgaatattggcgccttctgtggcactccaattggaattagatcgcactccatccttacctgctcaatccttctttcctaattgaagtacttatggagtgcctgctctgtgtttgcggcgttactaaatttggcacaaaatcattgttagataaattaataataaactcaagatcaatttgtatataacatagaacacaataataatata

SEQ ID NO: 310979 - DNA, 795 bp, Cannabis indica
aggaaacattggaacacttatttttcacatataattgagcctttcatttgtggaaagcgtccccgtgggggaattttccaagatctgattttggtattcgtctatgagactggatcaagttcatttgggggcttggaaaactgggcattaatacagatgaaatttttctttatgcttcgattgtgatcgacaccatttggcaaacacgaaatgataaggtacacaatagaagtttgtccaatatttttcagtgcgttgactatatttataactcttatacaaattacattgcttctcttattttcgctccttccccgtgtttggatgtttgttggagtcctcctcctcttaggttggtaaaattaaactgtgatgttaaagtaggaatggatagcacgtgtttagctattgtgacaagaaaccatctgggagtggtgtgtggggctcattcgtctagattggagttctctgatgcgctttgtggtgaagcgactgcttgttgtgtagcattggaagttgctaaagaggaaggctggaagtttattattataaagagtgattctaaagtggttatcaactcgcttaacgatcgagacttccgctaaaaaattgagcactactctaaattttgtttaatagtctctcgatttattgatagttgttaattttaatttgtaagcagaaattgtaattttatggcctataatatggtcaagtggacgttcactgacaaccgatatggtaggtctagtgtttcttctatcacaaataatattttatgtaatgaccgtgagg

SEQ ID NO: 310980 - DNA, 563 bp, Cannabis indica
tattagagagagagagagagagaagtaagaataaagaatattttttaaaaaaattaattttatgaatattctagtacattttatatattaaccattaatatatactcatcaatttattaccattagattaaatatttatggctataaaaatatgtctaccatagggacaaaactaaggtgcttaccatagacatatcttatatatattcatttgtgttttttttttcttttaattgatgtgataataatgagtcaaataataaccattctctaagttgaatttaattagtattatttctctctttaactagtcttaatttaattttctaatttcttattgatgagagcttctaaatattaaataggattatagtgatttgcttactactataactagagatagaaatttatacagcggggatggataactccggggacccgctcctaatggggtggggagtccccgtcttggtggttaatggggcggtggtaggggacaatttcaatactcgaagcagggatggagcgggggcggggataatactatccgcaccatatccgac

SEQ ID NO: 310981 - DNA, 591 bp, Cannabis indica
ttttttcttcataaatatgtaattttatgtttatttacagttttacaacttaaattttttatctaaattttaaaaatacgatatttacaaaaaaaaaaatgaaaaaatgtaaaacaataattaataaacaacaagaaattaactttgcatcaactataaatcaactataaatcatgaaaactataaattatgatttataaaacaccaaaaaaaatatgagtattatatatattttttattgaataacgtatttttataaataaaaaaattcaaatcgcataaataaaaatttctctaacattttttttttcagattttttgtgtattatgtaaaatcactattaaaaatataataaaaacatattccatggacacaatttgtggaaaaatctccatttgggtggttattcttatgatatgacaaactcatttatttaaattttggaaatgaaaaattatatttatccccaccctgctctctatttaggtgtatgtatatcgaaaacaggatcggtcctgagttaattttagccttaagaaaaataatttttttgggccttttttataaaaataaatggtatttttaaaaat

SEQ ID NO: 310982 - DNA, 607 bp, Cannabis indica
tttctagccacgttttcttgaggggttatggatgtttttatagattgtggaaatttgaatggaatatatattggtagaatcaaaaagtgtagaaatataattatgggaggtaaagcaatgttgaagaatgagtggatccaatccattgatttccttaacctttgaattttaattgtgaaattggaaggttaattaggggcgtgagattgaagaggatatatatacatgaaaggtgtggtatgattggtatgtgtgttatagttttaggtcaaaaatgatgtttagcctttttaaaagcaaaagacaaatgtattactttttctttgaaaaggaaataaaaaaatatatattaagaaatgcaatcatctaataaaatagacacatgatcaccaacaacatcactcttatgagaaaacaatttagaaatgaaaattctaaaaaaattataagtcacccttgttaatagaataaggctaagtaggatttttttcccccgaactttgacatgtactaaatcatgctctctaaacttttatggtcgttaaaaatactttttgaactattgagattgttgaatttaaggacttttgttcaattttagtaaaaa

SEQ ID NO: 310983 - DNA, 901 bp, Cannabis indica
aagcattcctttttctatcaacttaacagccctctgcttctcatcatctagtaaaataatggaaggccactcaatttctgaggcctgtttctcacattcaaattgctggaccacggcatctggtaatttcctataaataaccaagtaaacacaagaaatccagaatatgaatttatcagaaactgtcaggcgtgcatgtatatcagagagcaggactgcaggttcatcagaattactgtcaacagcaaggagttcaaagatcttctggatagccttttcaacattcccagacatgcacaagcaatccaccatttgtaaaaacagatctaagatgcaagcactagcatgcaatctatcccagtcagatgcagtactatggaagcaaagagcagagagtgctgcataatatttacttaaccgatcatcaatatgtgtgcagctgttgatatacataagccagagttcataagatccttgattgtatttgacctgagaacaggaaaagaagtgttccacagagaagtttcaattccgggtattgaatgaaatggggaaggcatatctaaacataacatgcctccaagctccaatgcaacaacaaaaaatataaaattgacagcaaaagaataacaaagctggcacatggagctctgctacattgctatctgaattctcagaaaatggtgtcagcataaatgtccactttccacttttctcactgttctaacatattattttttgtgtttttacagtgtaaattcctagaaagagaacccctttgaaatttaaaactacatgcaaatgtaaagtgatgaaacccaacttcggatactgtgaacaatactataacttaaaaaaagatagtaaaaaagatagatggaaatataagcttgcaaaggaa

SEQ ID NO: 310984 - DNA, 3007 bp, Cannabis indica
gtttctatgtagaatcctataaaaatgcaaaagaaatttttttgaagtgtaaaaataaaaaagccccaaaattataataggagattattattagcactcaagtaaatttttaaaattcatttattttgttgacaaattacattagaacccacagtgtacaatttttttttctttaattatattttgctgacaaatatgtatttgaaatttttattttttaataaaataaaattaaaactacaattaggacaaacaatttgtgttatcgtattgtgtttgtgttgacacgtgttgacctcgcttttagtcaacgacgctaagtcaattaataagcgattaagaaaatagagcaaaaataacaaagtaataatgaacactagattttaaagaggttcggccccgtgagtgtggtaatagcctactcgccttgaattgtattaactcaagagaaagaacaaagtgtttttctctgtaaaagctcttacaatgaatctctgagtaattctcttagatctctctctctctctcaagcaattctttcgatccctttcacaatgaggttaagtcactatttatattgccttaatgcatgagggaaggtttcccttttgcttacaatgtataaaatagaaaattatatttattatataattatgatacacgaaatagaaaactagaacatgttgctatatttctctgattcaatcccacgattgtagggattgccttcgtgtctttgcatcgcaagattactctgaattgattaactctttggaagtagttcggaaagccaggcttatacttgcccagatgatctatctttcatcatgctcaggtaatcaaagtttatacctgctgacatacaatatggagtctgctagggacattcacctccacccagatacaagaaatgcaggactgtgtcacctgattcttttgccacatcattgtgcaaaaattggataacatttttcccccaagtctgtgcaggaccttcttggtcgcacgtggactttactcggtctagattcttgtctgattgggtgacacgtggccgtggtgtcaattgatgacccaatgtaactctgaccaagagtctcttcagtttcggctcattaatgctgattgataattttacctcgaaccacccctcaaattcgcatgtgacaacggttatcctacaagtaatcgaatgcataacgtacacttttgggaggaattcgagacattttaaaatttgaaatgattactcctcttctttgaattgcttataaatagggttaaaaatcctaattaagcacttttagccaatttttactcttggagaatcaaagcaaaaatcttttctctcaattccttcaaagaattctcagaaaacaccggccagcattgtccgagcagatcaaaagctccgaatcattgagtaagttcttcatttcctcctttttatatgttttcatgtttaattttttgggttttttcttgcgaaacttgattgttcttgaacctgttctaggagaaccatagaaattttagatttaagatttagaaatcttgattatgcttaatcacgttgcctgatcataactgtgttttaatttcaaccccacgacactcattttcacttatccatttggagtttagtgagagtcagaccttatttctaaattttgaacttctggactgaaaattccattgttatgcaaaaattatgtttttgatcccttgatcggatctcgttggtataatcaacttgttttaatttcattcgttatcccaactaaattcttatcttgtgtcctaccttttgtagatgaaccttggtgagttttaggaaggcgagcaccatatcaaccaggatctacttcaactcttatacgaggatcatcctcgcctctgtgcgagtctgtcctcatccagtgacaaactttctaattctagcttcaaagattgagaaataagtagtgaacacacaccttccccagaaccctaggtgcaagactacttttatgcctaccagattgaatgtcaaggctatggacacttcatttgggagcttagaaaggagtggagatgctatcttctgtccaactggacatatattatccgtccagatatcgctgataccttgcccgcaggctgaccaaatccttctactacaggtaaactcgttactacgtttgttgtgaccatcgttaaacatacaaccaaagtttcgtccagaccgaggatgatggcgcaaaccaaggaaactgtggggaagtcttcactgtctgacccacaaatcacccgtcttgctactttgccaaatgctaagtaggcccgaccttctactgaagaggcagatactactggggacgttgaagtccaagagatggaggatcagggcgaggtccgtcctgatacttcttctgaggctgaagatgaggaaggtgcagctcaatctaaagattgcctactcttactccctagccaaatttgctaccctgaagaatatcaccaacaccaccaatatgtagacagaggtggatacgactaggggtgagcaaaaaatccaagaaaccgaccaaactgagtacatcgatcgtctgaacaccgaaaaaaccaaaaattgaaaaaactgccttcggttaaaactgcctttgcacggtcagttttagtgtcaatggcaaactgaccgattaaactaagaaccgactgaacatatatattatacactatacatatataatataattattttgtacatatttaatatacaattttatgaaactagttttacttcttatctttttttatttgaaatctcaattattcatagctttattttattataatttgatgtatttacgtattatatacacacattcataaaataatacgagtttttaatataactcattagcatactagtagcacaaataatttgagtaaatttaagaaaaaatgttttacattatttatttatctaaaaaagtttttgttcttaaattatatgatatttgat

SEQ ID NO: 310985 - DNA, 736 bp, Cannabis indica
aaaatatcgcaacactaatatatgagtaatttgattagcttctcgataaacaaaagagaggccaacaacactagcattcatcaataagcttctcatatgagataacaaattatctacatcacagcaatcactctccttgttgtggattaattggattggttgaaaatagttagatttcactataaatcttagaattcttctttgtatcctaacttgaagacccgcatgtattgcttgaagtttcatctgcaaaggtagccactcatgttgcagaaccatagaagacacaaactccatctgccccacctcattcctcaccacaaaacttatacaggccactctggcaccactctttactcctatctctacatttattttaaatgttccagacttcgacgattgccatacatcagtctccctcaatatatcgaattttggtcgtgtattagaccctttataatcagccgagtactgagtgcaccagtccaacacatccctaacccttggcttccttccgtcgtgtattgtaatatcttaaaaacttaattataaataattaagacttattatataattgtgagttaattagggtataatgagtaagattatgatcctaataatctaatacagcataaattatgaaatattttcttaagtggataaataagcgtaattgattaattacggatattttattaaaatatgtgggtatgatgtaagttatttgtgaaataaa

SEQ ID NO: 310986 - DNA, 2765 bp, Cannabis indica
atgcatcattgtcgttcctaattatattttctacttttgtcccttcgttaattaaatctaatttccaccattcctttttattgacctcttaaaattccttatcagtattgttcacttaaccttgaggagttcttatcttaatgtcaatttgaatctggttcatctcaacttatttcaacctgtatcaattctcttaaactaatacaacttttaaattttccaatcatttatacataactaccattataaagttaattgattcaatacctatgataaaagcaatactactcataccaagtatataagttgaactggacgtattcatctctcgaatccttaaccaacaacaattaatcaaagatcataccttgatcctgaaatcccattctttcttcagtagggatcttaataatattctcatcattaccacaaaggtttcacttccgggttcatacgctaccattgttcccttgaaatcaatgctaacttcatacttggtgaactgttctaaatatcatattacatttaattacatagcttgttgtttaataaaacaacctactctattatctaataagataattaataatccatgttacttaatcaagtaactaatttcttctgttgcccaattaagacaaccgtattaaccctacaatgggtttatagagtaataactatatcactctcactgtcactcaacaaagtaatctaacacttccggccgtctattaaaacaacccatatatgtacattttattctccacattcacaaaaaaaaatttacctcgcgtataggagatattcaattcttttacatctaacaacgtacctctttctcttaacaatataacacatggtctaatattcttcaatgaaataaatttaaactcaaccttcctcgctaggaaagtatattctattttcaaatattttggtaagcttatcagtcttatttccattccaatagaaactttaatactctaatacttctaactgagacacacatctagaaggttatctaaatttctcctttcaatcatcggggttataacccctacctcactaaatacaaagtggagacctccacgaatctccccaagtattattataattattattaataactagtactctatcaatctcattaatatacatctcaatcacttgggtgtatctccttcattcacaggttatgtgcttctccactttctgagtaaaccttacctttctcaggatttctatgaccattccatatacaagattcaccatctaatcaaaccattaaaagtatttcccatcctcatcataccatttctagcaatccagatagtctcctttatctttgtaatatcaatgttctcatcattacctccttataggtcattaattgagttattccttaattaacatggttcaactcacattcctcgggatctatcctctactatctggaaatctcttctgtattacgaaatagcaaaactcacttaatcataatctccagtccacctcaaatcatggatggacacaattatacttatctattgttctaccttcaggggttctgaaccaccttcaggacaagaagattccatcctcgaaaccacttaaacaactgcccttaatagtttctcatattctacgacccacatgacatgtcaaatactcatcttactttcaaacaagcttactactttataaattctttaagctgcttgctttgtcaactaatttactatatagcaacatacatcacttcgtgattatagtagcgatagatttcccattgaactgcacaaatttccttattgagttccatactcaatactttactaatcatcgtttcacactactcatatttttaaataacaataatactaataagcattcctttacatatatatctgtcatatagctctactgaactatctcaattaatacatagtcataataaactactattaacttaactcaggcttactctgtatatacttctaacgatataagataacaattaatcatatagcatgtaaataatacttacttcccatgagttgagcttatcttcactgtaaaagtacatatgcagctagtcttcatgacctttaaaatcttgattgctctgataccatgttgtaacgccctaatccttagggacgctaaatgtatgtatttatgaactagtttataatcataaactagtagtttaaataaaatgtgatttaataaaaattttaccaactaatttaaatcataaaattatggcatagtctttttttacgattggggatcccctatttaaaatattacaagacatgccattacaatattattacaaaatacatttaaaagttcagaatatttgaaatatagttcctgacaacccagcaccacttgctagataagctgatatatacatttgttagagaagattcttgactcatagttgtctaaatgtctctacctataacctacaccacatagcacccatgcgtcacaagtactcagcaagaaagtaataacaacaatcatataatttattattcaaatattttcatttatactcagacaattagaatcaaacgatcacacattactctatccaaaccactactgacttttgccacaaataaacgtcagtatatagatattcagtaatacaaaatcataatactaataataggtcatattcatttaataatataaattaaatctactacctcataaagtaactttctgtattacatcacattgcctaatca

SEQ ID NO: 310987 - DNA, 543 bp, Cannabis indica
tacttttatgtggttaattattaatgagtagtttgtacatctattatgatatcataagtattatgaaatagtgaaaaatgattcatgtaattcaagaaaatatggtataagaaatgaagagcaaaacaaatattttctcatattaaatatatgtatcacaatttacacactatttagcaggaaacagaggctaatttgaaggccaaatgattgggtattggtttataaacatttctttaactaaattattcttgggctcaggggggagggaataagcctataaaacgtattgtgtatagtgtatactcccacaagtaaaactgaaaagccaatgcttctcttcgaaagcctcctagtttcttctaaagcatctcctccaaaagaaatgacatgaagccacaaagcctgctcaatagcgaagcgctgagtagttgaaaattggttgattctaagaaaacctctttcaaacttgatcttgaatctagtgtgagatgcatctcagcttctcggtctcaagttcttgttttaaagcttcaactcgtt

SEQ ID NO: 310988 - DNA, 474 bp, Cannabis indica
agaaactctggattttgtctactcaattactcagagagacttgttgatgggaggcttggatttacaaggttcttttctgatttaataattttatttaattttactatttcattctttatatactcaattatgttctctaaattttaatctctaccaaatcataatcctcaaattttaacatttactaaattgaactttcatttatgttaaattttttactaaaattgaaaaaaaatctttaaataccagcaatcttaatagtccagagtatttagagtatttttaactagagacataatttagtacatattaaaatttagtagagtaaaaatcttaattattcttattcttattattattattattattattataaacataatttttttacctaaactcaagaaattaaataaaaatagaagaattttttttgggtaaaaaacaaaaaaataacaaaaagggaaaaaaattaac

SEQ ID NO: 310989 - DNA, 856 bp, Cannabis indica
ttccttggataagaagtttagagggcttctattctataatgcacaaggattatagtaatacattttttttatttattttagcatttaaaaatattttaattttaattttaatttttttttaagttaattaagattgttgccttttgaaatatactaaatcatgtttttgaacttttaaagtagttaaaaattacccatgaattattgagatggttagatttaaggatttttatttaattttagtaaaaaaagtctaacatagtgaaaattcaaaaggcatatacaatatcaaaatccgaaggacatgatttagtagatatcaaaatgggagcatgatttagtacataaaaaattactaaaatagtaaaattaaataaaattacacaaaaatccttaaatctaaccatcttaatagtttagaggaaatttttaatggccaaaataattcaaaggcatgatttaatacatattcaaatttaaaagtaaaaattttaattaacttttttttatagtcatatttattgtagttgcaaaattataggaaaatcaaaaaattttaatatactcaaaatatagtttaaatagtattttgtactcatatttataaaatatcttaaataattatactaatatattttgtagataataaataagtagaatagtgttaaaaacttgaccgacctaatctaattcttatgattcaattcaatttaatttagtttataaaatttaggtatctatatttaattatttatacaaattggattgacttatatcaatatactagtaaaaagctacgtgcgaggtacgtatactaaattttattaatttttttttctatgttattttaaagtga

SEQ ID NO: 310990 - DNA, 2759 bp, Cannabis indica
atttaaaaacaaaaaaaagtcattcaaatttttttaaatagtttttataattaatatttactaaatgtacccctaatatttattaattttttaattagttggctgtgttgttctcagatcgtttgacaaaagaaacaaaaacattaagaatggataaacgacacactgaacatatatgacaagaaaatttctaagtggtttccaaattgatttcttcaaaggtgagaataattagtggagagtggaccctgtgaaagaccataaagcaaaactcattgacttctattcacatgtatgctaatatttaataataatgtatctgaattttcttttcaaccttaaaattttctctcagtccaattatagaataatcactattgctagctcaaaattgtgttgaaatgatgcaacctgttaaaaggtttggattaattgtgttacaaactctcttcttcatattaggagattatgttcatggtggtgatgctaataatcagttgaatgtgacttgttctgagtatgagagaaatgctcttcttgactttaaaactggtcttgaagatccactaaaccagcttgaatcatggaaaggaagcaattgttgtcaatggtggggaatagggtgtaacaaggctggagcagttattacagttgatcttcaaaacaggtatgatttctacaaccttagtggggaaataaggccttcattgacaaaactcgagtctttgaggtacttggatttgagtttcaacacattcaaaggcatctcggttcctaaatggttcggatccttgaagcatttgaggtatctaaacctctctaatgcagggtttagtggttcatttccttcaagtataggaaatctctctagattggagtatcttgacatagaatgttcctacattgacttattagaatattcattcgggttatatgttgataatctcgaatggattacgggtcttgtctctctaaaacatcttgtgatgaatagagttgatctttcaatggtgggattagattggattaagatactaaacaatctcccatccttgacagagttgcatatgtcttcttgcaacttgattggtccaattccatctatttcttttgttaattcaacatcatcacttgctgttatagtcctaagtgaaaatagcttcatcaactcgaaattacttgattggttggctaatatcagcaccctagtgactgttgatgtaagctatgctggcttgagtggaaatattccacttggtttttctcagcttccgaatatggaaactttacgcttaggctggaatcacaatctcacaggaaattgttctcagttttttgagggaagatgggaaagtatacaaattcttgatttagcttacaataagttgtatgggaaaattcctgcttcaattgggaacatgtcctctctcacttacttagatcttagttacaataatgttcaaggtgggattccaagctccattggtatgttatgcaatttggaatcatgtgacatatcaaacaataatctaagtgagagtttgtctaattatcttgaaggaacacatagtacttgtcatactaagggtccacttcctagtctaaagtccttgcatttgagcaataatgaattggttggtatgttaccagaatggttgggtcaacttaggaatcttgttgagcttaatttgggctataacttgctacatggtccaattccaaaatctttatggtcattacaaaaccttacagatttaaaacttgatgggaataaactaaatgggactctccctaatagtttaggccaactatctaaattgtcttcctttgatgtttcattcaatcaattgagtggtgtcataactgaaacacattttctaaagctgcataagttgaaatatgtacatctctcttccaactattttacaatggctttcaattcaaattggacccctcctttccaggcaaagtatcttttcttgggttcatgccgtttaggtccttcatttccaacttggctaaaatcacaaaaggaagtcaatttcttagatttatcaaattctagcatttcaggctccattcctgattggctttgggaaatttcctctaatcttatattgttaaatgttttcttcaatcaattaaaaggtcatctaccaaatccattcaacatagctttatctattgttgatttgagctcaaaccaatttgaagggcccattcctattccaaatggtaacacagaattacttgttctatctaacaataaattctctggtccaattccacatgacataggtgattcccaaccaaacttgagacttctctctctttctaccaaccaaatagatggaccaatcccaaattctattggaaagatgcatagtcttggagtcattgatctctctaataataagttggttggaaaaataccccttacctttggaaatttttctaacttaaaagcattggacctcagtaagaatagcttgtctggtactattcctcacaatttaggtcaactaagctctcttcaaactttgcatctaagtgacaacaagctttcaggaagcatcccactgtctttccagaatttgtcgagtttggagacacttgatcttggtaacaacagattagcaggatacataccacattggctagggaatggtttggagaatttaagaattcttaaattgagatcaaatgcatttttcggtgaacttccatccttgctatcaaatttaagctcattacaagtg

SEQ ID NO: 310991 - DNA, 1047 bp, Cannabis indica
tttttagtaatagaggggacatgaaagatggaattcaacttacttggataagaattagaagagggtagagtggctgaactaatattagaaatttataatttcttaccattgcctacagccagcccttcagcacctgtgcaggtggttgaggagtcaagattatccgtgccttgggacacatggttggttggtcctgtatcaccaaactaccagaatcatcaccaaagtctggtaagaaggatgtagaaaaggcatgtggatcatactcaaattcttgttcagtaatataagcctttggagagggattatagacagttgtgttggagggaggttttaggggtacctagttcttatcaaactgataatggaaaaccggtgcagtgtgtccaaagcgaagacagagctgacattgtggcctgttgttggtgttaggacctcgaaagaaaccacggtcaccattcttgaaaccttgaggtggtctgtagacaccatttcgtgagttgccaatggccatattggctttcatctgcatagtcagatctgtcaaggcactgtgatgttcaagacgactttcatgggagagcaagagagcttgaacctccttaagactcaatagataacttcttgcagtaattcctgacaccatcgaatcaaattcgggtccaagaccatttagaagttgaatgatatcttgcttaggaattggagagccaactgctgcaagagagtctgcaatgaattgaactttgtcgacgaagtcagggatcgacaagcttctttttttgaattgtggagaattgactcttcaactggaggagtcttgccttggattggctggaaaacttgtgttcaagagctctccaaacagtgatagaggtttggaagttagcaatggaggcaaggattccttcagtcatggacgaacgaagccatgagaggagtaattggtcttttcgtttccattgagcaaagacaggatttggtgcaccagtaacaaaatttgcaggtggtggattcccatagaagagaatatcatcaagttcatga

SEQ ID NO: 310992 - DNA, 2168 bp, Cannabis indica
catagtgagtaagacggtggtaaccaaaaccgaagtagagaaagagatccaggttcacatcttgataatgctctgcaatagaaaggaatcaagagctagaaatcttgaacggaaggagtcacattactctgctgtaatcaaagtaaggttttcttaaacccttatgtgtttattttcattattttagagaattcatatttaagatgttaataaaacatacttgttagtaaatctagatcctgttaaaatattcccaatagtattatatattccataattcaagttcaatttattttctattaatggttatcatgaacattgtcctaataaactcacatttacttctaatcaatgtttgattcaggatccctccttgacattaacgattgggacaactaagaaagacaactgtttttttaataggagtggcattttctcacatctaatgtttctatttttccaaacacctcttatgctttaaagaacccctggcgtcttccccttgtcatccttccatgaacattactattatattaaataaatatttctaattttgtgagaaacttctggattatatgtgctctatatgttagtttgctaaacaaaagcggcctccttttgtttctaacaataattttgctactgctccttttgatttaatacaccttgatacatggggaccttttcatattattagtgttgaaggttatcgatactttttaactattgttaaaaaaatttcttgctatacttgggtttatatgctaacctctaaatttgatgtctcttttattcttcctcaattttttttcacttattgcaacttaattttccatttccataaaagatgtgtgttgtgacaatgctaaagaatgaaatgtgacgactttttacactacaaaaggaatcacaaagcacaattcttgcattggtcatcctcaaaaaattctgttgttgagcgcaagcattaacacatcttaaatgtcggtagagccttattatttcaatctcatttatctttatcttattaaagttatgtcataaatattgttgtttatcttataaatcgcactccatctatgttacttaacaaaaagagttcctttgaagtcctccatgagaaagctcctacttatgaccaccataaaatttttggttgtcttgcttttgctaccacactttggaaaccaaatgacattaactttccccaagatctcgtccttatgtctttattggttatcccctagtatgaaagcttacactctcttgaacattgaaactcaagagattattcagtctagagatgtttattttcaagaagatatttttttgctttcaaatactaactctcctacttcaataaatgaattatccttacattctttactcccctatacaggaccacctttgaggaaaatgcatcagctcccgaccatgatgcaacttcatctcatcaaaaggccattcctcaaagtgtgattgacaacaacacacatgccccacttcctgatgaagtacaatccaaacccagggacacaccaacaaattgtcctgttacttcaaaaacaggaagaatattatccaaacctaaacgtctttctaattacatttgcaataccactgcttaccctattaattaatatttttcttataataggttaacacaagactttcgagcagcgatcctcgctgcccattcgctcgtcaaaccccccagctataaaattgcagtcaaagaccccatatggaaaaaagccatggacatagaaacagatgctcttgaaactaacaatacttggattgttgtcactcctcctgacatataccatgccattggctgtaagtgggtatatagaattaaatataatgttgatggcgctattgaaaaattcaatgctcaattggtagccaatggctacaatcaaaaggaaggtattgattactttcacaccttttcccatgtgcaaagtttaataccttaaaattactacttgctattgcattcattacaaattgatctctgtaccaacttgatattaacaatgcctttcttcatggcgatttacatgaaaatgtctacatgtcactctccaagggatataaacctaaaggacatatttgtaaagcccgcttagttaatttggaaattagcagttatttatgttaat

SEQ ID NO: 310993 - DNA, 1230 bp, Cannabis indica
ttagctacctatgtcattgcttacatacaagtacatgtaagaccttaactaagggtactttttttttatgttattacaggcagtatttgttggtcataaccatggtctagattggtgctgcccacacaaccaactttggctttgttttgcccgacacaccggttatggcggctatggaagctgggctagaggatctaggattgtagaaatcactcagcatcctttctctattagatcttggataagaatggaagatggtgatgtacatagtgaagttgtccttgaatgaagtgtttcccacttgattattttgtaacatgaattggtattgtcccacatagtgatgtttgtatgattgtatctgttattggatactatttatattggttttggttttaagctcttataattttgcctcattctaaaagatatattgtttatgggtattatataactatcatatacaacaaagtatagagattatattttcaaagtaattttaaatatagaatgattgaatataacaaataaaaagtcgaaatgaagaagttttaatttaaaaataaaaaataaagagaaattatttttatctaaaagtttatggtctaagaaaagaatatctgaatctcttaaactttaaactctgtatttcgtagcttattaagttttttcttaagtgcctagataggtatatactgtagtttttttggttttatcatctcctctatttttattattattttttttagagagtccccacctttaattttagcttgtaaattactttattagtagtttccaaaaggaagagctcaaattgctattcaatatttgatgactctatatcaaaataatgtatatagcttgtgtatgttgacaacaaattaaaagattaacagatgttattatatttatttggacatattttaataaaaatcaattattataatcaagtgattcaatgcattaatgttagcaacaagtgcaatgctttctatgattataagcttatggcactttgtccccatttagaaaggaaaatataggctcattaccattggttgttgttacacataaagaattagttaagaattagttaattagctttacttttcttgattagttatttctgttgtaacagttagttatcaactaactcttttctttctgtaacaaattccttgtacaatgatccctataaataaagctctcagctcaatattatttttt

SEQ ID NO: 310994 - DNA, 919 bp, Cannabis indica
atattcgtgcgttttcactcatagttatttgcgaattttaaatatgattttttttcgtacggtaaaatatgagttgtgttgtgttatgttaatattttaaaggtaggcaaataaagcgtgtaagcccaatatatttgtaccgtgttcggattcatgtagtacttagtccatgtcagtctgtatttttttaaaaaccaaccaatttcatattcaaactcgaattagtgttttacttttttataatttttttaaattactaaattttgtgtctgtgtaaaaattaaaactctgcattatttacaacactaaagttaaccatatatgcttttactctcacatgaatatatacatatcatttatacatatatatttatataaatttttcacgtacactttcaattatatatatgtccccacatgcaaaataacttatgcttacgtcactgaatacgcacacatgcaataattgccattcccagatccacttgttctaattatttccaaagtttttgttaaagcttccacctcctctttatttattgtacttaaattcttagcatttaaagagtttattctagcacaaacactgttagcaatacatttaaaagtgactttaacggtagaaaatttttgctctcaaaaaaccttgtttcgaacatgccaaataaaataaattgttggtgtaatgacacttaaaagaatttttcttttacctctaaaagtttttaccttccgaattcactttaggacttcatggagctcttttttccgactagaaataccaatccaaaaccatacttaatgaaccatcaaattgctgtaaatataattataaaagaagtgagaatgactctccactccacttctacacaacaaacacaagaaaaagttggtatgattaaatcgactaagtctgtcc

SEQ ID NO: 310995 - DNA, 1443 bp, Cannabis indica
aacatatctgcatgcacgaagtctgcttggccgaacagagtaaaggatagattatctgagcaaagaatgaagttagttctccgagctatgtgtcaagacttgactactccataatggtatcgtgaagcccaagtacgaaggcaatccctacattcatgggattgtatcagagggatacgacaggctatctcaatcccccatttcatgtattctaaatatgtaatgaatgttcttaccaattatagatattgtaagtaaacgggaaaccttccctcatgcatttaggccctataaatagtgatctagctttaatgaaaaagggatcaaaagaattgctttagagagagatttaagagaaaatactcagatatttcattgtgagagctctgagagaggaaacattgtgttctttgttctcaagtcaatacaatctaaggagagtaggctattactgaactaaaggggtcgaacctctttaaaacctggtgttttttattgcttattgatttttgctctgtttttatcgaattgcttattaattgactcactgtcgttgactaaaagtgagatcaacaaacccaacagaaggactaaatttctgtaaatgtaaaagttcagggggattcttaacaagccgtatattttaggggccaaaatcactattgtcaaaaattcagggagtaaaattactagttattcttctttttttctctctacagtaacataaacactaacgttaatgtactcatcttttcatatatatacatacatacatatatatatagcattaatagaaacacaacatatattatttcctctcatatagctatatattagacaattctagttggctgagttaatatatattttttgttttgttgttttctgctcttgtatttctctttgaaattcagaaggcttgttgaatcctgcctcaggtgttatctattttattaatgtaattatttttctaacaaacaatatatcgtattttcgcattgttagaccatctctaatgttacacaaatttagtgtaaatttttttagttttgatacaataaactccaatgattcacaccgaatatcacactaaatatctcacaaaataaatatattttacttaaaagatctcacattttatattacttacatcagtaacctaaaataactaatttatgatagttatagcatatctactagtaagaatttaaaatcttaaaataattttagtaaagtaaactatttattaaatcactaaaacattatacattttttgttttattttttaaacaaaacttattaaaattgtaaagtctttttttggcaagttagatgtcaaaatattttttattttatggtgagatttgtttgcattcataaccgattttctcacctttattattcggttttattgctcttttctatgttaggaaagattgtatt

SEQ ID NO: 310996 - DNA, 3178 bp, Cannabis indica
agagcacccgtgagccaagcccagcaagatagtataaatatcaataaacgtaattaacatatcacatatacaataataccatttcacatttatctgcataacacagacccgcgtgttacactcacacgcctatatgtgtctatgtggcatagacctacgctcacacatttaaatacaataatcttagaacggttcatctcggttctaattaccgagtccaatccgatcatgcgccttgaacgcataactcttaatctcaatatacaaatatatatcatggcataataattacacattaacgattcactagggtattaaccctaagccaataaaccgctcactttaagctaataaccctaatcccggtttctaattacccacatatatcacatccaatataagcaccaccgcccatactctacgtgttaactattgtcttacctaatgtcccacaaacgtggagatttcaaatccccaagtgctcctgaccaagtaccggtaatcctagtcacaatttttgagatgcacaagtatagggttaatccctaaatccatttctacaaaacataaaattggcattcaaattctagataatcacatagagctcggaatgagctttccaacaatatatggaactctcgaaacggagtccgaatcgaaaagttatgaacatttgaaaataagcacgaatttgcccaaaaacaaaggggcgggccgcgacacctgggttcgaatcccaggtcaccaacagggggcgggccgcagcccctgggtttcaaacccaggaaaccctaaactcagcctcgaaaattcatgctcaaacacacctaattcacccgaatcatgcataaacctcaaaatcatactccaaatattaataggtaataaaaccgagcaccaaaacacatatttcatgcttaaacttcagccaacattcatcaaaaattcagattaacaacatactagctaagctccaaacattgagctaaaaatttgcatgtaattaaatataataatataattccataatgaacacacattaactagttagggtttgctaatctattttcttaatctcagggtattacaatatttgtgtacgatgtggcaaatccaacttatagtacttaacaaagttttttgaacggattaataaatagcataagaagtgaaatttggagagttttacttcaaacatcaatttgtgggattaaatgtcataaatgttataattcaattagttttgaaatattttttgtcaaacttttcatactagctagtatcgttattttcataaatttgtagccattatttataaatgctctgccattatttacaaatgctcaaaccattttggatcctgttttgccactttcttaagcataatattctcttaactcaactcttaacatcatatttaattttgtttacaattgcatttataaattttcatcttccaaagaacttcattcgtgaaccacatatccaccatatatggtacatcgatcaccgttagtgttgttgaaaaaacttggcatgtgaacattaataactcattattaattagtactatattcaatttcgctctagtcagctattgtagtagcctcgatatggtcaatgttatccagttcaaccaaagttttattctagccaaaacatgaaaactcaagtgatatatatttaaagaataagtgctctccattttctctaatcagtccacaaatcggacactcttcatctaaacaaatattgtatttgaacaaccttgatttaattaaatctcaatctatatccaatactcttaacaggtatttctgtggtagcttaggcatctatttgtcaatccaaggcctcgggtggattgggttttaggtgcatttgagactggaacaaagcagccttgtttaaatatgtttgggcagtggctaagaaagaggataatttgtgggttaagtgggttcacaatgtatatgtaaaggaggagaattggtggacctatcaacctttggcacaagcgagttggtattggagaaaactagtgatggtcaaggaacaaatgaaggacctcggggatttaaaacaaacacaaagaaaatatgaggtgactatcggttacaaggaattgcatacacatttgcctaaggtggagtggagccatcttgtttggaatagattcaacctacccaagcatagtttcatactatggcttgccatgcttaagaagatgaagacaaagctaagattgaagaactttggggtgatagataatgatagttgtcttctttgtaacagtggcagcagtgaaaccattaaacacttattttttgagtgttcttactctaaggactatcttgaccgaatcaaaagctggctgcattggggaaccacctcggtttcgttggtatctatcagcaagtggattaaaaaagcaaagttatcaagcttcaaagagcaggtgttagcggctgctgtggcagcaatggtttatctgatttggggtgcccgaaacaacatgttttggaaccaagtttcggaaaatagtgataccattgtatatagaattaaaagtgtaataaaaaatagaattacttgtatttggctaaagaatgtaactagtagtgaagagcattggtttaatttgtaaagattatagttgaggtgtaggttctctaaattggaggatgctattaggttgtaagaaattattttttggtttataatacacttactgatttactaaaaaaaaatctatatccgataccgcaatccacaaaatgaatttatgttttgatatagacaatctattctagactttctcaagtagcatatcaatttttgatcaaatatgtacctattttaatagttggaaggatattcaaccccatcaatttgttcttcattcgtacaatttgcttccaataccaactgctggagggaggcgtctcataggtcgtccaatttcttttcctatatatactgtatttatctatttgacccataatgtgtttagtttagactcaattgcccaaattttcctagctataaccgcttctttgatccttcttaaccccaacccacctttttttttgtcttacacaaattgttaggttatttttagtattaattttagattaagttcaatatatttttaattgagttttaatcgtgtttggag

SEQ ID NO: 310997 - DNA, 798 bp, Cannabis indica
tacgcactcttcaccgaataaatgcctgaaacttccttagcccaggaaatttgatccatagtcgtgggcgctgcaggaggatacttttaattaaaagttgatctctaatttcaaagagatcttcaatgatttcgttatcccaacccccattgtctaatgaaatcaagcttgcaaccgtggctgtagcaagagctgggtgacttgaaacaacaaaaaggttcaatgaatccggcaaccaaggttcaccaatcactgaaatcgaatgaccattcccaacactccaccgtatacctcttcgaatcaaatcttgagcttccaagatacttctccacacaaagcttgggttggaaccaagttgggcagtgagaaaagaaccatttgagtaatatctagccttgaaaactcttgacgctaacgagttgggtctagtgattaatctccacccttgcttccccaacattgccaaattaaaatcctgtaagtcatgaaacccaagcccacctccttttttgtttttgctaagtttgtcccaagccatccaatgtatacccttattagaattcttcgatgattgccaccaaaatttggtcatcattctctcaatttctctacttatctccaatggaagaaggaacacgctcattgcatacgttggtagagattgaagaactgttttcaccaagatttccttgcccgcccgagataaaaacttgccctcccaaccttggatacgtctccgcaccttgtcttttaggaatcccaaaacaatggtcttgttacgagacactgtacttggca

SEQ ID NO: 310998 - DNA, 1288 bp, Cannabis indica
gaacaactgtattaattgaataggcccaaatactaattgggcctaaataaaatctatcaaaagtgatcattttatttagcaacctagtccattttaattacaaaattaaatgggctacctatatgcatctaagcccaaagcaaacatataggctcacacaggcacactgatttggatggatcctatcatgttactaggtttatacacagatgaaagaagattgcaaaatttacctgttacaaattatttatttgacctattgacaattgaaccattggttgaaatcaaatcattggatctgtcaacaagttaaccattgcaatttagatcaaacaataataggttttataaaaacatagtttaataattaaacaatgtataaaacacacaagcatgtaacaagttggatagttggatataggatttatttaatttaaattacttaattaatttcaaaaatataaataaataatgttttttggaataaaacaaataaataaaatttaaaaaaaaaaattaaacctataaatttaaaaaattaggtttcaactaacttaaatatctatttaaaaaaaatgcatggtaaaatgtgatctctttacattagtggtaccttcaaactgagtttaaagaatttctcacgctttttttgtagattcacgagatgatataaatttaataaaacttttaccaacactattaaaaatatcgtgcaaagctttattattatcactagaaaatttgtcatcttaaatagtccaattaagttcaggttttgtcttagcattaccttcatcatcattttcagtaggtcgagaccaacttgtaattatagtctgcgatgccttctcatcttgtgacttaatgaatgctctcaatagaccttccaatatggataattcaagttattcaacaggagttgtcgtgcaatggagctttcttctacaaacatcaacatcttacaaaaaataaatgaaacggaataaaataatctcaagatcccactaagagtttagtgacaagctcagataccaattgaaattttttatttcaatattaccaatttatttaatttttttaattaaatgcagaataataaaattagtacttaaacaattattctatagctatagatcataattttgtaactccataataaaccaaaaaacaaattgtgaaaactatagaaatacacaaggtttttgtacgtagtttcaataatcattgcagattgtaagtagttcaagggaccacgcccagagataggattcattagatagatctcaaa

SEQ ID NO: 310999 - DNA, 1257 bp, Cannabis indica
attttaccaataccactcacagctatgtgtgaactaaaatttaatactaaaaaaaaaaaaaacaattttaaccatatgcctatgtatccatattcatatttatattcatataacacaaatcaaataattaacttctaagccttgcaacaaacaaatcggcataaccctttgggagcatgaacattattaccatcatgatccgatccatcaatctctactgccttcttcttcatcgttttcttcttcaactcttcttcctcttcctttggaaccctaatcaccaaaactccatcactcatcgaagctttgatttctcccacttttgcattctcaggcaaccgaaactgtctacagaaggtgccacttgtcctctccctacaatgccacctctcaccttttacttctccatcctcttccttcctctccccactcacatacacaactttatgatcttcatgaatctcaagcttcacgtcctctcttttcagccccggaagatcgatttcgaacacgtgggcaccagaagtttccttccagttcatctgggcattcaaagggtccaaaacgctgcgttgcagggagagcagagactgtaacagagacattttaagattatattgagataatatgtttttaagattatgtacggtttttttgatcaaattgttttgtatttatattgggtggccacagaaatagaaagcagattcttgaaatttctggagtaaatgagaatgtcgtaaaacaataattgttggacttggatatagtacttgtgattggtatatttgctactgttgttagtttgacttggcaaactgaaacaagataatacctatgctacagaaaactctaggccacactagaaattttttatttattttttctattttttcccaaatagaaatttgttaaaactgttatttaacaatttggtgataagatccaatcatagccgtaatttttttaatactgttaagattaatcaataattttcttctaagttataaatattttggagctaataatcttctcaacaattattttaattgtatttaattttttaagtttaaattttaatagtaaaaccttctaaattactaaattgatagtaaatttaaagtattatccgattaactatggtcctatggactatttatatatacgctcttgtacatatgacacatttatattactacacataatattaatatttaaaaattatttttaaaattcattaattccagcaagatggag

SEQ ID NO: 311000 - DNA, 1247 bp, Cannabis indica
aaaaaaatgggagaaaatatagagtttttttacattcccgacggttaaaaaccgtcacctataatagggtataggcaacggttttaaattgtgccctatactatagtataggacacagctataaaccgtcgcctatacccagttataggcgacgattttaaaccgtcgggaaacccacattagcgacggttttgaattgtcgcctattatgtccgttttacgacggtcgtataggcgacgattatagaaaccgacgggaatactttaaactactatttaaaaacgttaggaaaacccatttttgtagtagtgattacgtttattagttaaactattttgtatttaaagtttagatattttaatgtttaactttaatcttagactttacatttaataatttttattgtatttagatattaaagttgaagtttaaaatctataccatattattacttttttttattattattttattcaattatattatgtttacttatatttacattaaaaatcttttaaataatttaaattatacaattttttagcttgaaatataaatattatttatatactaaatatatattaacaataataattataaaaaaaaataggttgtaaatatttaatcgtaatttgcccaattaaaaattcaaaaaaaattcaacccgttcaatgatttcctcgattttgtccaataatatatatatatatattattttgttgtaattttgttattttcatcagtacatgacatttgcattgaagaaataataactaattagaagaatttatcatttattgttgtattcatgactaaaataatgatttgaatattactgttttggaatccacttgcatattgctatgttaacatcaatgggatttaacatatatgcatgtattaatgtatttgtcattttcaaccaaacaacccctttgaattatccacacaaacatgtgattgattttgtatatagctataaaagtctaccatgtgttgtatagtagtggaaacttttgacaagtataataataatttcccatcttgtcacgttttaaaagtttgatcaactttttcaataaaaataatacaaaattgatttgtctgcctataagagaagttgatattgtaacgtccccgcttcaagcctccattgggcccttacacccacggactaatggctcttatacacgagttcgtcactctggctgctttctggatcgatgactggccctacagaccaaca

SEQ ID NO: 311001 - DNA, 1127 bp, Cannabis indica
tgatatttaaactttaataagatggtttgttttgcattgtttaagctttattagtttgatttgtaaatttttattataatatttgataataataatagtgtaaactgcttaaactgtatcgcactacaccttattttcacagtgtgatttttgcaattttaaaatttccgttacagtatcaaaaattacaaagaccaaatttgcttaagataatgcaagaacgagatggtatgaggttgtttgcggaagagaatatcatttttcaagccacttaatttccacacttccttatttggagaacacccccgtaaaccatggtacacctctttccctgtgtctgcctgaacatctattacattctagtgcaaccgcatgcttccttttggaaaatatcgagcttgtatgtatccatgaatgacaaattttttatacaaaatgtttaacttttggtggtgatttcaatttccacaaaatcttctaccattgttccattggcttgacatttgattgatgctcttcctctttcaaagttgtggacatcttgtacccactactaactggacactacccatgcttattatagtgccataaaattttatcctccaactcccagtcaccacttgaaattttgaggatcatttcagcatcttcgtcattaaaaatatttttataaattctatatatcaacaaccattaggagctttcagatcgatagcgtaaaactgattaggaaggaaaggccaatcaaaaatattgaaagtaacacgccgaggcaaccaaggatcttctaagacccttacccactattcttaaatatagtttatcaaaaatgtgttaaagtagtttctttctttcaacagaaaaatgtgttaatgtagttcatttctttcatcattgtatttgacttgtagtcgtcacgccgctacattaaaagtcctgctaattatcaccgtatctcacttgtagtcatctgaacattcaaaattattgtcatgactgtatcttacttgtagtcgtcactatattcgaaatcattattatcaccgtatcaaaatttgaccaaacgttatcaaaatctaatgaataaaaaaaaattaataaaaccttcatttattgttgctaccaca

SEQ ID NO: 311002 - DNA, 1470 bp, Cannabis indica
tacatagtttagtaccttattagtgctaaaaataattgtgaaaaagtatagcacgaatttgagcccgtatgagatacgagttcgcccatttaagataaatgggtcagctcaaagcacagtatgaaaaaatcgggagtataggtcgtgtcgggcataccatttaaaaattttgacaagacacgacacaacccatattttgaaaagcgcgaaaaaatatagtttatgcacttttgattgcgatgtcaaaatttgacattctttataccgttagaaagtgtgtgaggagctttatatctctgtccagtttgtgagctctaattatttgtgaatttattatctgattgagattaatcctattatgtccatgccccgaattgtgactagaattagtgccacttgaacgaggttacctatcagtaaggatttctccacatacattggaattcaagtaagaaagtgaacttttcacttagagtttactgttgtgtcgcctttatatgctaatcatatttgtttatgagaatatgttaaatgagttgtgtggataaatgataagggttatgcgttcaatgtataattaggttagactcgatgatcaaaatcgaggtaagcccaagaatatgttaaatgagttgtatggataaatgacaagggttatgcattcaaggcataactaggtgagactcagtaattaaaactgagatacaccctaatgggaccttataaattaaatagacgtgtgagtgtaacacgtgatgtctgtccaaaatagacttaaaatattatggcatcatcataggcacatggtccccaaattttttatcgacattacttggtaaacaatggagttcatagacatcaatgcatgttcttggggtattttgctcaccacaaatgttatatttgtgaaattgcagaggggataatatacattctgttaggaccgtcaaacactatttattttcccattggtatgatattgtttgctttgggtctaagccctcacagatttattttagggtaccttcccaaaaacaaatccctgagtgcttaggcctaaatcgaacaatatcataccaatagagaaatagatggtgtttgacaatgctaacaagtggtattagagccgaattccaaaaattagtcatgtgaatgaatcctcgaaatgacaaacaaaggaggtgaagcttactgctagagccatcagaggttcagatttgattcgaagggagtttgaatctagttggtgaagggattcatctagcttactcaagagaatcttgagtgttgaaatcgaaggatttgattcgcaattttctaagagagttggaaatatgttcttaagtggttgctcaaggtttagatttgtaatcggctgaggggaggcaaggtagtcctttgtttgagggacgattgttgggtataactaaagttccacattggctaaaaataggaaggatcttgggtata

SEQ ID NO: 311003 - DNA, 512 bp, Cannabis indica
aagtgcggattttgaattttccaatccaatccaatctgcacaagtgcgaatatccacactttgcggattagattggattaaatcgtgcggattggattggatcagctattttatcaacaacctattttgtacattctatttaataatagggaaatttacacaaaataacgaatttcattaattttttacatttttccgtttcacttatttttacatttttacttttatactttttgcctttttcaattatactttttataagttatgaaactacatctatacggtttacccataattttcaagctctctctctgctcctccttatgctcacaagcctatctccaagcttttagtcctcaatcgcacaactgtgcctcaagcaaaactcatctatgcccagcattgttgctcaaggcccatctccaaccaatcactctccatctccatgtaacttactattttttttttctttggatttgttttgtatttttggtaaatagatgcttagattt

SEQ ID NO: 311004 - DNA, 1324 bp, Cannabis indica
ggctagcttggccaggcagtctgcatggacgttcttttctcgtgggatttgctccactttatattccttaaactcttgtagtaatttcctgacgactggtacgtaagcggccatcttttctccccgagtctgatattctcctgacacctagttgaccaccagttgtgaatcactgtacacctctactctgttggcccctacagccttggccaatctcgatcctgctattaaggcttcatactcggcctcattgttagaggtcggggacgttaaccgtagggcagcctggagtcataacctgtcaggtgagatcatttctatttcggccccagacccattttcattggacgccctgtcaacgtatactttccacgtgggcataccctgagttggcatactggcgctggcctccgtctcgttgcactctacaatagagtctgcaaatgcctggcccttaatcgagatgcgtggaatgtactgtatgtcgaacttgcttaactctatggcccactttaggagccttcttgaggcctcatgcttatgtaaaatttgtcaaagcgggtgatttgtaaataccttgatggagtgagcctgaaagtaaggcatgagcttccttgatgctattaagaggcagaaagctagtttttcaattaggggataccgaatttcatatcatatcatgcgtttgttgacataatataacgagtgttgaactatttcctcctcccggactagagttgcgccgaccgcattctcagaaacgactaaatataaatataagtcttctccgtgaatcgattttgacagtactggtggctgagccatgtgttctttcagctttctgaatgcttcctcacattcttcgatctatttaaacttctgacatttcttcaggatgttaaagaacgggatgcacttgccggttgagcaggagatgaagcgactcaaggcagtaaccttttcggttaagctttgcacgtccttgtgtttctttggggaaggcatactcagcaagacttgtatttttttcagagtttgcctctatcccacgttaactcactatgaatccctgaaatttttctaatttaacaccgaaaatgcattttttggggttaagttgcatcacataccttcggactacctcaaagcattctgtgaggtcatttgcatggcccatgcatggtttggatttgaccagcatgtcgtctacgtatacctctatgttccgtcccaggaggcctttgaacatccggttgaccatgcgttgataggttgctctgacatttttcaatccgcaagggcatgaccaggtaatagtataccc

SEQ ID NO: 311005 - DNA, 570 bp, Cannabis indica
tttttactttctccttcttcttctttccaccttttcttttagagaaaccttaatttcctaaccagcacccattctctatacagcatgcgcacaaaccagcacccctctctcactcgttcgctcctccttcgatctctggccatcgtcttctcaagtcaggaccacgaaggaggtccctcgccactcactatattctctctctttcctgcgcacgcaccaacactggaaggagaagagcatcgatagccattttctcttcttcccttctccggcgaatggaagtccctgctcccgtaaaccccacccttcatcttctctttgtctctcatctgcatcaccagtagcaaaaggagacagatgtgttcatccaaagccacaaagcccaaaaaccaacccacggtgtcggagctcccacccatgatattgttgggaatatattaccaggatctagatttactaacaagtatgtgttggaatatattttaccaggatctagatttactaacaagtatgttttttacatcctaatatgaatttctaaaacgatcaaaataaacacataaaaggtat

SEQ ID NO: 311006 - DNA, 1134 bp, Cannabis indica
ttttaaattttaaattggaaacaatttttttttttaaagaatcaaaatgtaattgctttttaactcattttgtaaatattttgcacctaatttactattcttaaaactttatataatttaattaacttttttaaactaagtatataattacgtatacctgcatttgcacgtaacttctgtctagtatattctaataaatatcattgaattattcgttatatatgtatgttagatcctatatatatgctcccctatatatataatgtatcaaatggactatgtttgaagtttgattagtgtagggctattgaataatatttaattatgcacaacctataacatagtcttgtttttttagtgaaacaaaatcttaaaggaacacacatacacataatagtacgatgtacgagaatgaatgtttgtgtccttgcttttaatggtatatattaatgataatagatcataactttgcagttaatttagtttttgaatagggacatttagaattaaagagacatatattaatacgaagttggtgggaaaaagtatattagcttttttttttttttggaatgaaaatgatgtttttattagaaattaagatcagtcaatttagaaggaggattgctagcaataaaagtgcgacgtgacaaataacaagaactatgtgcaaggaagtgtgcagccttatagcagaacgctttacaaaatacaacttaacatgaatcaactcagataataggtgttgacaagtcttgcaccagcataccaaatgtagaaggcagagacatttggctgtgaatagcttggactgcaagaaggcggtttcaagcacaacactatcccatgctttgaccttaattcaactaagagcttcttttattccacctagttctgcaatctcaagggaaattttaccattcttattagaagaaataacttcaattatattctgggtagagatttatatccaatttaatccgtactatttttttatagtacatctgatacacactaagtgcagattttatattttggatccaatccaatccgtacaataattcaaatccaatcaaatctattccaatccgcaaaagtgctgattggatcggttactttagatttgttattttt

SEQ ID NO: 311007 - DNA, 1008 bp, Cannabis indica
atcataaggccttctgatagaaagataataagctacaaatgggtatatataagtacaaggaagagatcccaagggttgaggaagcaaggtacaaggctaggttggttgccaaaggtttcacacataaggaaggagtggatttttcatgagattttttcacatgtagtgaagcacacttcaatcataatgattctagcaaaggtagcaatccaagaccttaaacttgagcaaatggatgttaaaacaaccttcttgcatggggaattagaggaggagattcttatgaagcaatcagagggttttgaggttgagggaaaggaggaccatgtgtgttttcttaagaagtccttatatggactaaagcaatcactaagataatggtacaggaggtttgatgactatatgatcaaatcaagtttcaaaaggtgtgcatatgacaattgtgtttacatcaagagttctaaggtaaaggtaactatttacctattaatgtatgttgatgatatgttgattgtaggcaagtacatgggagacatcaacaaggtaaaccagatgctatgcaccgaatttgaaatgaaaatcttgggccagccaagaaaatccttggaattgagatctacagagatagaaagatcagagaactagctctatctcaggcagggtacatctcaaagctgttaactaggtttggttttcaagatgccaaacctgttagcacaccattagctcaacatttcaaactatccaatatgcaagcaccctcaatagaagaagaaaccaagtatatggagaaggtaccatacacaaacttggtagggagtatcatgtatgtcatgatttgcaccaggccagatctatgctatgcaatgagtatggttagtaggtttatgcaaaacccagggattgagcattggaaggctgtcaagtggatgatgaagtatctaaagggaacatctactctgggcctaaggtatcatttgttggaatatgttttactaggatctagat

SEQ ID NO: 311008 - DNA, 973 bp, Cannabis indica
ataatacaatacaatacgacctaataatgcgttccaaacgagccctaaataactatatgcataaaaaaaatattaaatttcgggttcggtttagagagcaccgtaccagagaattttcacttactatttgtaagcattaatatactgcaattactacatttgctgggctccataatttattgagtagcagttagataccatctgaatttatggccatgttgatttttccaacgccgtagtatatattaaaaccattttttttaattaatagcagctgaccatccccacatgaagattgaaatatgatatttaacattgggatttgggaaaaattaatgaaagaaaatcactatatgaagtaagaatagctcttcttttggtctactcaactcatggctcttgttacaagttatgcacattgtgtcaactccaatccaagtatcataagattcataacattgtctcaactccaatccaaatatcatttttttttttttttgcaaagaagtatcaaaacaagtttgtgtttatttgttgtgacttaataaaacttgttgtaacttaatagataatttttaaaaactgtgaaactaacgaaattattcataacgtgtgtaactcttcaaaaaaggtgaaaaaaaagggtaaatatcattttggaccatttgttttacaaaagttaccaattggactctgtgttttgttaaataacaaaatggacactatattttctaacatggtacaaataggaccctgaattgattttatgtcaaaataaagtttacttataatccgatctaaaagtgctatgacaaaattgtttacattttttgtatctgttcgtattaagcattgtcttcaagttggttgtattaaaaaaaaaattgtcaaaaattaaactcagagtcctatttttactattttagaaaatacaggatccatttgtcatttaacaaaacacagggtccaatct

SEQ ID NO: 311009 - DNA, 3039 bp, Cannabis indica
ggcggggttcatctggagatcaaaggagattccttagggtgaatgtgaaacagtatgttagcccaagtcgatgggtgggtggtttttagaatttcaacttttttaatcaagctcttttggccaagcaagtatggaggttatttctatatccagattcattgcctgttcgaattttgaaacataaatatttcccaaattgctctatccttgaggccatgaaaaaagttcatttgtctcatctttggtcgagtttgatatgggaaatggagttgcttaagtacggtctttggagatctattagagatggaacacaagttagggctttcaaggacctatggctccgcgtcagaggtcttttcagccaatcacgaggagaattaatgatgactgtcgggtgagtgaatttattcttctattcggtacttggaatgtgaggaagcttcaacaagtttttttgccaatggatgtggacataattctgtctattccattagcgaggcgtgaggcaaaagatggttggtactggcactacgatagagatggggtttataatgtcaagagtggctactcattggcatggtcgctccaagttaaggagggagttgcaagttcatccaagttaactcgttggtggaaaccacaggtgaaagtgtttgtttagtgtatgttccatttagctttaccagtagcaacacaactcatctcccgaaaagttcaggtacctttttgctattctcggtgcgaagaagaagctgaaactcctaagcatgctctattttcctgttctggtttgattccaatgtggcatcggttgggggtgtggtcggtgctccgttgatgtgcatatggaccaatgcaggaaattttcctgttactcattgacaggctatcccgtgaggcttttgaattgatgatgacaaccttttggtggctgtggtatgatagaaactcattatttggcaacaagcactcgagattgaatattattccagacttagccaataaccatctggcagagtttaaggagtatgatcggcgaggccttcatttgggattgggccttgcaaacccagttgtaaaccgaactactcgatggatgccacctcctcttgaatttgctctagcgacgaatgcttcagtgatttcagggaggggctttgttggattgggggaagtgatacgggatgcagagggtgtggtttggttggcgtgttcatcaggtgtgttagttgatttctttgctaatgtggcggagctgcttgccattcgtctgggcttgactcttgcatatcaatttggttttaatatctccattattaatagtgattctactgttgcaattggttggactaataagcttcacattaattttagttttcagtctattttattagatatatattcttgtttagttgttgttggtggtggttcttgcagtgccattctgcaatcagggaatggtgttaaccatacactggcaacctctgttactagtttaggagattgtgtttgtacagatgcttgtcttcgatttttgagttcttctgtaacagcagatttttcttaataaattttgcatttctttcaaaaataaataaataaaaaccaaaaatataataagtatatgtacattgtgcatactagtatctatatttttatataaaaaagaaaatagggcggtgacgtggcatctgctatgagttctattctaatttatttttttatcttattttttatattttttatttactttttcaaattttattgatttcactcattagtgagttattttgagaaaaatcccacattatttaaaaatgaatgtggtcatgcacttagagcctatttatagtctatagatcattatttcttttatattagtttgtacaaaattaatattacatagttttttattcaaaaaaaaaatatattacatagtttttgtatgtgtaattaatggttcttacttataattagttataatttcttagataaatacaacatatattattgaatttttcaaattttgtcaaaacttcaaatttcttaaattattttcagcaaatagaaatattttattaaatttcagttattttaatttttaattttttattgttatacttgaaattcggctatatttcagagagtgacacgtgtgttgcagtggaatatgaacctcctagtataataattttatatcattaaatgcaagataagatagttcgttaacaaaggtttagtagaagatattcataactcattgaccacaatagtctttagcaaggtaaggataaaagactattgaaacttatattgacgagatacgcacctacctcgaagtacatagccaaagaagataattgatttattaaaagaagagtggataaaatcataaaaaggaacctcgggttacgaatagcgagacagtcacctcgcgattctaactaaagagccttgacgaggcgaatcatctgttaatacttaccgttttttccacatcaagatagacaaagataataactcagagttaagcgagatacaattgtctaaatcagcattaatcatcgataaggataagaacaaaaggcagttaagtagttatttagtattatcttacatgtaattgaatgaaacatgggaattgtcaacgtttcatgaacggttacattttaaactgatcccgattgtaaataactgttaacctatattcctataaatagggaaagattctacagagaaaagagatgaatattttgagagaaaaagattatcaattgtatattgtatctattcttttgaaaaatgtcataataagatagactcgtggagtatgcagatttaactgcaaaaccacgtaaaatccttggagttattcaatcgtttattactatttttgtgatatatttattacgtaaaggcttattatttttagttaacaaaaatctgcgttaatagtttggtgcttttattgagagccttagtgataaaaactcaaaaaaaaaaaaatccctccttgcaaacagaaatctatccatggct

SEQ ID NO: 311010 - DNA, 455 bp, Cannabis indica
aagtgtataaaaatcaaaacataatttcgccgcaaattgctctaaattatataactaattaatatgtatgtatgtatgtatgatttaacagtaattaaactaatctaaaccatttccacctgtcaattaactaattaatattttcaggatgatgactaatgtgggggagttaatcgattaatggagccaaaataattctgagaatatatataatgccagaactgtgattcggattcacgtgacgtctttcttcttttcaatgtattatttcgtttatacgttcatatgatgttgttgtatttttcttttttttattattatttattttcatactcatgtgtaaaatcaaggaattttactcagaagaatgtattctcctttactacttgtgttactatttgtgtataatgttaaagccactttatgaccacttggggctagctcaagtggctata

SEQ ID NO: 311011 - DNA, 1630 bp, Cannabis indica
ggtaaaatatattccaacagatagatcattggccacgtgaaagaagttcagaggagcacgtatgcagggggtcagagggttcttttgcatgaagccatgggtgtgcggtagggctagagggctaatatattgagtacttcgtgaagagattatgtgcaagagtgcacttggtgctgcattgggtgcagttggcttgcgagccttgtccaggagggatgcgtcaaatttatcttacgataagagtgtcttgctcaattgctatcaagaggatggtgcgccatgtagttggcgtgtgaagtttttgaagggacatttctaaagggacttggctttagtagaagcgtgtctgtaggtgccgttgggtacaattagtttacgaacctcacccaaggggtgcaccatacttagtccttgttaaaaggagtatgcattggataattgacaagtgagctactatcagaggatgtattagcttcagcgtcagtgttgcaagggctacttggttaactagagggacgttgtgattgactcgaaggagttcatgttgggggaactattcaagtgcagaggcactactccatgggtggttctaaatagtgacaatgacacaggttctctgatcaagtccaagaatgggtgagggagattgtcacaaagagggtggttctacggagatagaagaacaagtgcaaacttaggattcggatgaagcttggagtaagcttaggagtctagatcaagaagatttgcctgcggtccgtcgatgagggcatcaacatgatgaagtgggggagaatgtaacgtgtgttccaagataacagttacaagctaggtgatgcccagaagttagccaagtggtcgtcaagtggtggcgcatgttgttgtgcatgcttctggcatattgatgcgtagtttgtacgatagtgacattttcgtaaatatcttcaaaattgtccagattgggacgaaacttagtatttgttaagcgaaaatttcacatttagaatattaaaaataaatgcaaaacacaattttacctatgccaaaattatagcataagagtttattaatttaagttctacccattcaagattataaaaataatctcttaattacaatccttttatttaaaggaaataccctttgattccaattacaatgacattaaataattaaaataattagggaaaatttggagtgaatttggaattgcagctgaactcagtccatttaattaaccgagctgcctacatactttctttgtgaaggatcaagccacttgtagttcaaaatacaatattttagaatttggatataaggattctggtagatgaccactttcaggaatcctttgctatttaaaaatttaggaaaattcctgagtgtatgaccttttatggaattttgagagttgtgttttataccatttttgcggtatcggcgactgcacttagtcttagcaactaagttgcctgcgtatccttttgtaggaatcaaatcaaatgtagttccaattttttaatttttttatgaggtggatgacctctcttttggaatgccatttaatttgctatggctttgaagtttagtgcactatttaattttttaggtaaaattactatttttgaga

SEQ ID NO: 311012 - DNA, 2340 bp, Cannabis indica
tttcaattgggaatgaggtcaaatggtttgtaaggtagcttagttatagaaatatagaaatgttcaaagattactttaggtaggattaagttttgctatggaaatggaggaaaaagtttgaatgatttggaggctttgaggaagctaggttccttctggtcctgatccacctcaccacaatggcaacaacaagaaaaagccccgaactccatgaccttaattacaatactatatatatatataccacaaaactaaattatattatatatatgagtgtctctgtgtgtgtttttaagtttttattttggaagattttaaaagagggttggttcccttttgggtcatatgtgcttcagtttatttgtatgtatatatatatatatatatatgtgattgttagtcttttaatttgtaagtttcataattatgtgatatggtataactttttgttacgattgagtactatatctattattctatgttttaaccgttaaatatttagtgatagtgaaaatatgcaagatcttagtgctttttaataactcaacaatgttttaagagagaaataaattaaaatagttttgacttgacatatataaaaacagttgttaggattaaactattttacccaacataatgtaatttaaggactgtgtagccacttgcaaattttaaggtgctgttggattttaaaggagatgaacaagtagaagttcaaatattggatggcaattggtcatgaataatgatatgtacatatgaagccagtaaagtgaaatgagtgctttagtttaaatgaaatgttgtagcttggtaagtagaagcagtgcatttatgtaattcagttttcattaatatgtaatatggcttcttgtagtgttgggttaagaaaatctgttatgttgctcttagtttctttcttaaatactagagtatgaactacaagaggggaaggttggataggcattttgctagttctagtaagttttggaagttgctatgtttcccaacttttgtgcttgcagtagattaaatctttatttgctaaggtgttgtttctttggggggctctacttgtccaagtttaggttcatatatgcttcatatgaaggttgtatctgttgtttattaaagtttactatgtatatcttattattatagctaccaccatgttgtacttataatgagttttattatttgcacaaatatcatgagttgcttagctagagagcattggttaatttcaagatttgataattatatatatttcgatatcatcaataataaagaactgttttattctgcgggttttatttattttatttatacaaagtcaaatatttgattaaaccaaacaagactttgtgagtgttatttatttattttaaaagggttttattttttgaaattatacatgcattggattataattatcaaattttgcacgcctaaaaagtattactatataagaatagattatgaaagtttattactgtcaaataatatgtaataaagatataaacatgatgtcattgatttacacaaatattgtgatgtcattgattttttctttaaaatattactatatggaacatatgtaattacatctgatccaatatgtcggctctctataaagcaagtgatgagtgttctaaactttgaagctgctttgcctaatttgccgcccaagttgcctgtgccaatgtatattatgcctccctgtcccttaagtattagctctgatcttgacccccattattcatcttccgttattacagggagataaatcatatattattattatatatatatatactgttctttattatgcatttgtcatttgttatatccttatataatgaatagcaccagacataagatacttctttgagctggttttggcattctctttgatcttgaggttttttcatattgtgtcctgttttactttcacacttttcctcagtttcttctaagcattctttgtgcgttatatattttttcatttattcacaatgcagcttttcaattgtagtagtatctttcgaaaaatcgcttgaacactagtttggaattggtaagctactcaaactttatttctttatattttataaatcctagaagagtttgaatatcctagatattcatccatagtgaagtaagttctgggattgcatgactgcggtcggatgggtggtaatatttgtactggtaattatagttttgtttgtttgtattattgtggatgttttaatagattaattgcatgtctaaaatttttgggaacgtccgaattatagatgttatgttgccgaaatttcggtagaaatttcagtagga

SEQ ID NO: 311013 - DNA, 1362 bp, Cannabis indica
caacacacgaagcaccaaagtcaagacactcaaacgatagtgagccataatcaagcaagatccaacacacaaaggcccctacaaaccaaataataaaaaaccaaattggcaagcaagccctagattcgcaaagcaatgaagaagaggaaaaaaaactaccattaaaaagcatctcatatatcaaactcaaaattcaacaccccctctgttggaatatattttaccaagacctagatttactaacaagtatgtttttaacatcctaaacatgaacttctaaaacgatataaaataaacacataaaaggtacgataaaccttacattggttgcagcggaattaaatgactcattccgctcagatctctgaccttgtatcctttctgtagcagagtatcaccaagatctgagcccgatactccttctattgtttggattcttcacaatcttacacactatgattgatgactaacttgctatgggtgggcatgcacttaatcacagactcgaatttgatagtgaagaagactataggatttcaaattagaagaagaggtctcaaactctctagttgtcagatagaatgaaactaggtcaagagttattagaaatattagttggataatgagaccattcttttccttttatactaattcacctagggttaggattaatttattttgaataaaaaatgataaaaatagagcaaaaatagggataaatttaaaacaacctctttttttttttatcaattaaccaaaaatacctccagatgaaaatccattaaaatctaccttcttttataagtctattaccaaatatacccttatcagattaattgagtccgcaatccaaaaagtctaaagactcccattctgccatagcgacccaacacaacccaacgcacgcaagctctacctcctccgccattactagcgtccttatgcctcctccaccgtcgacatcaacactacaccatccttcgatatttggaggtcaataactttctctttcccttttttgaatttgtattattctttctctttagatcttgtttctccttcctttaatcttccatttagttttttcttcttcgttgttattaacataacaaatgaatgagcaaattaataattggtagtggttgtagatgagtcaaatatatgttttcttcagccataacaactcacggagaacatcaacaatccacttctcagcttgatcaatgttcgggggaagataaaatggttgcgaagcctacaaatgatagcattgaagctcatggagccttctataggcagagatggttgcaaatctctcatttgaaattaaaaaaaatatcaggttagaggacaaataaagat

SEQ ID NO: 311014 - DNA, 1834 bp, Cannabis indica
tttttttatagataaattagcccccacaaagtaaaaatcatgggtccgtcattggttctacataagattaaatcatttcttttatttgcaagaacttgtgtactcaaaaatataatgaaatttaatgttaaatcatttatcaactttgtgaatcaaaggtacaaaatagctaaacaaccatatggatgattgttgaaacctttcctttcttttgctattgtttacacctttatttacttctttttaatatttattatcaaatcaaaaaccacacaatcatttgttcctattatcacctatttattaacctttgtttctatttttctactaacgcttttgtctataatcacctccgtgtggaatcgaccgcctgatctatactacaaccaccgctagtagaagtcacaatttgggcgttaaatcaagaagcgataaaatagtattaggggcgacaatataaagttgataagcaatagttgcaaataggccaaaactttcccgctcaaattatatgccttccattgacatggtatttgaaaaattaattagaggcgacaagatatacactttattgataattttagtagatacacatactatatacactttattgatgatgtaggaaaatttccaaatgctatatacactttattgatgatgcaggaaaatttccaaatgctatatacactttattgatgattttagtagatacacatggttgtatccctacaattcttgccaagtagtagagggatgagtcgcgatttacaagacaattggtaagtattcaatatctaggccagatgtgacattagatatgagttgtttctttggataaggctctcgtgctaatgctagtgagtcatacgaggccttcttctacttcagatattctttcatggagtttgaacctttgtgtgttgtttggatcaaaatttgagtatcatccattttttattttgagtgtgcaccatataggttttcctgggctttccataatgcaattgatgattcacatcccattacctttgttgaaattccttcagttgataaagttgtatatatagccaacccattaagagatggtcactgacaatccaatactcaaactaaggattgatagttactccaaaaccatgctctccttgtgctgttgttggaccatgaaaaaactctggaagacttggtcttgtaccattaataaggccatcaagttgatgacctcgtataacagtaaaaaccatggtcttccataaaacataattttttcaatcaagcttcagatgaaagggttagggtattaaaggattgagtgtagttgggttgaacaacaacgatggtcgggcttgcaacacctattgtagcagtggttgtgagtacttatggagcctgagaattggacgacatggttgcaagtctttcttctcaaatgccaatagtaaaaaaaattacacagttttgaaaatgcatttctcaactcaaaagagttagagggtatcatattgtatttataccctttaaaagggttagtaacactaataagagtgtggcaagtggccctaatgttgggatcatggagaccaacaataaaaacaatgtaatcatctcattgcaatgcaatcacaatggcttaactaatattaatggtaattaattaattcttaacaattcaagtatcacttttacatactatgagcttgtttggtaggccggataagggtaatattgtattaaataataaataatactatgtttggacaaaacaatgtattgtattaattattaagattaaaaattttaatacaatgtaagttgtattattaatacataacaa

SEQ ID NO: 311015 - DNA, 1227 bp, Cannabis indica
gtaagagcttttagagagaaaaacactacgttctttctcttgagttaatacattccaaggggagtaggctatcaccacactcacggggccgcacctctttgaaatatggtgtttttattactttatcatttttgctctattttaatcatattcttaatcacttattaattgactcactgtcattggctgaaagcgaggtcaatattttgatgcttttattgagagcaaaaacccaagctttctgcttttcttaagttttaacaggcgtacaggatggtggtgcaaactcgtagcggcttggatgatcagggcgacccgatgttaacagatcttaacgtgcagacccatggaaacacgagagtaccactagggacaaaccctgaacatgcaattacacaaccacttactgtgggccatggtgtgacttcctctatggttgggatcacgccaggtgtgcaagagactgggaacaccagtttggcagccgatcaaatccactcccaacagtgaagtcccgtccaccaccaatgcttagagaatagtcaaagatgatactaagatccaaaacctccgaacaacccttggactcatggaaggtcataataacgctttacaccatgatcaggaggatctccgtgccgctataagcctcgcattcgatgagcaaaaatgtcaatttatagagtggagggttagggaaatggaaactttaagggatcaacaagcagccattgatgattgtacaaggcaggccactgtattgataaggagggcctaccaagtcgctaattaagagccaccacgtctaatatccccctgggcggtatagaagagtatgatgctgggcatgccgcccaaactcacaatagttagccgtccaatccacagccacaggtccaacctgtgggccaaacggtagacagctagatccttcctgaccgccctttgggtggagttacacctaataacttcatcccaactgacatctctggccaaccaacccgccaaacaagtcagacaccgagaccacttggtaccttgatatttaataggttgggtgctccacatgacctcaggactgacttgaatagaagaagggggcctgaacgaacaatatgtccaaacggctgtccagccaggcatccacatcaagcatctagctcaaagagatcctaatgtgatacatgtcggtcaacagcctgaaccagttcatccatttgtgcaagc

SEQ ID NO: 311016 - DNA, 1094 bp, Cannabis indica
taaaaatacaacgaaactctcgcatgcatgattgtttttgtgcaagaaagatcactagggtatgatacatccttaaccctccttctcagaatggaatgactgattgaagtctctcttactctctgcgatgctttcttcctttgatcttttcaagcgaagtctaagcttgaatgtttatacaacttcagccttccttcgcagaagccaaagcttgcctcataaaaattcaacatgactctcgcatgcacgatgttttttgtgtaagaaagatcactaggggtatgacatgtcttcaaccctccttcccagaacggaagggttgcttgaagtctatcttactccctgtgatgctttccctttgatcttttgaagcgaagtttaagcttgaatttttattcaacttcagccatccttcgcagaagccgaagcttgcttcataaaaattcaacataactctcgcacaccctatatgttttgcccttcggtgtttgtaagcaaaatcagtgtctaagttccttgtgcacttttagcctttctaagtgaacaccgaaagtttgccatcataggattcgacatgactttcacttaatgaaatggacctcaacataaagaagattgtctgttcaaggatgaaggcccagctttccctttaggaaacgaatagcctcacgcgccacaagaagcatatgctctcactcgcgaggtccatgtcacgaggggatggactggtagtacaattgggttctcagaaaaaaaacccgtggctttttctcacagaagcccagaagtgcccattacacttttaagaaactcccctcccagttatcatggagaaggaggacatggcctggaagaacattatgcttctcgaagcaaggcagaaccacactcaactctcctcctcaaaaattggaaaaggacacaagttagacttcaagctaatgatcaagaatttaagactgaaattcctagttcatttggggggtatggtacactcgattgctgacaatttcaacagtgtcttacgttcgtttgccaaatttgattagttaaagtgtacactgttgggttttatgccctaaataaaactcttt

SEQ ID NO: 311017 - DNA, 1307 bp, Cannabis indica
cgatctcgtctatcagagtttgaagcagaagagaaagatattacgcgattgattaggattagggttaggattatagtgctaaaccagttggaaatattgtatgcaggagccctcactgtagttccataagcttttcagccatggattaattatgttgtgttggtatattaatgacctatacttaattatgattatgattagcttcttaattaattagactctttactctcacaccctttttatatatgcacttaaatgatcatttaaattgggaattctaattctaaacggattagtataaatcttaattatttgaatgtaaaatcataattaaaaagataattaagatattttattttttttgagaaaataaatttaaatgatgagaattttaaagggattaagatatttctgcacgtaacatatactttttcaatttaattatttattttgcaagaatgtttaattttttttattattattattataaacaataatttttcaatttaattgtgtacacaacaaaactatgcgcttttaaataattgtgtacaagtacgtgtcttttttttttaaaaaaaaacttaattattttttaatgaaaaaaataatcatagttaaatattagatattttttatatatgataagaacactcctaattacattctatactaatttttttttaaaatacattattaaaactattgcactattaccatacatcttctgtaaaataaataattaaaattttattttttaaaaaacttagtatattttatttattttaaaatatataatgttaatatatacatacatcctcgtacaaaaataattattaaaactcaaaataattaataaaatatatttaaaacaatgaattgcaccaaaataaaatattatttaatcggccattaattcaaaacttaaaatccaaacaactgcattaattttaagagcattgccatggagcatcaaaatatttagcatcactatgtggtgacaccttataattaattatcggttctctataatgtttattaaagtaaaatatgtgagacccgatattgaattgcactaataacaatattacacattacaagagtgctcgacactttaacattttactaatactaatggttcacactcattctccctaactgtcaaacaacatattaaatttgaagaagacgaagagacattgtctgaatacgatatattactagtaagggtgttcatccgatccaatccgcactttttggtcaaacaacatccaatccgcactaagtgcggatttcatattttggat

SEQ ID NO: 311018 - DNA, 869 bp, Cannabis indica
ctgaattaattaaaaaaatattattggcttaaaaatttgggacaaccctcgttcgaatattggaccccaagaggctgaaaatttctgatcaataccctaaatctcgtctctctcagctcttgacaatttcctgtgacgatactcttgccgacgattatctgccgacgacttctcctttcttctcaactcccaacggtagtagctttcttctcagttcctggcaataccctgcctgaagatttcccaagtcgaagcctatgggagcccaagccgaagatcctttcttggcagctcctttttgagttcttatcggcaatgttgcttgaaaatggtaccaaacattctcttttgcatcaatatatattgctttctgctatcaattcataagttaaaatatttatgtgaataattttggaaaactaaaatagagaaacattcaagaatatttgtgcctctgtacgattttgtcttcttatacaagggggcttttgatttattaaataatattacgattgaggaagcagaccgagatcgtgagtcaaaccttttgtatatctattgcagcttatatttcccattgacatgccattactacaaaaatcatctttggaggcaattttttaaggctttcagtatcggttttggcaaaattcgctatcgacgctgatcagggtgacgttattgggtttaatttaaccgacgtcatatatacccctatggcgtcggttattagctaggaactgacgccctagggatatatctggcgtcgattagctaataattaacgccatctatacccgaatttaagtttctttaattttacttaatttattcagattatatatttataatttatatattattttatt

SEQ ID NO: 311019 - DNA, 2282 bp, Cannabis indica
tgcctaataaatgcatttctcctccaattgttgagctgagacggatgaaagcattggatgatcggatcggccaaggtcaaagagggccagacaactagcaaaaaattatttattgtggcaactctaaagcgccaccttctctatccattattggagacaaaagcaactattcctaatgccttgtccctctacctctagtcgggagctaatcttagagaatgagatagattgaatgactcattagataatagtagattcaacctttatcaccggtggtctgtctcagaagcatgatatgcttctcttaaggtagctattatggttacctacctttatctagttttctctttgaatttttcctttactaagtatttttttttttttaaaaaaaaatatatttttgtacatataatataagagtttttggcgactaaagtctttcaactactgtttcacttacatttaatcctccaagctcaaatttcgacgataaaaccctccaaactactgaactggtagcaaatttaaggtgtcatccggttaagtgtcactatagactacttatgtatacattcttgtatatgtgacacgtttatattggtacatctaatattattatttaagaattattttcaatattcattttgaaattaaataaaatttgaaattaaataaaattataaaaataaaaaataaaatattttaaaaaatgaaaaatattataaatattaaaataatttttatattttttaaataataatgttaggtgtaccaatataaatgtgacacatgtaacaaaagtatacacataagtagtctacattgacagttaattgtggaaaatagaagacaccttaaatttgctactagtttagtagtttagagaattttactaactaaatttgagcttaataggttaagtgcaagtgaagtaatagttgagagagtttagccacaaaaaaactcataatataaaaacctataattatctttttgttaacattttgtttaaattttagatttttttaagttccacataacatacaagtgtcaacatattattgagccacatgttatattttaatagggatatttacgacaaaattcctttaatcttttgcagttgttacacatatgatcctaataaaaaaaaagtggcggtaaaaatctccttcattactattttgttgcaactaaactattttagctcttaagtgcaagctaaatttgtcaattttccttctaaattgttaaagattgtactggatattttttgtaaaaaaaattatatttgtacgcttaaagaatttttttttacaattttacgtgtttctataaaaataacaagaaaattacataaaaataacatcaaaacaacataaaaataacaaaaaatagcatacaaataataaaaaatcaacaatattttaataagagtacaacatataaagaccatattctataaataatatcataaaaatcgtaaaaatatttaaaattctgtacaaccgtatttcgtaatttttttgttgtttttgtgtatctgtgaaataatttcaataattattcatctattttaaaacctatttatttattaaaaaaataattaaaaaaaaacatttgaaagaatatagtctacttattatgagcactagtacttgatttacatttaggttcgaccctaaattaaagtgagataagcttgtacatagagtctactcattttaggggtcaaataaaaagaatatcttttaaaaatattattatttttataataaaggctccaatttttttcgtaggcctcatttcaactcaagatcaggagtgctgcttacattaacttattacaatcatgataatgtcattaatttttgaaattctaatgtgtactgtccttttttatattattaaccattattttatcactatgttctccatttgatagcattgattttaattaggactaggatatggagttgagtggagacacaccagactacatactttctctcttgccatgtcaattaagcttataatgccgttcaaaaagcctaagtcaatcttctttgtggaaaatataagatgtttttattaagagaagggtctcaaccaccaacaccaacaccaacaccatgagtaatgaaatttaaaaaaggtagggataggaatttattaaatagtaatatctataaggtaagattaaatacaatttggaaaataaccacttgaggctagctcaagtggccataggaggtgcgtgtgtattggaggtcctgggttcg

SEQ ID NO: 311020 - DNA, 1951 bp, Cannabis indica
aatgtaccacggaatacattccgtgaaagtacatcacgggacaaaatcgtatcccatatatatgacagtaaaataataaaagctagtagttgactgctacaaaaataaacaaattaaaaggctatacttaacattattagcgaatgagaaataaaattgatctcgctatatatatatgattagtgttgtagacaagtacatgtcgagttgttccgacttatatttatttgtgttttttaaaacatggatcatgtaatgctatgaaaaaatatacattgtgtccactattataaaatttcattttttcgattgttttagacagtcgtgtaaagtattcttgtcagtctctaagaccatcacgtattcggccgtcgggtaactgaacagaataggcaacaatgcaaaattgtgatgagaattttttttcccaactatgaaaaacccatactgagcattatagccgattgtctataacagtcgcctatattataagcgaaagttttgcattgtcgcctatagtataggtgattatgcgaaaccgtcagctatatatatattattattatcgataattttgcacaatcaactacataggaaaaaaaatcttcagatctttacaatatgaaatgcacaatacaaatacaaaaaccccacacctatatacacaacaaatctatacataaacataacaataaaagaatggtcatttgtcttctccgacaagcactcaaaatgggagtgagattcgggccacggctctgccaaaataaccacaacccccaagatacctgaagatctacgaaacacaaaaatctcaataatacatatatcccaaaataaaaataatagagattaattattttataaacctacggtcaccgacgaggaggaggtgccaccaaccctcaagatctgctatcgtgttgagagagagaaagagctccatggtggtgggggttccattgtgagtttgaagatgagagggagagaaatacgagagaggcgcgagatctaaaatgtttgaacaagacaatttttttcgggtttttatatgtttaaaatgctatcctcgatggtttaaaactgtcggatatactattattgctaatggttctttaatcgtcggctatagtataaccaacaattttaaaccgttagagctaccgttataactcgttttgaaatttaaaattgtgactgttttgcacattcagggattctaaaacaattgtttaaaaccgttgggaatagtggagtatttccgatagttttaaacagtcacttaacattattagcaacaatcctcgaaaaaaaatcgatttgaaaaccgacgggaataagcctttttgtagtagtggtcgtatcgtgctaacattttttaaatggtaggctcagcatgattcgtaggcccgatatatttttatattgtgttcagattcgtgtagtattttattcgagttaattcattttcttatactctattgtttcacatttagtttcaattacttttatataatttatcaacaatattttatagaaaatcatataaaatttattaaattttgtatatctactaataaatatttaaattattattattactattttcaaattataaggattttaacatttcgtgcttttagctaaattatatttgtgcttacaaattgtgtctttcaggtttgttgcgtcaatttgtaatattgtgttgtattatgtacaagtccatattttttttcatgcctggtcgtgtagtgtcaataattctagtctgtatttacaccagacttgtttggtatgccacattaattcgtattatattgtattatagtatagggtaaatactattttagaccctgtgttttacaaaagttactaattggaccctctgttttgttaaatgacaaaatagaccctgtattttccataatggtacaaataagaccctgag

SEQ ID NO: 311021 - DNA, 952 bp, Cannabis indica
tttttttttgactctacttcgatcagtttttttttttttgggccggatagtcactagagatttttttttttctttgtttttctctgatatcatgttagaatttgggataaggtgaatggggttctatctcaaaatcaattggctatgagaggaatagtccattcctcttatatattttattatctttccacacatcaacaatgtgagactctttaacattaataaaagtcatataatttaattaagagcttggaagatcaaataatattgaaagttcataagaaaaaaatacttattattttattatccttatataatatttttaaactagtaacccaatatgaatgattaattcccttaattatttgttctcgatgcattgactttgagtagctaattagttatgctaggaacgtgtatgaataatcaattaatatttaaatttaaaatcaagcaacttatttataatatacagaaaaaagaaaatatattataaactgattgatagatttataaaagaaattgacgtacgtacacttgccatgtgacgtcacattttgtataatttataaaagaaaatatattatctaatttttttttttaagttatatgaatattctgaaactcaattacactaataatatatgataccgaaaaaagagctaagtattaataatgtcttttaacaattttctaaaattaaatatattaatattatattctaattattgaaagaatcgaacaataataatattgatataatgcaaagttattgttaaaacagatagtttagtagtcttagaagctattcaaaatagttttgtgatatgttcaggttttaatcttttgattgaagactgatcaaagcgcattttatttactctgaagaatattaggttattttttattaagcgatttgtgaatcgaataaatattggtaactatagtatga

SEQ ID NO: 311022 - DNA, 2615 bp, Cannabis indica
attttttttaattttttaaaaagggtaaaatagaaagttcatgtaatcaatggaattaatttgtacaaattagtgaaggatctaaattttgatattgggagttttattagaggcaaaaaaaatgaaatttcctaatgattattatagtcacaaaatgactataaatttataccgtaaaactatcatgattgcataaagtaagttaagtaaaaccgttcattataatatttaataatgataatagtgtaaaccgttcaaattgcactgcaccacactgcatttttgcagtgtgatttttataattttaaaatcccacagcacatttgcaatttggtttaaaaaaaatactacaactcgcaccacccgcactgcgaacacccgctaccaaaaacagcttgatccacatcttaaacaagtgccaattacaaacactctcttacacttctcattgaaaaatcatgcagctacaatttgagtttcgactaaaaaaaatacaaagttcccattatacatatatatacttatttcatcatcatcatcatcatcatcatcatctaacaataaccattgattttatttcacattttcaatgagtttagaactctaatgctcattattatgataaaatgacgatcaaaatcttagaaagttggcatcttttcaagagacttgatcttaaacataccctccattagcacgaatgacctgcccattaacccactcactcccatcaccagccaagaatcccaccacaggaaccacatccttaacctctccaagcctccccatggggcactcatccaccactttcttcaagtcatcctcactcttccccgaaaagaacatatccgtcgcgattggtcccggtgccacgcagttggccgtgatccccgtcccctttagctccttagcaagtatcttgatcatcgtctccacagccgccttcgatgctgcatacaccccgaatcccggcttcaatccccccaccatggacgaagatatcgatatgatccgacccccgccgccacgcttcaacctgtttgctgcctctcttaggcacaagaaagctcctcttgtattcacactgacaattattcaaacactttgtgagcattaacataagaaattataacacttttaggatccctttagttagattttcaaagagacatttattcaaacagtctgtgagcattaacataagaaattataacacttttaggatcccttttgttagattttcaaggagacatttattcaaacagtttgtgtgcaattaacaaaatatatgcaaaaattgagagtgaagacctgaaagttcgatcgaaatcttcaacggaggcgtttgaaatgtgagggtactttggatcgagtactccggcggagttgaccagaatatgaggttggacattgaagaacttctcagctgaatcgaagagcgatttcacttggtcgggatcggacacgtcagcttggaccgcgacggctcgaggagtggttgtggtggtggaggtagaagatgaggtggcgttgatctcggagactaggagttgagcttgagcagagtttgaagtgtaattgatgactagacgagctccgagtgaggctagatggagagctatgcctcggccgattcctcgagaggcgccggtgacaacggcaactcggtcaagaaggggcagagatgaagaagaagaagaagaggtttgagtttcagatggtgtagccattaatggaggattatgggtttgcttaatggggaaagttttccttttagttacaaatgtaacatataataataatttaatcaaaaaaaataatatatatataataataaatatatataaatatattttttttttaaaaaaaaaaagagaaaaaaatattagcatacgagtgattaggtccatttgttaaaatttaggataacatgaatatgaattatgttatatttcaaaattaattgcaatgtaaggagtagtacgttcctcttatatattctattatctttctacatattagcgaaatgagactatctaacactattggcatattttatgcctttatagtttctactaatttaatggccaatttcatagattgtattcggtttggtagggtggtcggtcgggctacacgccagttgaggaatttgcgtggggtgctctcgtattcttatctctttaaggatttgaatctttattcctacttatttttcattggggacgagacaggaaatttcattatggtacgtggactagaattcattagtacttgaaccacataaaaatctctgtcttttcttctttaatttgcttttttcttaagcttatttattttataatcagttttcgaaaatctcagttactataaactataaaagtgacatccaaaatatattaatacaatattggtttttttgatattattgttgttgttattgaatttagttatcgtattatattgtgttcgtattaacacgtttataatataatatgattattgatcgtgtgaaaatctcaaacataagtacgaatacgaatataatttccgaacaaagcatacaatataacatgataatatttttttttgttggggtaaccgataaaggttaa

SEQ ID NO: 311023 - DNA, 607 bp, Cannabis indica
ttgttaattagtactggtccctcgatcagtaaactacttataatttattttcatcatgatatatatatgtgtatgcatgagtactactttatatatttgtcactttattaatcagtaatttggcttttgtattttgtatttttgttatgatctatatgatgatatgatatgcttaattattgtgttttaattttttttaaaaggcactttattatttcatataaaatatagcaataattatttcattcagctggtttttttatatagcaaaacatcaaggtttttaggtaaaaacaatgttatatattaatgtatagtatattactaattttagtttttttttctacaactctaatctaaaacatacaagattatgatcatatatacatattgatcaatataacacttaggtggcgtttggttggaggtaattaaatggaatggaatggaaaggaaataatttttattccattcctttgtttggttgcattttaaagtattggaatagcattccaatggaatgctctttccaccattttggtggaatggctattccattttaaaaagaaaggaatgaccattccaatgtaacaagaaaaaaatttaa

SEQ ID NO: 311024 - DNA, 1040 bp, Cannabis indica
taaaataatttccaacaccaagaaccaaaccctagtctcagaccaagacccaagacccggacctgggacctagacttggaccgggaccttgaacccggacccttaccccagacctgaccttgaccctgacccgaaacccaaactcaaacctggcctccagactaagaccctgacccaaacccggaccctagacccgaactcaaacccaaacctcaagactagaacctcgaacccggaccaagacccatgacctggacccagaccccaaaccgggcccgtatcccgaacccgaacctcgaactcgaactcgaacccagaccttggaccccaaacccggacccaaaccaagtccttagacccaaattcagacttggatgcggaccaagacctagacccagaccccaaacacaaacccagaccccatacccgaaccaagacccaagacccgaaccccgaagctcaattttggtcttgatcttgatccgggttcggggtccaggtttggggtacgggtatgggtctgagtttgggtccaattctggggtctgatcgagtgcagggtccgggataggatgagttcatgtcatggtatggtgtaaagaatattaattttttaaataaaaaatactaaaaatagacttaaaaaacctgagccaaacactattaaatttttgaaatgacaaaaaacttttttctgctctcacttttgaaacataattctgaaaactgaaagctaaaaacatagccaaacaacctcataatatctatgatctttacctttaaaagtattttttccaacctcgtcttcattatcttttcaagaaaggaaagaaatatttttctgtatttataatctttgactttaaaatatagtatcgtttccacaacattaaaaatgaacaaatacattaaacattacaaaaaatggttttaagtgtgtacttgaatattttttttattgatagatttaatcacagatgatatttattcaatggttaatttcacaaatgcacaaaaataataaaaaaacaacaaaaata

SEQ ID NO: 311025 - DNA, 704 bp, Cannabis indica
tctcttcatctattttttctctttttatgtgtatattttgtttagtattgtaatattatttaatccatatttgtcctttgtattatttgtcataaaattataatcttgttagtttgtattttccttgaagcacaactttttcaacaatcaaaagattatccctttctaccttgcttcaatggaaggagagagatcaacgtgtgacaatacaagaataagaattatggtatattgtgatttcctattctaatgactgcatatttagacatagaaattagcagctcattagtgatttaatttcaatttatgttatatatgtgcattgtcggaaaataaggccaattgtcaacaataggcatttgagatataatttatttttattaaaatttaggtgtgtcatatatgttatatatgaattttgatatttttcatattttatgcctaataaaaatggaatgcgaagatttggtcattttttgtcacaattttgtagtttaagtagcttagtagctaagaaaagacattttggatattttagccatgggattggcttttattctacttagtggatgttatacttatatttcgagtatcaataagaaactgacacgtgtatcaaatttagaatatgaatcagctcaaaccacacattattaaatgtacttaaataatttgcctcgagaaatacagttaatagaaatact

SEQ ID NO: 311026 - DNA, 1031 bp, Cannabis indica
accaattaagcaaaaaatgtagatgttatcttttttaagtttaaaatctactaatatctaaaattaattaataaaaataataagtaattttaaattgataataggatttgagatttgaaaaataaaaatctacataaaaatttacacaaaaaatcgaaattaaattacatgaaaaaaatgaaaaaaattaaaaaaatggcaaaaaaatggatttggtacggatggtatgcattgcataccatccgggcgtgtccaagggggagccggaccgaggctggccgcacaagcatcatacgtagagggtttccaggcgcggacgtgggttcagagaagaaccctatctgagaaaccttagacaccctgtgtccgaatgcgcgtgacaccgagtgtcactcgggtgtacgggcacaggagatgcaatcccctacccgattttttttcaaatttcgaaaactcacaactaattcaatttaattgaatttagttctataaaaaaataaattgcttaattttttccatgttatctacataaaataattccagatcgtgaatctaattattttatataaaaatttcgtaaacatcaatcaatcatcaaataaatacatagatcaacatgaatcacatccacatcacacattcatcgttttaaatccatatttctttaaagtaaatcattgcaatggttctaaggccagttgttggattatatgttaccagaatctagattaactaacaagtatattgattaacactctaaatatgaattctctaaaataatgtaattagacacatataaagtttaagggaccttacattggtggcagtgtaataatatgtctcctcctattcagatctctaacccttgttcctttctgtcgcaaagtattatcaagatctgagtccgattctccttcaagtgttggattcttcactgtcttacacactatgattaagtacttgacttgctatgggtgtgcatatactctttcagtattggctcgaaaaatatgaagagggagagaggattt

SEQ ID NO: 311027 - DNA, 571 bp, Cannabis indica
cacattattaaatgtacttaaataatttgcctcgagaaatacagttaatagaaatactcaaactcgtcgctatataggcaatagcgagacgtgagtaataactattgactgatgaattagcaagctaaataggtccatctcgagataaataaaatacacaatgaaagttgttcagaatgagtagacaataagtttgtaactcactgatccacatactcatgagtatgagcttgcggctcaatgatccatatactcgtgagtatgttcaaggaaggaatataattttagcattcactcacctcgctctggacgcattgaagtaacgacctcactaatacctctctcaacgacagaggaagactgtgagatgtatcgtaactcaacacttaatatttttctacaaagatggctaagaagaataagattcaaacgacgataacaatttagtttagtcaacataaccgtctatggataaagataaagagcggttggacagttatttactattattccacgtgcacaaagatgaaacatgaggaatgttcacgtttcatgaacagttacaaatgat

SEQ ID NO: 311028 - DNA, 1203 bp, Cannabis indica
aaacgcataccttccttaggggacgaatgcaaagccgtctctaggccagtttatacttcttaggtgttgaccaataatggagctcgtaggttacatttacttgtattccttctcccactcactattttaggttaatgtgtttatttcattaattcccataatacatattaatcattttaataattatgatagatttatttataataaaagtcttaaattataaataaattttctattataatttttaaaactattttaaattaataagttaattttaaattaccaagttaagttaattttaattaccaagtcaattctaaattaatctagcgactttacatgtttttcagtttaaaaaaaacggtaaacatataaacacataggacaatcctaatatatcatgtttctactatgagatgcatgataatataattgtgggagatttctatgtgtgacatgttattcattaatgtatgagcatgttattaatcaactataaatgaacatttatttaaaagcaataaaaaaaaatcatatcatgctcttctgattttcttccaatgcagttagaatatttgacatcttggtggattgagaacgaacatctgctttcaaattagtacacaagggcaattcattagttaggcatccttccaattcatttctttccattacacacacaagatctaatgacaataaatattccccattaacatccttctcccctacaaatattatcagtgcatcccataaagcttggatagaaaactacaaggtaattttaatctaactcttagccatattttctcagttttcaaactcaattgtcaaaataggcaaaacccctccatcatacctctagtttccaaaaggtgtaaatcacctaccccaagttaccattatctcctgcaaaaattaatttactttcaacaatctatagaggtcccaaaataggcaaaaccccattaccatttcacattaggcaaaatccgagcaattatactcgtgaaaaaacagacaaaaaaatagagtatactcgggaataagttaccattacccctgcaagtgtaccccactgaatttgagaagtgagcaagattctctaaacaccattgacttgtttattttctttagcaaatgattcaaattctaatatgttacctaccaatttgacaattgttgttactgatatttcgcaacacc

SEQ ID NO: 311029 - DNA, 800 bp, Cannabis indica
attaaatatgtatattaaaccataagcatgtaaaatacatgttaacataataacttaaaaactcttaaattgataactatcatattgtaatgggttttatttagggcacaaaatccaacagattcctcaaatgacgatgctccttatctacttatttgggagaatgctcttgcctatgtgtagggtaccttaacttgtatttaattttcataagcattggcttatattggattcgcttttaaccttttcattttatttatatgcaaatatgtcttagaaggtgtttcaagccttaaagaataggtcttgtgatagctcttgccaggtacctttggccaaacgacccaagggtgatgaggtaccaccctaggagaagagttcgatcgagtcagtcatcgacctttcaaagtaggtagtgttggaggtggagccacgggtcaagaagagctccaagtcctcaaatacttctatcgtggtgaaccctgagactaagtagggtaaagagatgattcaacattagcaagaccgattactccccgaggtacatgatcagctgtccagaggagacgagatgtctgtggagctaccgatgggcgggcttctgaaggaggcaacttgagtaagtatttttcctttggtttttatgtcgttctttgatccgtgcatgttttaacctttctctatgcaactcaacttgaagatggtctacacttactctggagccaagtccacagacttgagaaccataactgttagtgttattattttgtgatagtgtttgttctgttcaatgtctagtc

SEQ ID NO: 311030 - DNA, 2126 bp, Cannabis indica
aacatctccgagaactggtgaacgatttcactagaactaaaaaattgattgagtgatgttagaatatcacttaggcatcaaaaaaatacaattccgacacgttttcttactcatacaatgtccaggttgacatcagaatgtcaacctcggcaccgattgttaaatagccttcaataaaacgacaagaactcacttaatattactccgattgacatgattcttagtgtgtttgaaatatcttttcaaactctttctaaacacgtacgtctcacacttatatctcaattatgaatattttaagtctaaaattcatccctaagttgaagtgcaattttgtctgcaaatatcccgaaaagattcgagggacgcgatttaggctctaaaaattaatgatcatccggagtcattttagccattagatcaccatcaatggtaaagactagaccaaaattattttttttaaatttttgtaatattttattattattttaatggacatcattgcctataaaaggagagctccactagctcttttttcatattatgctaagtctccataaggttagagcatatctctatagtttctctctctagaaatatgagctattcccttagtcaattctcttgtaattctcatgagtaataaaagcttaaagtagatgtagctccattactattactatcgtgatatgtctctcttatttaatttctttcatctattacttttctcgccaatctaacaagataatgttggccaattttcaatgttaatattttggtgctttcattaagagccacaactcaagttccttattatcgtttgagttctttactaggagctttattccgaaagtgttgtccatatttttttaccaaaatacgtggcaagtagagaatagaacatatatctatggggtccacgtagaagagatgacagatcaatattacatgttaaattttaaaaaacattctaaaggcacgggggcatccgagactgcacaacgattccaaaaggattgttgaaactaggttctaactctgtcctctacgagagtgagagcctcttggatcatatagcgtctaagagctaccaaggtgcctgactcctctcccaagacgaagcactgtagatgagtgcttcaacgcagacggtaaagtaaacctgccctaaaaaaaagatatctttaggatttagaccatattgttctgacattgtgttttcctatgaacgctaattgacgactaatctttttactgtcccataagccgtatagaagataggtcttgtttcaccaaactcctactttggcgcgcacacataacaaacattatttcctacacttacagaaaatgccatgtagagcctagaggtaaaaggaggatgtaccaatcacacaagaatatcccatttctctgccaataaataaaggaggaatgtaagagaaaaaatgatcaaaaaatatagaggaaaaagggaactctgaaattgaaaagatctatggtaataacaatattactcataaataaaagtgctcgcgaactaagcttaattaacacttaaaccacacaaaaatacttttctgtactcataattaattttcctaaaacaagattaagaggttgttgaaaatcttagtcaacaaaaagtaattcataagttcaaacaagcaatcatcaaagaactcaataaatgttactaatgtcttcaaacgcatgaagcaacactaccattcttggtagttgtgccaccactcagcatgcaacaagcactgaggtgccccatagggaaacaaactgtaatcgagcatttgaaaggactcagacttgggaacacagacctatgggtcctctgcctgatgtggagtagtcaactgttaaagaaatgaattacgagcaagcgtccaaaaggactcagatttgggatcgcagacctacatgcccaccacacaccactgataggaccaactgtaatcttgctcgaagcaattcgaataatgcaagaaactgatctcctccacgggattctcctcataggtccaatgactctaggctgccccatgacccttcaaagggaaaggtgtgacagtcagtagtcccgtgatccgtaaaaggaaataccgagtaag

SEQ ID NO: 311031 - DNA, 1348 bp, Cannabis indica
aatgtctatttaattaattattttaagaaaatagttaattataattaattaatttttttttttgaaacagataattaattaaatttaaaaaagaaaagtttaccttagtaacctactattacaggttaaagaaaaatgtaagttacaataaaaatgtaaccattaaataattacccatatatatatatatatattatccaccattgctttctttttttagtaaataccctgaaaagaaaactcatcaaatttcatatgggtttgctctaaattgaacaaaaaaaaaaaaaagtttagggttcagtttgtaagcgaccgtttatacccctctactcatttatctgaatatgcaaatggatcgtattttatgcaataatgaaagggaaagccattaatgggtgggtgagttattcttcataattttactgagatggtgaacaccactaccactactggtttagggcatggtttgcttatcactgccctgtgtttgaagcataaagttctaaaatttgatagaaatataaagatgaaagaaaaataagccataactcactctcaaatcatgaattatctattacctatgacatttggcattcacccacatctaatgataatgaagacctagataatgttatgccacccttatggaagttgacttgcctttatcccttggtggcccgattgacccgaacatgtaatatgcgcatgattgagtgaatgacttgtataatcgaataaaatcaatatatgattcagtcacatgattcaaagtctcaattcacaacacttgtataggacaacgctatgaatttgagtttaaccatatgaattgccttaacaatttggttcaccggtggactctaaatgtgtcaggtaagttttttttccttttagtttagttgcacattagagacaactcgtttgataaatttggagttttcttactatataggtgtttattcttaatattagttgcatgtttagttattttttttttgtgtctatgcaattagtaggttgtgtgttcttatgagttaattatcaattatgaggtcatgatactaagggtatatagcatgtttgaagaaaattgtgactttttgaatctaaatgattggtgagattgcattgtactttaacttttttttttttgaaatggaaaatgtaaaacttcattaaccaacaaactccgtcaccaaacaaggtaacaaatcagtaggaacagactccatactgaaggtacgatcaggatacaacttagaggctctagcaaagctatgagccactgaattagcagatcgtttaacaaaaataacctcaacggtactcaaatccgcaagcaaat

SEQ ID NO: 311032 - DNA, 621 bp, Cannabis indica
tttaaaactaaacaaaccgttctataagaaatgagcaataatcataagctaacaaatattgtggtatattctaacatgttaagttacatagtaacatatcatgtagactcacttctggtcttgcttctcaaaaagttgcctaaaccaagtgctaaacaaattcaattcaagtatcagataaagcattgcagaatagattggtaccaaccaatgcaaatgaacaaaaacatggagaaacgaaagataattaagtgggaagttccaaaatcatccttttgcaaactgtgttagtggagcacttgggttcctggatgtagttaacaaaattttaggatccttttctgctgcatttgcgtactcatcatctatatgacttcttggaactaatatcataaaaccaaacccccaaaaaaatcaatttcaaaccaattaaaaaagcttaaaaaagactaaactaaacactagtatcaacaaaagcccatcaaattaatctgaaccaaaaatataagaatatgaacataaatcacaaatccctaattcaggctataataactcaaatcagaacctaatttcttgaaatagcaaaacaataaccaaaattagtagcaaaaaaaaaaaaaa

SEQ ID NO: 311033 - DNA, 1704 bp, Cannabis indica
ttctgacacttagcctttttttggtaattaccatctcatgagaaataaaaaatcaaagtagacgtagctccattattgtcgcgatacagggtgaactactatgaatttattgtgtcgcacttataattacttaactacttttcctttctcgccaatctatcaagcgggtgtggattagaagttcagtccaaatttcaaagtcaatatatttttaataaaagggaataaaattttatattggttaaaattgagtgagtaaaaatattatttttaacggtaaaagaaatataatttaatagaaggggcatagttatctgattgttgtatttaaggaagaatttttaacaagtcatatattttagagggcagaatcatgtagtatcgaaaatttaggaagaaaaaaatactaattattctattgagaaataagaaccaatcaaactatataaaaaaataaacatgcacatgcggagtgcaccatcatatgagagaatataaaactaaatttacaagggaaattttattgattgtgcatatattaggggaaaatttgaaacttaaaccatgatatttattagttgtaatttctcttatgttcgtagaacttataattttgccgctcataatgtggctagatgggcgtttgctcatcaggtgtttgggactatcccggtgtcctccttacctgacaatatattttgtaacgaccaagaggtctaacttatttgaatttatgatataaacgctttttctcaaaaaaaattaagagaaaaggcaaattttttattctatccccataatacccctcctaacacctaacttatatttcttttatctcttcactcattcacactaactcactcataaacctcattatcttgtctcattttctaaccaaataacactaatttttcatacaaactacaccaaaagctcatataataagtgctctggtggtttttttttggagggagtgatggagcaccaaacacgattcaatgagtaatgaattttctttgtttaatcttattgttggctgttctatttagtttataatgctattttgatgtccaatctgttggttgtggctattttatattgttttttgtgtgaaaatagtcgttcttcaaattttttgcattttttctggtttctggttttttttttcgcttagtccaaaagtgcttgataagggtctaatggtggtccgatgattagttcagattctaggtttgggatgatgtctatatcagtatgatagggtgtccgatgttagtcttatggtatggtctaattgtttattgttgaagttaggtttatagggtccgatggctggtccgatggccattttacttgtgactttagtgtttgggtatgatgttctgtccgatggtgatccgattgtgtggtattgttaggttataattaacctatatttcgggtctttaaagttagcattatctcgtctattggtgtcttttggagcagttttacgcttgattttcattatttcaggttcccggggtgttaaagttcgaattcagtcaaatggcaaaaaactgggacaaacttggaaaaaattggaaaattcggctccagacgcatcagtagtcgcgacctccagagagccaggtcgcgaccctggtcgcgacttcgagagtttggcagaaactcggtttttcgagttttgcctgtagtcgcgac

SEQ ID NO: 311034 - DNA, 652 bp, Cannabis indica
aacttttacactagctagctagcacgtcgacatatacatttagactgtatattttgatgataaataaacaattttaagaagagtttagatatcatgcgactatgtatgtagagaaagaaaataaaaatgtttgcgtacataaaattatagctctataatgcatctaaatgacaaaaataaaggaaaagttcactaacaagttaaaaaagaagaaaataacaaaatgtcatcaacctcctaacacaattcatatatcaattcatcattagaggtcatctctctaacacaattatattcaaatatatacctgtatatatatagagagagagagagtttaatttgaggattatagcttgactgaataaagatccttacaacatgccgtgttctgtgtcatcaattaatgattaattaagattgattagtttttaatgtaatgtttccaagtttatattattaatatatttgactggaattttaattttctaataattaattatcatcatccttgctgaaattgtgtgcttataatgcgttgaaattatattattcgcaaagttaattgtctttcaaaataattcatgtagtgttcttattttgaatgggggcttgtatttctcatttacatgaattttacaaaaaagaaaaaaaa

SEQ ID NO: 311035 - DNA, 2125 bp, Cannabis indica
tttacaaaaaaaaaaaagttaatataaagtaatgattcaatctagcaaagcaacgacttgatgatgttattatttcatcagatactttgtccagattctctactctgacacataaatatgggcaatgaatgacggaaaggctaaacccaactacctcaattaaaataatacactctaacaaaatattatagggagattaataaaaccattaaaagggaatatttggcaccatgaattaaacataaaataaacgatgatagatctattttctcaaaaaaaaaaaaaagagaataggtagattcagtggagcatttcctaatactacttacactaatactaacccaaaataacgttaaagattagatatttgaacaaatgagcttgaaagagacctactttcacaaagaaaaacagaaaagaaacaaattattctaaaactaaactatcaataaaaagcgacccaaagcatgagtaacaaacactaaacactaaaagaaacaaataccttggtgaagatggacaaaacgtcaccgtataatcagctcccgtacacgtaaacgtactagtggcatcgtcgtaggcgtagctatacgatctgggacacgcggacttgaacatctcagagtaaactgacggcctgcaagtggcgggtgtaccatacgcgccgctgcaacagtattctggcgtcccgaaagcctcgcacgcgctcttacacgcgttaccgttcccgaccctcaactccgacgggcattgctggttcaagtcggtggggcaacccgtggaggcgcacaggcccgacccgccagttccttcaacgaccatgggcaagttatagccgtcgacgaggctgacgtcgtagaagtcctgcccgccggttcctaaagtgaactcggcgagggtcgctggcggtgcagctccggcgccgttgcactcgaccacgccagaaccacagtctccggtgagacaggacccggatcctgattcatcaaaagtacaacccgtccgaccccaaaaacgacccgaccaacccgtcggagccaggaaagatcgagaggtgtcctttggtagctcgaatcctgtgctgtcgagtcttgggcttccggcattagctagaatgcccggccaaacagtgtagtcacatcgattaacgaagttaaaggtggcagctgtgacgcctgaaaaacgaaaaaaaaaaaacaagagtttttgttatttgtctttgtttataaagaaaagaatctcaatgaaatgagtgtctagtttacctctggaggtgagaagtaggacgacaaagctgagaatgagtgaaaatgagaaccttgaataaggatccatgaaaatgtggtttctcagttcagtagtagtgatgttgtggtgtttgatggggtttcttagagtgctagaggtagaagataatgaacgtgtatttggggtttaagataatgaaggtcacgaccccaggagggagacagtgaggactgtgagaaatgacaaatgggttctacttccggaggactggggttcaatactccattaaagctgattttcttcaatcactcactcactctctctgtgctactgtcaaagtaggtgtttttatatttgctttttttttttcttttttttttccaattatataagtgagagggagtactgtccattaaaaaaatcgcataaatgaaaagaactcgtaacacttcatttatattatgggcaggacatgagaacgctccatatattatgtgaaacatattttctggagtaatttttaaatttatggtacacgaacttttgagaaagtccaacatttcaaagtaaaataaaaaataattattagcggcgaaactttttttcggttagggacagtaaattgaaagatagaaggaggggtatacaataaaattcatagtattttaagggcatgtcaaaatgctctataagaattagacagtacagctataaagtttatagttaaaaaaatatatatattttttattttgtattgattaaattttctgttttattaaagattgtatactatgttttatttaaatataaatttggtgtattatattttcaataatacttatttgataacctgtgttttaaaactatacatatttgg

SEQ ID NO: 311036 - DNA, 694 bp, Cannabis indica
tagggcacaaaacctaacatttaattcccaaaccacttacagatttaggctgacaaatgttattccaggctactgcaccagccccatggaagagagcctgacctttccataagaatgccatgcaaattgcttcaatagctttcaacactttcttaggcatgatcatcatctgactccaataggcctggatagcaattaatacagagtttataagtgtgattatcccagcaaaggagaggtttctggagctccaactcttgattatagctgtcattctttctcctaatagttcacactctttgccagatttcttcttcccataaattggagtccccagataagtaaaagtcatagcttacctaataaacccagaaagctgcattatgtgattcacagtttcattttgcatattgctacaaaagatggtggttttacttgcattgggatgcaatctagatgaaagagagaacaatttcaaggcatgtaggatataaaggatactcttgatatctccatgacaaaacagcaagacatcatcagcaaaagctagatggttgagcttaagttcagagcatctatcatggaaatgaaagtcctctttctcacccacctgtcacattaatctagagagatattccattcccagaacaaatagtaatggagatataggatccccctgttgggttttatgccc

SEQ ID NO: 311037 - DNA, 1824 bp, Cannabis indica
atgaatttataaatcatatagacaagtaattgacaacatgaagcaaataacacacaaatgagtgaaaaatacttttgtttctttattgattatgaataatagagattacattgaaatggagttttatttagggcataaaacccaacatgaaggccaagaaagaataagaagaagaagctgagaccaagaaagaggaagatccatccaagtctcctacgatgtaggcttggtttattaccctttttttatttatttaggaaaagggccttttggccgagacaatgatttttcccttacggcaattttttgtaaagacaaattttgcatctttggatggccaacattacttttatttatttcttttcatttatttcctcgcatccttatgtacaacttaatatgtttactgatttgcatttttattcacaacttaaacaattatattttgatcagacttaagatactttaagtatttccattgatcttgtttttcctttggacttgcttaagtagttattaatacactttatatgtatgcgactagctatattctgctatgctttttattcacgagcagttcttatcggttctacattgcgcgagcagttataatctgacctttataatttagtaagaaaacttaaacatactttgaataattccttttatgatttactttatatattttttgattttctacatgaatagttaggccttctattcatattttaggttaagtattactttttcaaggtatcttggtgcctcgtttataatacatgcctacataatgcgacctgttaggcattcagcctcgcatgtagcttaatgttgtttttatgagataaatctcaattacaactgcaacttcaattttcatttctaacgagaaaggtttaatttgtgattttacattgtcaatagacaatttaatcaattatttggaaaaaaaattaaagtggattgggtctgcaatatatcataaatttctagataaattccagttaaccatatacatatatatgcccctcaagtaattttaaagagaaaaactttgtaattacttgaataatacttcaactttattgataataaaaatttacatcacaaagagaaaatacatcaactacataagtttactaataataaggtcccaaatgttcaacattccaatggttctttattagtaagccattaagctgagccaatttatagacctcggttccaactattgcctcgatagcataaggaccttcctagtttcgtttaaatactcctaccgatgcatctgtcgtgtttgcaaattttttcctcaacaccaaatctccaacattaaagggccttttctacactctcttgttgaaatatctcgtatttagatgctgatatgttgtattagtaatttgtgacttagtatgtttttcttcaagtatatacgaggataacttcaggagttcttggctttcttcttgttatagaaatctcttctgtgggccgcaatattaacttctactaggagaatagcttttgagccaaatgccaacgagaatggagtgtgccctgttgctattttctaggaccttttgtagcgtccaacttctttctaatagtatccttcaaggtgttgaaactgaggagaagcacttaataattttgttcctttcatagaagtcagtgaacaatgcaccatcaaactgagttccattatcaggcactattttaatgggtattccaaatctgcaaattatgttctgacgaaaaaattgagaacctttttgcaaattatttaaactacaggttcagcctctgtccactttgtaaaga

SEQ ID NO: 311038 - DNA, 2561 bp, Cannabis indica
catgcagaaaagaccaattcaaatttgatagatgcccgtgaaaatcaaaataaacctgacatttatggtatttgataaaaacatatttttttgttaaattattgataagacacagcacatagcttataaactaatgcgcaattttcttacgagacatcaaaagctatgatctattccagagtaccacgacatcaactaaatcatcagattcagttatttgcttgtgttttcttctatatttattattcgatgttaaatcatattgccacctttgaaaactactaaaaccatgggcgcttactaaagttgaaccgccgaaggctttaaaaagaattaataaatacaactgaaaaaaagaagaaaagatattacttgataatgagaagaaaaacaagataaaagccttagagaagtggtaaacctcctttactttgaaaaaaaaaagaagaaaaacagatttgtgcatatcattgaacaacaaataaataaatgtgtgagtgactctattaccaacaataattttaacctctgatatatacatatatatagagagagagagagagttagacagacattcaaagcagagaatttgttttctctttaaaagcattaacaaaatgaaattttgctcaaagtttcaatgcaaaaaatgaggttaaccccagcactaaacagtctaacttaaaaataagaactacctatcaccatcccctacaaacttacaagtttaattatgccactctactataaaacgaaaaaggcaatcattgtcatagacaaggcacaaggcatttaaatttaataaagtagcaactgcagcaccaggacaatacaagtttcagtcaatacccaatttacacataaacctatttcaatatctgctgttgtctcaacagaagagcactaagcaccctcaatatttagaacaaacatatatacattatataattacatttatcatccacaaagtaccacaaccaaatagaccctattgaaagttgaaactgtttaccttagcagcaaagtgaaaattagttcagcaaaagagtttgaatatttgagtaaatgtgaattaaaaaatgtacatacagcacacacatatgtataaaaataagaagaaactatacttgcctttgtcaccacataatctatggaaggctcaaaactggcaggtgtcttccttgtaatgtcatttggaatttgatccaatgaataaccaactgataacttagcagccatcttagcaataggaaaaccagtagccttagaagccaaagctgaagagcgagacactcgcgggttcatctcaatcaccatcacctcgccatcgattggattaacagcaaactgcacattagaaccaccacattcaactccaatttcccgaattatcgctacggagtagtctctcaacctctggtactccttatcagtcaaagtttgagctggagcaacagtaatagaatccccagtatgaactcccattggatcaatattctcaatagaacaaatgataaccacattgtcagccaagtctctcataacctcaagctcatattccttccaacccaacaaagatttctcaaccaaaacttgagtagtcaaactagcattaagccctgccttacaaatagtctcaaattcctctctattgtaagcaatcccaccaccagtaccacccaatgtaaaagcaggcctaatgatcaaaggaaactcaccaatctcattagcaatttcaaagcaatcatcaagagttgttgcaatccctgaaggtggagtctttatgccaatgttcttcattgcctccttaaacaactccctatcctcagctttcttaatggcttcaagcttagctccaattaactcaaccccatatttttcaagagcaccactctcagctaaagccacagccaagttcagagctgtttggccacccatagtgggcaacaatgcatcaggtctctccttttcaagaacttgttccaccaattccggagtcatcggagtaatgtaagtccggtcagcaaggtcaggatcagtcataatggtagccggatttgaattaatcaaaatcacttcgtaaccctcttcctttaaagccttacaagcttgagtacccgagtaatcgaactcacaagcttgcccaatcacaatgggtccagcccccaatatcaaaatcttcttcaagtccgttcttttcccaactttggaaggtggcgcctccgttgccaccttctcactcctcaccaagttgactctttgagtcttgttctccagtcgagcaaattgagtaatcggaccccatggacgaagcttcaaagcagcagtagaagaagaggcctttcttggtcctgggagcttagtggagccaaacaacaatcgaaaggtgttggctttagaggaatagagggaagaggagaaaagggtcgatgattttgaagagacataattgcagtgattcattgtacaatggctcattctctatctatctcttatatcttctctgagtgtaaatataacagaaaaggctttgaggtttgaggtttgaggtttgagctaaa

SEQ ID NO: 311039 - DNA, 958 bp, Cannabis indica
ttcattgtatttgttcatgtttatttatttatttcattttaatctaagtctaataatctttttgttcttatttgcagttgacagtgcaattcgttttatgttcgtggtctaatgaggcaaagttgttgaccaacgtcactggaggtgacatgcctctatttgtaggtatggaggaattggttgttggtagtgatagacaacctactcaggatagtttgcgcagtctagcttcgaagctttcacacacgctagaacaacgagcggaggaagctagaatcttctaaaaggatacaccaccacactctccactattaggcgctcgttctgttccatcgtctccatcgatatctcattctgcatctatgctgcagtcaacatctattcccaacacttcacagcctcaggaacaaatatcttctgccatattggcgagattggagcgtgttgacagggaataacttgctttgaagcaagcccagattgatattctgaaaggacaaacaaagattatgggttacttaaagaccctattagcactcatgggaaatccaagaaggcccaatgcacaggcagagccacagccaaaccccgtctctcttggagatgagttcatactttccaatgattaccgacttgatgatgtggaacatgtactccatatacctcagaacatgtcgatcacgtccattagagatacgtaagtttgagaggtacatgttttggagactgttccaacaatagtggagaagagaccgaagaagaggtcgaggtggtttgatcatacactgaaatgaagaagaagatgaagtcatcgatagtttatgtggatgttgacctgttggaattaattttaccaggatcttagatctactcacaagtatgttgatttaacaacctaaatatgaacttctaaaacgataaataaaacacataaaaagttaagaaaccttacagtggg

SEQ ID NO: 311040 - DNA, 1295 bp, Cannabis indica
ccacaatggcctatatacttttgttcaagaccaattgcaggtgctatctcaaatccctacaccttgttcaactctcaatctccaagatcagcaacatgactgtcttgtaacctctagtgctagcaatcaagactcaaataaaaacaattataatccctgtcataattcatctatgtctattttagatttatggcacaataggttaggacaccctgctgaaagagttgttcattctgtactgaattcatgtaatatctctgttagtaataaaaataccatttcagtttgtcaagcttgttgccttgggaaaattcataagatgccctttccaaaacagtctaaaactgtttatactgagccattgcacctcattgtttctgatctttgggggccttcccatattacctcttacaatggctacaaatactatatgagttttatggatgcttatactaggttcacctggatatatctccttaaaaacaaatctgaagctctcaaaacttttcaaaatttcaaagctgaaacataactccaattaggcaagaaaatcaaggtcttacaaattaactgcggtgaggaatatagaacctttactgaaccactaaaacatgcaggaattgtgcataaacatccttgtcctaccacttatgaacaaaatgaccttgttgagagaaaacataggcaaattgttgaacatggcctaagtcttcttgctcaagactccatgcctctcaaattctaggatgaggcttttagatcagctgtttatctgcaaaatcgattacctactcatgtcttacaacaacaatctccaattgaattgttgtttcacattaaacctgagtatagtaatctaagaacctttggttttctctgttatcttaatatcaatccatataataggcacaaactagactttagatcctctccttgtacctttgtaggatatagcttaaatcacaaaggatataagtgtctggatgcctcaagaagattgtacatctcaagagatgtaatttttgatgaaacaaaattcccctatgatattaacactaatgaatcttccaattcatctacctgtcatgaggaaactatgccatctgcaacaattcctaagtcatctcatatgtacactgttgagtatctgtttcccacagatcaaacacaaccctcttctcaaacacctgtgttctgtcctgctcccatagctgagtgttaggttataattagcctatgtttcgggtccttaaagttagcattatctcatctattggtgtcttttggagctagtt

SEQ ID NO: 311041 - DNA, 655 bp, Cannabis indica
cttgttaacaaaaaaaaaaaaatgagtaaccatctatgtggttggcctggggcatctgctatggaatcatttatttatgaagaaattacaagggttttcatactttttaatttccttctaaaagattttcataaaatatatatatatatatatatttttttttttataaaaaatcatatttttgttaacttgtaatgagaattcccctttatttattttcaaatatatatgtaaatatagcatgagtataatttttagaagtcaaattcaaataggatatattaattaagaaattatgactcaagcttatttaggaaaaaacctcaacttcaataattcattttttttttttgactcattgttgtctttctcttgtgttaatattggtttgaagaaaaagtgaaactatacagaagtagaacttcttactggaagccactcttcactcattcgggatcatgaaattcaccaaaacatgtgttataccgaaattaaatactgtaaaattggaacgaattaccgatagaataatctggttgagtcgcggacaatgtcgctctctttaagacgtttcgcggctctgcccgaagtgtgcacggcagtctagcaaccacggcgtccccaggataaaacagcctctgtataagtacgatac

SEQ ID NO: 311042 - DNA, 2558 bp, Cannabis indica
atatatattctttaaccttgtgtcaattatggtttggatcagtgttttcttttttatttaaatttgaaatcaagtttagagtttgttttagaataataaataaataaaacaaataaatggatgtttatcttggaagttggcagctcctatgatttcttaaaaaaagaaaatcttgtgttatactcttgcagtgaaatgggtgcccatttttcaccttgtgggaaatttttagcagcctgtgttgcgtgtatgcttccccatttggaagctgatcctgcctcacagaaccaggccaacaatgatgtcactgggattccaacttccccaactcgtcaccctctttctgcacatcaggttatctatgagcttcggatatattctcttgaggaggcaacgtaagcttcaaacctctattcatgtgttgtgttttaatgttttcttgatttgctgttttcaatgaaattgttcattttgcttgtatagatttggtttggtgcttgctgcacgagctataagagctgctcattgtttaacatctattcaagtaagtttctttcggcagattcagcttacatgcatatacccatgataattctttgtttaatgttagctaaattagatttttcttattgctctgtaaattcattgcaatatttaatgattgcagttctctcctacatctgagcatttattgcttgcatatggtcgccgccataattcgctccttaaaagtgttgtaattgatggagaggcaacggttcccatttacaccattctggaggtaaagaaatctgttttccaggtcattgaattaatgctgtatatatgttgattaaactattccgttgaaaaatgtggtgttcctttcatttctaagaatgatgacacatttacagacagagcaacaattctttcctcactatcatttttgaacataagattagaacatttacattgcatattgtagccatcagtgtcttcaggaatctaaaatcttgttttagaaatccgagaccaaaactgaatgtttattttgctatcgctcagatctacagggtttctgatatggaacttgtgagagttcttcctagtgcagaggatgaggtcaatgttgcttgttttcatccatctgctgggggtgggcttgtttacggaactaaggtaaacgctcaaggttttgtatccactatttggtttctttcagttaagattacaagctttaatgttcttttggtgtttctaggaaggaaagttgaggatcctccaatatgatcgctctcaaggcacaagtcaaacatcatgtgtatttctcgatgaaaacatgcttgaggtagaagaaatgcaaagtttctagatttaaatgttgatctattcttcatattctatttttcgttacttactatacttgttcatcttgttttaggtccctacttatgctttggaatgctagaagccgtgctatccacatgcggatgatgctgctcggtttagctggtttgtttctattcatggtaaattgaattttttagttttgcttttaatggaatttgctcagttaaccatacccatcagggagattgtctcaaactcactttacttaattccaatcgtcttagtagtataattcgaagtatgtgcgtttcggctctatatttacatatatccttctgaagggtaccatatatttatttgtttagttttaataattaggaacccgtgtccagtgagtctttttatcttactgggcaggtcaccgtcgttagttgcaaaaggaaatacatttctcgatctacaacgggaagctgtctagaaagcaactacaaaattgctcaaattgtcctgtgcacttgtgcatttcttggtacaacaaattcatatattatgcaattttatgatcaagtttaaggcaatgcatactgttacttcttaattcatgatattaataatcattgatcattttcccatcacttgtttttatttctgaatctgatttactggccctacatataagttgcaaactacagttaatcataattaaaaagtggttattatttatttttcacaggattaaaaatcagccattcttacagtgaacccctaataccagtctgttgttttcctcgatcttcggtgatctacggcgatacggtgcagtacaagttggtgaatgaatgaatccctttatcatattttttttccagttaaaagaaggaagaaaaaaaaaggtcttgttgggtgacagaagtaaatatattaggaagttgatcttaaattggagtgaagcaaaaggtggtttaaaatgatattttatttttgttgatccttcagttttctgttaaagaaagataaaagattgttgatatgtaattcttccttttttgttttcagaaatgtaattagttttgttttctgtttctatacaaatgatcagacagagaggggttaaaaccaagaatgttttctccttttctctttttttgtacaaaacaattgagtagattttgatatcaaattagagtggttgggttattttgtcatgttattatatatatatatat

SEQ ID NO: 311043 - DNA, 828 bp, Cannabis indica
acaatatttagataacgaaaataaagaagaaaatgatgatttatgtcatgatagttttgttgatcagcaacagatacacgaacaagtggatgaactcaacgatacatatgaagatgatgatgatgaatacattagaagcgatgttagtgaatggatatggattgattgtgcatcatctaaaacgaaaagaaaacgtgttaagtgagtaagtatgatcatcagtttactaataatgtgttaatacaaatgatgtttagtgagtaagtatgatgtttagtttactaataatgtgttaatacaaatgatgtttatccgagttacattatgtttatatgagattaagtatgatgtttcctactaaccaatttaatttgtgtatctcttgcagatgacaaatcaaaaagatgcaaataagttttagtttcacaatcctcgagctaaactgtcatacatgggcagtaagcttctatggagagaacattatcccgtggaaagggactttttgagagtcagagggaggtagaccaggttcctacctatgaagaggggtcatcatcagggacacatgacgaggattcaccggacccacctatggaggaggtggccagccaagacattgaccaccaagtctgccaacatgctgatgatggggccaacctgaactctgcggatctcaatctcggggctccagattcagctctttctgtccctgcacacatttagacagtaattttattagtagcattaaacattatatttgtattacacatacaaggttttcatgttctgcatagtgataactcaatgaaaatagagttatttatatct

SEQ ID NO: 311044 - DNA, 1481 bp, Cannabis indica
cttaaaaaaatgtaaccataatggttacaataaaaatgtaaccattgaaacctcttccatgtactaaaataatgaaacacaaattaaagacacactaattttaagagtctatttagtatttcttttagagatggaattattattattattattattagttaatactactctatatacgtgcatgaaagtgtttgatgttgccacgtacataattatttgtttgatgtgctcaacataatcacgaggtagtatctaattttagcatacttaagttgtggtcttgttattacatttaagtttagactccaacgttattattggttgagaatctaaaactcattttcatgttaggatatcgtgattaagagcttgcaagggtgcggataatattatcatattagtggtagctagttaattaatgccatagctaaatcctagtatatactgtttcatttaaaagtattggttaaggagaaaacgattatcatgaattaaggattttccatggagatatataagaaacccaattatgataatttgacttcgttgatactagtgtctaattttttgtttaattacttaagctagctaggttatgtaggggttgaatagtggttatggctagtaagtgcccactaccaaaattaagtatcgagtaaatagttatttgactattcgttgtgaggagtcatatttgcggaaactgggttagttataactacttttccttgggagactgtctgggtgttgtgacttgggttgagtatttattttatatttatatataagtccctaaattaataattccattcattttatagtgtaacttggactgaattgatattcctaatgaagttacattttctttttttttttaatgaagttaaatattacttttacttaatttctttcaaaaaaaaaataaataataatagttttcataatttctattataactttaaaaatgcgaaaattatattcctttttgaggagtgctaccgtcactactacaattttaccttttagtgacattatttagcgacacgtacaaaagtgcgggttactaaatagttatgacttatgtttagtgacatgagtaattagactctaaatgttaggtgttagtctctcgtaatgcacgtcactaaaaatacgaagtatcactaaaaagtaaaatccattgtttttatttttattaaatgaaaaatactgactatagagacgcatcacgagggattgggaaagcgtgtagtgaccagtcaggcgcgttactaataccacataattatcatatgattttagtgacgcgcaaagtatgtcaggacacactttctaatcagtcatagcatgactctatataaactaatacaataaatatgtattttatttttttatgtaggatatcaaatttttttatttattttctaatcaaatgcatcagatttttttattaaataaataatttaataataataagataa

SEQ ID NO: 311045 - DNA, 665 bp, Cannabis indica
taacaaaacagatgatacagtatataacttttacaaaacacaggatctaaaatagtatttaccatttgaaaattaatccccaaataacaactgatcagtttatatgaaattcaatttcactttaaatttttaatggatattacccataaatatgtattattaggaaaatttaagttcttatgtttaattttgttatataattaaaaaaaaaattatttttatattatatatatatgattgaagttgttttataagactaaagagaaataaaaaatattgagttagagaggaataaaagtaataataaatataaatatatttttgatatagtataaaaaaatagaatttttaaaataaaattaagaacagaaaaataataattcttagattttgttatataaaattgttatttatgttaaataataatttacatgaaaaataatatcatcttgtataagtattctcaacacatctgaaaacccattttagaaaagaacaaaaaactccaacaaaattatgagctattctctaccagaatgatacacaaacaataaattgactccaactatacaatcaaaaaattgtaggctaattaagatttttattctctttgacatgtaccaaatcatgttccctaaactattttggtcgttaaaaattcccca

SEQ ID NO: 311046 - DNA, 1781 bp, Cannabis indica
gactaaaatacccttaaaaataactgtaaggatcaacctaacccacatgtacatacagtaagagagagtaaggcacaaatgatcagattcgtgttaatatacttataatgcatgagtttcaatatgatacaaacatgaattgccacccctaattagcaattgagattcttcagagaatcaagagaaactgtttgcaaattaagaatatactactcaaagtgaattgaatgggatgcgagataagagttgtgtagctgggtcgtattttattttccatttcttttatttgttttattattattattattatttttgttcatactgtttttttgctataccaactttgattttatgttatgtgtttacataggtgccgtttgtaacactttcttttttctaattttttaatcacaaaataaaagtaaaagttttgtttttaaaaattttatttttgaaaaacaaaaatgtgttctgtaaccacttttgttttttcaattttaaaaacaaaaaacaaaagtgtgttctgtaaagtttttttaattttatttaaatttggtctatgtctggggtcggattcgggttcgggtcaaaggccgggttcaacgccagagccatgggaggaatttggatccgggtttagttgtagtccaaaatattgattaagaaaaaaaatattttaaaaaatattgaaagtgattttttttaaaaaaaaaaaattgatgatcaattaaaaattgaaaaataaaagcagttttatagaatatatttttaaaaaatatttttactttttcaattttaaaatagaaaactaataaaaaaatattaccaaacaacaccataattagcaattttagatttaacttatatgtcatatttcgaagaatcaaatttgaaactatacagaaaagttttacgagatgtgaaataaatcacttttaacacataactggtactccttcatcagaaaaataaaataaaataaaataaaacataactagtacgtacacaattattagaataaaaaaagaaccaactaattaattgtttgatttttgaattgttttacaaaagaaataaaaataatagcagatgaaaaagaatattgcaacatcagagttaactttaaaaatacatatattcagtttactccaccactcaaaagatacaatatataatagatttgttgcaacatgctcattcaaccccttacaacttgagcataatttaactattgtgcaagatatgtatttgcactactaaaattttctacaactacagagaacttgttatacaaagataaaacaaaacaaaaccatatcacatagacaagactaattgtaatggcaaaaccacaaattccaatcccaaatcatgcctaagccgagagagggtcaacgggcctagccagaaaaaaaaaaaacaatctcaaatggctaaagatttgagagaaaaacccttagacaatataaaatatttagaaaaactttaacagactaatttaaaatattttacttaaaaaagttttatcttatttagcttataagttataacactattacaaaaagagtcatttaagaccttttttgatggtcatgaaatattttctatagtaatttttacaaaatataaagtctaaaataatatttacccaacaaaatacattttttttttatatatataataaatagtaaaattattcgacatgaaaaattaagtgtatctttggcatcataactaaaaaactagtttttgtttttaaaaacagaaaattgtttttaaaa

SEQ ID NO: 311047 - DNA, 1776 bp, Cannabis indica
agatccaaggacatacttaagttcttggttttgttcttgattgtagatatcacgcctgtgggttgcaatatttacctctacagtaacattgctttcgagcaaaatgccaatgaaaatgaagtgtgtcccattattgttttctttgtggttctatgggcccaaagtactagcggtagctcatcaactcatcttcctttggcggtgtctaacttcttctttatagtatctttcaaggccttattaattgcttctacttgcccattttcttgaggccttgactctaacgagaagctttgaataattttattcctttcacagaattcagtaaataaatctctatcaaattgagcaccattgtcggttactatcttaattggaataccaaacctacaaataatgttcttgataataaaatcaaaaacttttttgcatgtaatggatactaatggttcgacttctgtccattttgtgaagaagtcaactgccacaacaacatattttatgccacctcgacctgtgggtaaggtcccaattaggttaatctcccatatttcgaatgagtatggcgaggtcatcattcttagcttagtgggtggtacttgaggtatatgtgagaaccgttcgcacttgtcacatctcttaacaaactcatgtgtgtctttattgatagttggccagtaatacccttgacgtattatctttttagataggctctgccaacctgcgtgatccccacaaaaaccttcatgaatttctctaattatttcattggcttctgctggtaatacacatcgcattagaggcatggaatatcctcttctgtacaattttcatttgaccatcgtgtagcgaggaatttagtataagagctttcgtgccttggtcttatctgtgggaagttcttcattcaacagatacttaacgattggtgtgatccatgttggtctcgcatctatcatgtcaacattttccttttcacatatacttggctcgtccagtacttccactgggaccaagttcaacttatcaaggtcaaattgagatgctagttttgctaaagcatccgcattagagttgttctcttggaatcagttctatcttgaaataatcgaacttctccaagttcttccgaactttctctaaatatttggccattttcaagccatttgcttggtactctcctaagacttgatttactattaactgtgaatcactgaagcactcaatgatcttaacttttagtgtctcggctattcttaatcctactaacaaggcttcatactctgcctcgttatttgaagttttaaactaaaacctaaatgtatcatggaatttgaagctttctagcgattccactattacccctgccccaagccattcttgtttgaagctctatcaacgaacagtttccatgtttctatttcatttcctgttttaaattcttctcctaagttaattccttctatcaaaaagtcatccaaagcctgtcctatgattgaagtcctcgggtgataagttatttcaaattgtcctaacttaatcgactatttaactaaccttcctaatgcatcaggttttgatagtacttaccgtaatggttgatttgttaagaccttgataggatgtgcttgaaagtagggtcacaatttacgagttctatgtatcaagtaaagtgcaagtttttctaaaggtgggtatctcgattctgcccccagtaacattttactcacaagtaaataggtgttgggattttatgccctaaataaaacccattac

SEQ ID NO: 311048 - DNA, 691 bp, Cannabis indica
aaataaaaagtaagaactgaaagagggagactagatctggacgaatagagacgaaaaattcagagctccttgttcgtgagtcactcgtggtggagaacgttcaaatcgaaaaggtttcaggctcctggttttcatcgacgataaggcatgtctctgatttgccattaaacccgatgatgactgaagagattgagacagagagagaaagggaaagtcatatgagagagggaaagaagacgaggaagagggtgcggggttgggaggggttacgagtatcatggtggccaaaggcaggctaggccatcagtggccagaggtggccgactgggtagtgagctttgttagaatctggaaaggagaaagagtgagatgcatatatttatttttaaagtaattattaatatttaaatagttaaaattatatggaccaatataaatacaccatgtctacatttatatacacatggatcatccatgttggcagttaggggtgttcatgaaatatttaatctaattatccacacgattcaatctaatccaattcgcaaagtacggatattcacacttatgcagattagattggattgtaaaatttaaaatccgtacttatgcggattggatgttgattacaatgtaaaagtaattgatccaatccaatccacacatatatgtacatatttttttaaaaaaa

SEQ ID NO: 311049 - DNA, 938 bp, Cannabis indica
taaacaggggatccctatattgcaatagtatttaaaatggaagtctttattttgaatttaattaaagatttaaattaaaccacacttttctaaaatttatatattagtgataataagtttataaaagcacacacgtggcgtccctgagggtcagggcgttacagtgtcaacccaaactgtattcatgcttacgaaagaagcacctatggcactcgaagtggaagatctgatggagacgaaggctgttttggaagactgtgaggatgggttagatcctagagtcggaattgaaataaatttagaaccaatggaagagatagaggaagtgagtatcagggatgaaaatcccactagaactatcagtgtgggaaaaaaatctctctgcaaccgtaagagaggatgttattaacacagttagagaaaattaggatgtactggcttggagtcattttgacatgatcgatattgattggaataccatttgtcatgctttaaatgtccatgaagatgcaaccttggtccgtcaaaaaagaagacctttggatcccgctagagccgatgcggtaaaggcctgccaaaagattatttccttctcccgcagatcgatcagacggtagatgccacatttaggtacaagttgctcacctttatggatgcctattctaggtataatcagattcaaatgcacaccgccgatgaggagcacaccagttttcaaactgacaagggcctttattgctacaaggtaatgcgatttggactcaaaaaggtaggaacaacgtatcagtgaatggtgaatcgaatgttcaaagaacatttggggaggaacataaaggtatatgtggatgacatgccggtgaagtccaattctaagttctatgtgtggattcaacgaagaattaataagtcagtgaacttaagatataaattcttgatct

SEQ ID NO: 311050 - DNA, 709 bp, Cannabis indica
tcaagtgatttaattttctgctattatttttatattctgtcccttctgttttgtcgctgcaaaacgaatttttgcagtaacagaattacattctgcttctgtagacttatacaattttatattttcgtatttattattggcatttgcaaaaactcaattttttcaacctgtgaagaagacccaacactaggagactgaaacagtggaatccaagccatttggggcatgttaaagccaggaacgacgccgaacagataaatgaactgctcctgaaatgtgtttaggtattgactttaagtctgtatcatttgttgctgccactctttcagtgtttcatgctcttccaccattcgctttagggcctcatcttattcctcctagtgatagtaggttggccgaaaggacctgctttgggagttgccctcttaggccccttcctaagtctcgacaacgggcccagtcccctcaagtaatgtgatctctcacccagcacctgtgtcataacatggatatctatgggaaattgggtggggttgatattgtactgcagaggaatattgatcggtattggttgagtttcacgaatctcaactattttgacctataaaaaatttaaacaaactgctagagttaaataaaaattaaatatagaataaatttctaaaaaatataaaaatacttatattgttataaatattaataattatgt

SEQ ID NO: 311051 - DNA, 667 bp, Cannabis indica
aaataaagaaggtatttaaagaagatccaaagctatttactatcaaaggtagaaaagaaaccaactttacagatcagctgcaggaagagaatgaatcgttgtgagtgttgttcataataataataataataatatataataattctatgaaattatattattggtattcaaaaggaaatgttagttgctggaacttgagctctgtaaaagtctttgtagtagtctggaatgggcggtttaattatcgatttctaaaccaaagagcacttcacaacacaaataaataaaactaaacctaaactacatgacaaaatctaaaactatgtacatgtgacccaatatctttattgtctataatttttttttaaaaaaaaaaatagcaaacactttaagtggaacaagcaaacaactcaaataataaacaaatgacaaacctttggaaaactcttgatacacagcttgtaaataattaagcgggataacagttaaatttagttgtacaacaagtaacgaacgttcaaaattaaatatgaaattatttttacaaccttcaagtacagaacggtccaagtacttcttcaagttttgacattgtgacaaatccaaagccacgggattcttgttagataatagtcctcttcgagacaggacaaatctccgaaatgca

SEQ ID NO: 311052 - DNA, 1652 bp, Cannabis indica
ccactaagaccttgggcctccaccacaaaaattccctcaaagcccaattgtctccccacccattccattctattcttgttgcacttagtttcacataaaaaaacaaatttgggtttcttatgagaaataatctctttaaggaattgaaaagcccgttggctcccaagcccgcggcaattccagctcaatacattcataatgcacggcgggcctgagatccagaacccgccccaataaagtttttttgaatgccttcctcactaaagtccattacaacatctccctccattgactcaccaataccatcagtaatgttatcctgaggcccaatactatcatccccctcgtccccactataaaatccttccataattgttttccttctcttcaaatcaaccacctgaattttaggcaaagcaatattctgcattggttgtggattcaaatcaataacctttgactttcctagtatatcaccttctctcccagctggtaaactaggaagatattttccatattcattatccaactcatttgaaatccttcctaccatgattcccgccccctgacttctctccatcccattactatgttgtcccccatcggagctttgaccactcgacgcaccttgcttggaaacaacgccggaccggagccattgagatcccatattataatgccttcttctcggagccgccttgagctctaaattatatggttttttaatcaggtgaggaggtgtatcgaacaaccgttcacaaaatcgttctgaatgacccagaacaccgcaaatgaaacaaaaagttgagaggtcctcatatttaaatcgaacaacacagaaggccccactcttcttctccaacctcatattttgttccaatggtttatcaacccgaattttgactttgatcctgagataatccctccaaaatcttgaaaaattgttaggatcggatttaacatactgtccaatgtaatttccaacgtccctagccactctttcagacataaacccagaagacattttgtgtaattgaatccaatactccaggcagtttaactgaatggatcttgggttttctcctggtttcactctttcaaagatcaatggggcacgatcaaaagtccaaggactgtcctctatgacccgttcgatatcaacttcgtggtaaaactgaaaaggaaaatgatttggatgaagttctttgacatacatccctctgcccggttgccacagagtagccatcttgtgctgcatcgcctgaaaatcgactactcgcttggttaagaatctgcccactatacaccaacggtcatctatctccgacagatcatcatcctcatcatcataaaccagtctacccatctcctcctcctccatcatgtcattcaccagaccctcctccatatcgtcgaaaaaattaatagagccaaaaacagaaaccagagccagtaaaaacagcataaacaaacaaccaaccaactcactttcagaacatacccacgtcagagcaaaaccatgtcaaaagacaagacagagagatcctttatatttttttttatggtttaaatataatatggtaaataaaaaatataaattagtaaaaatcaatcaattatagtaactagtagcattataatagataaaaaaa

SEQ ID NO: 311053 - DNA, 3438 bp, Cannabis indica
tttttcttggtgctaactgctaaaaatattaggctgactctggaaaaagtttaaagaacctcatttctcctagagttctacccaaatcatctataattgtttaaaacacgtaattaggccatataccacataattcaataggaatttacatcatcaaagcattgaaccaaaattttccattgaaggaccaagcttaagcttgtaaactcaaacttttctcgatcacaattacaaccatcaaacctaacataaaacaatatgaatagcttaataacaacaccagaaacaagtacttaagcatcactaacccgaacagctgctcaaaccaatctttgcatggtaacctagttcataaacttgaaaatcacaaagaggaaaggacttaccttggcttagccatcaaaaatcttgatttctagactaaacctcttccaaattttggtatgaaaaatggaaaacccctagtttttctttcttctttgtgggccgacaatgagagcaaaagaaggagataaaggtgtttggtttcttaattaatttggataagtccaataaaattttagctttaataataactaatacagcttaaaaatattaataataattcccacttacttaaactaaggccaacatgacaataacgtcattattttaccaagaagtaatataattaatcaggggtaacatagtctaaactataaccccaaaataacctgacattataaatgtctagcaatattgccctgctaattctaagatactataccatatctaagtgactcttagactgaacgtcgcattctactgttactgggtataaaatatgaaaaacataaaattttatatataatgtaattaatacacctataatttaaatgtatctccataattgcaataataatttaaagcatatttctgacaataaaccctaattatctgctaattctcaacgtaaagctaagcgatcattacaattattctcccgttaaaaggatttcatccttaaaatataacctgaataacttcggatactgagccctcatgtcagactctaatttccatgtggcttcctcaaccttcttcagagtactatgaccaatgctatggtcttattcttaaggaccttatcttttctgttaattatctgcactggttgctcctcatatgataaatttcgttggagatctagggtttcataactcagaacacgtgttagatccgagatgtttttttcttaacatagatatatgaaatatgttatgtgttgtagacaaagctggaggcaaggctagacggtaagctaccaatccgaccttctcaagaatttcaaaaggtcctaaatctagggcataactttccccttttccaaaatatttaactcctttcattagagatatccataggaagacatgacctcctacctgaaattctatatttctgcgtttcgagtttgcataactcttctgcctactctaagaggcaagtattatttcttaatcttctctacagcctcattggtccgctgaaatggttctgaacatagatgtcttatttctctgatttcatcccagtgaattagagatctacatttcctaccataaaacatctcatatggagccatctctattgtactctgatagctattgttgtatgaaaactctatcagtgagatacttactcaaggagccttcaaaatccatcacacatgctcgtaacatatcttctaatatctgaattatccttttggactaaccatctgtttgaggatgaaagttgtactgaactttagcttggagcttatggcacgctggatactttcccaaaacttaaaggtgaacttcgaatccctatccaaaaaatggacttcagagccccatgaagtcatactatttcttttacataatgtacttcatactgatctactgaatatgttgatttcataggaaggaggtgtgctgacttagtaaaccgatctacaactatccatatggaatcaaacacactcgtgattctgggtaatccaaccataaaatctatggtaacatcctcccactttcactcaggaagtgtcaaaggctgcaacaaccctacaggtctttgatgttcaaacataatctgttgacatgttaagcatttggtaacatattccaccacatccttcttcatacatcaccaccagtagtaggattttaaatcatggtatattttggtagtactgggatgtaatgaatagggagtggcatgagattcatcaagaatctcctttctaagctcaatactacttggactgcaaactcaggttttataaagtaacattccattactcgacattgtgaaatctttagcttggctagctaaaacttcttcttggatcttcactgattctagataaaccaattgagcatttttaatcctctctaacaagtctgattctagtgtcaaattgtacttgatttgatcatgtcatctgccaactaagatgagatcacaattgtgttgaatacttgctcgggacctttcctgcttagggcatctgccactgtattggccttcccaagatgatagagaatttcacaataataatctttaactaactccaacaaccgcctctatctcatatttaaatctttttgagtaaagaaatatttgagactcttgtggtcggtataaatttcacacttttctctgtagagatagtggcgccaaatcttcaatgcaaagaccacaacagtaagctctaaatcatgagttgggtatcactgctcatactccttcaactaaagagtagaataagaaataagccaatctacttacatcagaacgcatcccaaacacgaacttctcttgatctgacaataatgctaacacaggaattgtgatcaatcactgcattacctctgggaaacttacttcacacttgtccgtccatacaaactactgattctttttagttaattatgttaagggcagtgagatcttggaatacccttctacaaattggcggtaatacccagctaaacccaaaagacttctgacttcagtgattgttttcagtgttggccaatccctgatggatttgatatttccttgatcaaccatgatccctttcttactaaaaatgtgccctaaaaaggacactcaggatagccaaaattttcacttcttaaatttggcgtaaagcttaagttctctttgtcattacagaacaatctgtagatgctattcatgctccatttatgattgggagtacaacaggatatcattgataaatactacgacacatatattgaggaaatcctcgaataccctattcatcaggtctataaaagctgctagagcattggttagtccaaaagacataactaagaattcgtagaggccatacctagtatgaaaggcggtctttggaatgtcttcctctcagattctcaactgatg

SEQ ID NO: 311054 - DNA, 952 bp, Cannabis indica
gattattagaaataaatggcaattttttttgttttgctaaatggcaaatgtgacaatgtaaagatgagttgggatgtgaaatgttgtgttctttattaaaaaaacttgaaatacacattgatggatgtccaaggcgattgtgccattggtttacattgtgtttattgaaagaaaatgaaattgaaggggcagttatagctgctgtagtaacagtagtagcaggaagagctgctgtagtgggttcttggtgaagcaagaacaatttgccacatttctcagctgtcccaatcaccacattcattgtaggatcctgaataacacaatgattttgatgaaacaacactgagttaagagtattcagcatgtaatcagttatggaaaaaagattaagctgaaattggggtacaaaaagaacattctgtagtgttatttttgagttaatcttgacagtaccaatattgtggacaggaagagattgtccatttggtaaggacggaaatttagggaatggtgtactagaaaaagatgaaaaatacttgaaattacaacacatgtggtgagttgcaccactatccataatccaagaagtggagtgagaatttgtacctgccatattggatgcagcaggtgctgttgcaggttgttctgcattagtggtgttgctccattgctggctcaacaaagaaattagttgttggcgttgagaggatagatcagtaggacctttgctgctgtcatggtcatttttctggttgttgacagtagcaacattggatttggctttgcctttgtcttgctttcttttgtccccataaccaggaggaaatccatggagaaagtagcacttgtcgacaagatgactgggtttgccacaattggagcaagaaggcctaggtttcttggttcttgggggattggtagagctagacgcagcagccaagggaatagaatc

SEQ ID NO: 311055 - DNA, 809 bp, Cannabis indica
aagaaacaaactcactattaaatcagtatatcaattgaaaataatacctggctaacactcttatccgcaacaacatcaaatgtaaaagtcgactcgggaggccctgtccaagtaattctccgagcgctctcttgacgaacacactttccataacattattcgacactactaagaggccgaatcctaattattatttgcacaaccaaaaaaaacccctaaaaccaaacttgacccaacatgcgtagttgaaataaagaactgtgatataacttatttaactacctgaacatgatcctcagaaatcttgaagtacgaaggagacgatgaagataacgctgccatagcacacttcggggatttcaaaagtcggtcatgatatgctttttttgtaaccatagccccaattttcaaaagtcggtgatatggatacgaatgtgaaagcgaatcagggccaaggccccaggccccaggcctcaggccccataattttggaggcctcgaaaaaattaaaatttatattatatgtatgtatgtagaaataaaatataatatataaagtttagtttaatatattgcataaaaatgtggtagcacaagtggttagttgaagcttagaatgtatatatatatatatatgacgtttcgggtttgaatcttacaaatgacacttttaattttttaaaattcttttacataatcatatattttaataaataatcatatataattatatatatagttagtaaatgatttaaatttgtagaggttattagagttcattttatttaatattttaaaatatattttat

SEQ ID NO: 311056 - DNA, 855 bp, Cannabis indica
ggtccgattggaccgatatatggtccgatgccccccgatatatattataaatttagagaatttttgtaggtccgataggggtttagggtccgattagcagtctgatatgtgttcgatatatttttcaacattcatgattttttgaatgggccgatttaggtctgatggtcccccgatagttgtccgattgtagtctgattgtcattgcaattttttatttttttttatgtccgatatgagtccgatgtatatccgatgtttgtctgatgttttgctacaaaatttttaactttcaatttcttgttttttttttgcaaagacccccacaactaataattccactctcggagcattacactgttgtgtcacttggcgcgggggaagttattactacctgaagattaaagtcaagtttgaggaattcagattatgggatagggtaagggaatccctttcaaataattcttcgagagagaaccattacaattttgggggcattgatccatcaattattgttgcataagattaaatctgacaagctagacgaggtacatttttacttggcgaagaagagatgaagatttggtagggtggagtttggtttggtaactgggttaaacttgttgcccaaacatactaaagaagaaattgaagagaaaggaagttcgaaccagttgatcatggagtatttcaacggtaatccttccatcagctttggccaactgcacagagtttttgtgagctgcacagaagttgatgatgtttacaagttggggatggccttgtttgttatgggcgtcctcactggtaagaaggagaagactgtcgttcctcctttttgttgggttttatgcc

SEQ ID NO: 311057 - DNA, 1704 bp, Cannabis indica
tgcatattttttcaaattttccttttaaaatttggatattgatgacaaaattacatatttttggtagtaaagttttttaaatgtcacttttgttagctattactcgtgttcaaaaagctctgttaagtgtcacggtggatataccacaatgtacacgtagcaaatttttagtggaggatattgccggcaaaactatctaaattctatgattagtgacacttaaccacataaactaattttttagtggtaaaattctttaaatctcacttctgttagttatttatgcattccgttcaaaaggctctgttaggtgccacggtggacatatcacagtgtacacgtggtaaatttttagtaggaaatattgactggcaaaactacctaaattctataattagtaacgcttaaccacataaattgattttttattggcaaaatcttacaaactaaacttctattagctatatatccctttcgttcaaatgctattttgagtactctatgattggaaccattagatttcccttccctcgttctttcttcttcttttgtgatgaacccaccagaccacaacgaacccaggcatgaaccagcgaacccagagaatccctccaactgcagtggtattgatgaggagttgcgggagagggagaatcaaatctggcgaggtcgaggcgagaaagagaaacttcaaaggagagttgggtctcgaggcttagagagaggctgaatggttggttgtgtttgtaaggttgggaagtcgtttttgtggtttgtttgggttgaaggcggtcagaggtgacttgccggagctgtgcgagaaggagaacgaaagagagagggagtgtgggtggaaattagggttgcagggagaaatatataaaagaaagagacgaagaggaaaaaaataaaaagaaaaaatatttttgatttttgatttatttataatctttaaaaatatttaatcaattaaaattatgtggactacaaaaatttgctacgagtacactgtgacatgtctactatggcacttaacagaattttttggacaaaaggggtaaataactaaagtgagattttgagggttttaccactaaaaaatcagtttatgtgattaattgtcattaattatagagttcaggtagttttatcgccaatatcttctactaaaaatttgtcgaatacctaatagagtcttttgaatggaataggtaaagagctaacaaaagtgagatttagaggattttaccaccaaaaaattggattgatgtggttaagtgacactaatcatagagtttagatagttttgtcgccaatatttcccactaaaaatttattacgtgtacaatgtgacatgtctaccgtggcacttaatagagtcttttgaacgaaatgggtaaatagctaatattgaagggttttaataccaaaaaattagtttatgtagttaagtgtcactaatcatagagtttagataattttgtcgctaatattcttttaaaattttatatatttgataaataatttgtcaaaaagaaaatgataaataaaattttattaatataataacatgactaaacggttgttaaataattaaatttgaatttatagctcatataattaagaaattggtaaaattttattatttaaatttatgatacataaaaaattaaaaattaaatttagagtactaaatattatttt

SEQ ID NO: 311058 - DNA, 1377 bp, Cannabis indica
tatagattgaatagtaacttatttctgaagagagaaaaaataactatcagaacatgtaagcttgagcttctttatccaatttaagctggaaatgcattccccttttctttaacaaatctattacctaacaacttagactaactcttttcgttggtaggattttgagttgtccatatttgagaaccatcctgctttatttatacctaggtggagaagaacgggttttgaattgggatgaaaggcttcaaatcgctcttgatatatctcacggaattgagtaccttcatgaaggggtaatgttaatttctttatatttgtttttctttttagtggaagaaatttgtttaatttcttgatgtggagaattctatgaacacaggcagtcccacccgtcatacatcgtgatttgaagtctgctaatattttgttagacagattaatgagagctaaggtgagatggcacaacagctttctcatgttcaattttctcaatgagttgtttcagaatgtagataaatcgctaaaataaatacataaacacaattacttttttcattctaggttgctgactttggactatcaaaggaagaagtgtttgatggaaggaattctggacttaaaggaacatatggctacatagacccagtgtacatatccacaaaccagttcacaatgaagagtgacatctacagttttggtgttatattgttcgaactaataacggctattcacccacaccaaaacctaatggagtacattaacttggtgagttttttctccttggttgtttgctcaataacttttacagtcaaacctttctgactgaagattgcatcgctactttttttctaaacttcctttttcgataggcttctatgagtcccgatggtgttgatgaaatactggataagcgactggctggcaaatgcagtgttgcagaagtgagaagcttagctagtattgctcacaaatgccttgacaattcaccaagaaggcggccatcgataggagaggtttcacaagcaattttgaagataaaacagaggcgcctcaccaaagaagataccatgtcatttgccagcagagatctttcgcgagcgataagcagaattgaggatcagcaggtggagttaagtatgatggctaccatgagaaaaggatagtgactgcataaatagtagtttgtagtttcatacttttttataatatttgttcctcttttttttggctaattctgcccacctcaatagagttagataggtccatggattagttggcttttgctaattctaatctcatggattgtggaacacattccttgcctccaatgagatttgaggttgccaactcttttttgtaacacatggaacaagaaat

SEQ ID NO: 311059 - DNA, 1575 bp, Cannabis indica
cgagaccgaaccgggacctgggacccggaccgggacctgggacccgggaccggaccaggacccgagaccagatcgggacccgagattggactgaactggggctgggacccagaaccggacccgagacatcaaaaagagtgcattatataataatatactaatgatgtcatttttttttagaaatactaatgatgtatttaataaattatataatgatattttaatgtcgtttaaattagttaataaaaatattaaacttaacaagtttataatatgatatctatatataattattataataatattattttatatgtattgagatttgtcaaacattattatttaaaatttattaaatattacatttataaatattatatatttatgtttttttaaaaagttttcactattattataaatatttatttacaacaatagcaaaaatatgaaaggggatttcacctaatcaacaaaagtcttaatccaactctaaagtatgttttgacaaaccatgagcaacatagttagcattcctcataacatgaaaaataataacttagggaaaaagaataaaaaacaacaaatatctaaaattaaattcaaaaagcaagataaatccttagatgtagaattcaaagaatcagagactcgtaccgcatttgtttcgatatggatgatatgtaattgttcttgcagtgcccaattaaggctatagaaaagggctttagcttctatttcatctaaacaaaaacatccttgtactaactttgaaaggacagtgattacatggccatggtgatctcgaacaatcgcacccatagccaattttttgatgcagagtccaggaccgcatcaatattaagctttagccctacgtcgtttggtggctttcacggaatacctttagttgggttactggttgttgtcatagtctgaataggaacatgatcactcgcaatactcccatgttttgaatgtcaatgagatgagtaatatttctccatatagtttagagcaaaagcagtggtgtgtgctccttctgttttagttttaccatgtaaattttatttctctctatccatattgatcgcctacatggtacacataataaactcaaaattagtttgagaatgtaaagaagaaagggggattagataatcaccattatacatctgttgagctaaacaatggtgaaacttgtacgtttccaaactaatctagcatgtggacattggaagagagcatgcccaattgattcctatacatttgtgcacatcgagaaagcagcagagtcgataactcttttgccagtggagactaccataacataacaagagggaaccttcaccttgaaaattttctcagtatcctaaatacattaaaaaaataatttggaacaactaaaaataaccgttaaaaaatataaaaaataagtatataatactaaacaccgaatatcacatacagaataacaaaatatatatttaacaaaatcaagaagtgatgaacaaaattccaaattgatatttgagactacacatgcacaaataaaaaaaataaaaactgaaaaagaag

SEQ ID NO: 311060 - DNA, 2234 bp, Cannabis indica
tatttatttttaattcattttatttccttccgaactcataatataatacttaatataaaacatagcatacgtgcatcgcacgtaacaatatactagtatatatatattaaaaattgaaaaacaagtgtatctatttaatatttccttccttaaagtgatatatatgatgataaggaagttgttatgttcatttcaaatcgtacgatattgaagttgataggtaataagaaaatttaatttactaatattgacttcaaaaactttttataactgttgactacaattgaataaaatacttgttaatgtatgtgtatagtatagttttgtttcacatttgtgcataataatatttggataaaataaaagtcgtgtatataagttggtcagaatattatattaaatatttttgcatgtatttcatacatatataaagtaatttaggaatttgcttgggtgtggtggttgaaaattgtctctatcaaaaataattgccgacgtatcgtctttattaagtactcttcatttaagtttccataattatcattgtaagtctcacattataatgtagaaattaaatattacacataaaatatgggctatttcgattttaagataaaaccatatagattttattatatacttataaattcatacttcttcaactatacaatcttaaattctaatatagtattagagtcaaattaggattttaaatggggttttaaatgtaataaatttcaaataattttacataattgattatatattagaaattaaaattagtgttgtttaatttctattttattttttctgttaattctattatgaagtcggttaaggataagctgacacaagttagttgttccaactaacttgatcacctcctcatcctatataaaccatcttagccattgtactcataattcaattcaattcagtgaaaatatattcaagcttttctctctctctcattttctctcatggtatcagaagacaattcccacatatccaccatggccagaccttcgactagatctcaatatgggattctcccatccaattctgatcaagttcagtcccaacctgatgccattcctgacatcgcctctgttccaaaccaacctctccttgctgcgactcctcgtcgatcttcaagacctcgatcgcaagctggaccagattcatcagctccttctccggctgatactcctcgtcccctccaagatcgtggatcgcttgaagacgcttcctgtcccttcttcctcagcttaggaggcctcgtgttggtttcctctattcttacagggacaaactatcaatcatggaaacgtggtatcaccatggccctcgctgccaagaacaaaacaactttcatagacggctctctttctcgtcctactgttggtaatctcctcagttcttggctccactgcaataacatggtaatgccttggcttgtaaactctgtttcccctgatattgcacaaagtattatgcactttgatatagttgttgaaatgtggcaagatcttgctgaaagattcaatgaggccaatggccctcgaatctttcaattgcaaacacagctcactcgtttgcaccaaggtgatcaatccgtcacctcatacttcaccaaactcaaatccctatgggatgaactaaaagagtttcaacctaatacaccatgtacttgtggttgactatcacaatcaaagtcaagctctccaattcttgactggtttgaatgaattttatgcatatgttcgtgctcaaatccttcttaatgagcctatcctaaacttgtctagagtcttctctatgattgttcgagaagagcgtcaaaggacccttgtcgactcagatattccatcccttgcttcctcagttcgcccttcttcatccaccaatcctccaagaaccaagaaaccaagaccatcatgctccaactgtggcaaaccaggttggttgacaagtgcttcttcattcatggctttcctcctagttatggagacaagaaaaaaaaaggcaaaggcaaaacctctactcatcaagctgttgcgaaaattattaattactacgcaagtgcacgcaatcaagtagtatactcacgcaagtgaggtcgaaccacagggaattggattaattactactaaactatacttataattctatttggcgaatcaaaagtatttatgattgcaaaaggaaaaaagaaattcaagaaacttaaagaa

SEQ ID NO: 311061 - DNA, 2513 bp, Cannabis indica
tgttgtaagcataatgaacactcccgtgaaaaaaaatatttcaacatatgttgtaagatgacgttgacggtagctcctctctagtcaaatgttgcattacaaagtcactccaattaatggggagttatttttcggctaccttcatctatgcttttcaatgaggcgggaagctgagaaaagctctaaaatgaggtgcgatgtatagctagaaataataatgatatttggattttattgagggattttaatgcggtgagacagtcgaatgaaagaataaagtataaagtgcaagctaaagatttcaaggcattgaaacaatgtatggaaaattaaaaattggaggatgtatttaatagaaatttctatacttggaataataagcaagaaggttaggatatatgcaaagttaaataaggttgttgctaatcaatattgggtggataaatatacaactacagaaaatgactttgatcacaaccctaacttctttctatctatcatgaggtcattacttgtaagaaagtatttgaattcttcaatttttggtgttcccatcctgaatttttggggcgtgttactcagactagcttggaatgtggttatgaagagaactcttgtgtttcaagttgttcataagctaaagggaatcaagatgatgcttaaaagttttaataaggacatcattagagatattcctactgattttcatagctcgctactgaatatgaaaattaagcaggagtgccttcaaaatgattctgataatatggagttgttggaagagaaaaaagtggttagatagagttacctacaagctcaaaagagttattttttcttgcttagtcaaaaagcaaagttagattggatccgagatggtgatgaaaatactaatgtatttcacaggaatattgaaatgagaaggaatcaatataaaatctatgattggttgggttctttcaagattaatggaagaagagttaatagtagagttctcaaaatgggtcctttggtgactccaaatcagaaactaatgctccttatgccctatagtgaagatgaggtgaaataggatttgttctctatttctgatttgaaagcttcgagaccaaatgggttcaatagtgatttcttcaaacaatcttgagaaattttcaggaaagaggttacttcgtctgttttgtccttcctccattatggggaaattttgaaagaaattaacttcaccacattgacattggttttgaaagtaaattgtccagactctgttgaagattttagacctattgtgtgctgtaattgctctgcaaaatggctacaaagatgatatgtttgagaatttgaatagttttccctaatctaatctcccaaaattaaggtggttttgtacatgggagattcattgctcacaatataatggtgtgtcaaaatttggtaagacattatgggaggaatgtcgacttgcctaataaaaatagatttgaggaaagcctacaatacggtggaatgagactttcttgaagagatgctacatgctttgaatttcccagagcctttcattaagaccataatggtatgtattcatactctaaaattttccatattcttcaatggtacatggctattttgagttgaaaagggatttaagacaagttgaccccatgtcctcctttttatttgtcctggaaatggagtacatatctcgcatccttataaaaacctctgagtgtgaggatttttgtttccaccatgtgatgggataagcatacgcattaatgttttgtagatgatttactactcttttgtcacggtgatattcaatccacaatgcttttgttacgaagctttaagcagatctcaaatgcttcgaacataatggccaacctaagtaaaactaccatgttttgtaccgagatgaattcgagtgaagttcaacaggttttgaatgcttttggttttactcaaagtatgctgccatttaagttcctgggtgtgtcaatttgctcaaataaatcccttcagctgaatgtgaaatcctcataaaaaagatggtggctaagatttgagtttggagttctcggtacctatcttatgctgggagagcaactctaattaactcggtcctaattgttattcatacctattaggctcaggtactcattctccccaaaaaaatcttgaaatccattaataaaatctatcatgatttcttgtggaatggtactgctgattacaaatagtcgggtcttgtggcttggaaagatgcttgtaagccaaaagatcaagaagatttaggtttcatgtgtattgaggaatggaatgttagtgttgatggtaaacatgtttggtctttgactcaaaaaaggataatctttgtgtcaaataagtacatgaagtgtatatgaaagatactaattggtaggattattaaacaaattgaaaacctgtgtttttgcaaatgccaataaaatttaacaaaataacagtaaaaatacaattgtaacagtctgaagcag

SEQ ID NO: 311062 - DNA, 2597 bp, Cannabis indica
ggtcttcctctctttaacacaaggcagaaagacacagattttaattttattttggaaaatcttactgctaagctccaagggtggaaggtgaaacccctatccaggactggtcgagctactttaatcaagtatgtgggcttgtctctgccgatgaattccatgcatacgactaagctctctaatcgtctagcgacgagaattgatggaatggttagagatttctagtggggatttgaaagaggaaatcatgggatctacctaaaggcctgggaaaaattgtgtctgcctaagtctcgaggcggtttgggtttccgtaaaacaaaagagatgaatcaagcttttctggctaggtggggttggaattttctaacgggtaatagctctctcggttgcaagattggaaggaaagtattttcggggtaaaagtttcttctaatgtgactacaaggattctgattcttggttctagaagaatgaggtaaaagcaagagagacaatccaaaaaggtgcctgcataatggtatctaatggtaaagacaccaggatctaggagaatccttggatccctcatggccccaacttctatcctcgctccaacgacaatcactcctttgggttcaatgtagtcccgaatcttcttacagaagtggtaattgggacctccataagcttcattctttgtttgatcaggaaacaatccaagctattttaaacggaggtaaacctcccagaaaggggaggaattcttgggtttggacgaaggaaagcaatgggaagttctcatgtaagtctgcttatttacttcaggctctccagcgagccccaatttgtgatgtcgcaccctccctctggcacaagctttggaatagtaaaacactggagcgacataagattctgtggtggagtattttgtctaatgcgctcccagttcggtctatcctaaataagggattccagttagaggatcccatatgccctatttgcggggttgaggaggaatcaatggagcatcttttcattcgttgcaatttggcttatcttttatggaagtcttctccgtggggtatttttcttgttcttgacactggtattcgtatgtggaattgggtaaagtttctttggaagttaaaagacaagggctttgatgagaatgaggtttttcaatatgcgtacattgtggtggacaccatttggcgggcacggaacgataagattcataacaataatctgggtagcattaagtttatattgactctatctttttctgctatactgagtatcgagcttctttcttagttacccaccctgcagtgcatagagatacttggtgcccccctccgacgaactggatcaaactgaattgtgatgtcaaagtaggtttggaacacatgtgtattgcggtggcgctaaaaaacatttgggtgcggtctgttgggtgactacgttaaggcttgacttttgaaattctttttgtggagaaattgctgtctgttgcttggctttggatttggcggctgagaaggggtttaattttgtaatggttgaaagtgactctagggcggtgatcaacgctcttattgggattgagtacaactgggagattgcaaattacagtgtcactatcgatgcacttcttcttcgtttgttggttgtaacttttcaaatattagtcgttcttataattttatggctcataacatagccaaatgggcgtttacccacaatatatatggttgttgtaatgttgcagacttaccatcaaacttattttataatgaccacaagatctaatatttttaatctacatattacgctttacttttcaaaaaaaaaaaatagtttcataaagtttgagaattgattctttttttttacaaatatgtaattttttaaagatcaatgaatatagtttgagaaattgatattttttttttttgggattgtttgtcattagggaataattctctaacaaatctctcaaaataaaccaaaaattctatttttcattattaatctctaaataattacatatttataaactctataaaactattaataaattactattaacttcttataatattttttatagtgaaataatattttaaaaatatcccacctttaaaaggcctctccacccacagttgtcaaagaatcccaagcacgaaccctcctcacccatccacaggccacagccctctaaaaatctcaatgatattataaaaacaccacaattactacaaaataatggaaaaacaacatataaaaaattgagaagccaacaaaacataataaaacttacaatataaacacattcaataggtacttttttctgttcataataagacaaatacatctaagcgttacatcaaatataattcataaaaataacaataatataaaaagaaaaagtagcataaacatcgaaagcaataagacaataaaaaaccattaacagctaatagagtaaaaaaaaatcaacaaagcccaaaaaattatagtcaaatgggtcacactgatgataaataaaaaagagagaggaagagaacaaataatttattatctgaaattccgtattttaatattcccagtttgat

SEQ ID NO: 311063 - DNA, 2153 bp, Cannabis indica
tggagctattatagatcaagaaactcaagtgattttgattcttaatggtttatctccaactttttttgccctctaattcaaataacattatgaacacgtttaactttttgacttttcacgagttgatcaacaaccatcagacattttaagagttttgattagaggccccacaaaaaatgaaataacaaagttcctaattgtactaatgctacaattggtacgactaaagttgagacaaacattgcctctacttcaaaaactaacaagaaaaagaagtggaacaataacaaaaccaagcctcttaaagctgttaacacaactaataagggtaaaaagactactaattcaaaagaaaaaggaaaaggaaaatacttctattgtaatgaaaaggaccactaggaacccagtgtcctaagtttttggcaaagaattaaggtatttctaattccattgttgaggattcatgtgttttagagaatttttatccctttaggttattaattctagacctactaactatgtttatgttcttcttatttcagttccaactgcttaaacttggattacaatcctagcgagttgagacagatagttagatagagaggtggcaaatgttcaagctagaagacaaagctcgtttttttttttaatttaatttgaataaattgttttattttttagacaatttagtttgggaattatatttcctttttcatattattgcaaacaatcattacgatatcttttagagtattaatttaaattcttctgtttaaacaaatttcattatgagatgcttttataaaattgaagtttatattccatggcatatacacctatgccaatactaaattatatttgtctatttatcttaaatattatgtgttttgtattttattatagatacagtatctatagtataaatcttattaatatttatttttacaagataatatctgcaatgaagcaataccacataaatacttaaatacttgaacctaaatttaatgtttatgaataattgtcaattcttagcagttattataattttatttaataaaagatcttgtgatctaatagggatggagaagtaattgatatatgaagttcaatgatcttttacaatgaactctagattatattcaaaacactatagaatatctataacacatattttgattagacatagatataatattctactcaaatccatcagaaatgttaaaatattttttttctgaatagattaagggtggaccatttcatgactagcaatctagtagaatatttattctgaaataatgtgatctaacactattttgatactaaaagtaagggtgatgtcaaaaatttaaaagtagagactagaggtggagatggagactcagacaaagacagagatgggaagaagggagacagaaggttgccggagtttgggaaggggaaaggatggaagagttgctgaggctgaaggcaggaatcatgataaacattcttcaaaagttattaggcacgataaccaggaaggcgtaagaatgggtataaatataggaaaggtggctaataataagctgcccaatcacagtactaggtcagaccttggggagatgaatcaaattaaggtggtttgtggaacggtgaaggggtcttctttgccagtgtggtctaggtcatgggagggtgttgggtgaatcgaaggtggaatagttgatgaggaaggggccacggggggtctggtagttttagggttacgtgtgttttatttatttatttttattattttagttttatctagttaacaaaataaaaaaaattgagttacgggcggctccgattctaacccgaccagaccacatgtaaaatggtcaccttaactctcaattcataatgattgggtttaaccgttctgcttgatttaaatgttttttttttcaataatcaggtcgaggccagaccaaatttggcccaaatgtcagacctattttttttgtaatatatatatatatataaatatatagatatatggaggagatttcagtagttacatcaaatatataaccattatggttatgttgtttttagccattggaatactattgaatggttgtgattaatttagaaattaaataaaaataaataataattaatttata

SEQ ID NO: 311064 - DNA, 883 bp, Cannabis indica
attcacataataatatatatcattttaatctatattatattattaaataatacaacattcttatctttttttttttttgcaatcgataaaattgaatcgcaaacatcttttaaaaaaatccataatctcactctggttaaggtggcatagaaatctgttccttcgtaggagaatcgatctcgattaaattttctgatagagtggattgaggtctaggtaattacaaaattgattttgattgcctcagtcgattctttactttatatttggttttgatgaattgttggcatccgatggagatcgctggtccaaccaccttgtttctgtgatcgacgactcaaacaaaatcagatccgagatcgctgccatcaaaatcccaagtcgctcatcattttttactctctctatatatatctatctgtctcattctttgggtcttttctttccttgacagggacgatgggttaacattcgcagacgacgggttccgttttcgtaggggatcgatagtgtttgggttcccaggggttcgacacgtttgagttggcaggggagcgacggtggatatgccgcttggcttccaggttttttttttcataaagaaaatattaaatcgattttagatctgttcttcgattttacatcgatttgaagagaatgagattttattactgtcatgaactctgaattaggaatgtattccattctatttcaatctatttttatgtacaaggtcataaatattattcattgggtatagccattcccctctgagttagggtatagtcattgatatagtttatggtctacaataagtttaaaaatatcacccatttgttagactttttatttaggcttacattaaattttattggttttatta

SEQ ID NO: 311065 - DNA, 2558 bp, Cannabis indica
tggttagtccaaaagacataacccaaaatttatagtgaccatacctagtatgaaagaagtctttggaatgttctcttcttaaattctcaactgatgatagcccgagcggagatcaatcttagaaaaaattgtcttcccctgaaggtgatcaaataaatcattaatcctaggtagaggatacttgttcttgataagtcaattacaaagtctatctctcgctatggtggcaataccagaagttcctcagggaacacatccaagaattcttgaaccactttgatgtcctcaagccgaactgactgaggccgagtggtgtctaacatcactgccagaatccctaagaaagcttcttgtaacagatctttggccttcaatactgatataattagaattcaagatccctaaaccgatcccacaaaaagaaacaattcttcaccctcaggttgaaaaatcactatcttcctcttacaatcgatgctataggcatacttggacaagaaatctattataatatcaaaatcggctaaacccaattcaactaggtcagcactcaactccctatcttcaattctaattggataaacctaactcaccttttgaagataaaaattctccaccaggtagtagggttccaaaccctattacataacaatcatatggtccacctaacttatcaattactccggctgccgtatacgagtgagcgaccctagagttaaacaaaatagaatagtaagagttgttgatcaaaagctgacatgtaacaactaaaggactagcctcagcatcagcctaagaaagagcaaatacccctgttggagcagattttgctttagtgttctgttcttctttctttagctatgggcagtctcttttgtaatgtctagttactttgcactagaaacatcctcggcctctacactcatctaaatgatacttcttgtatttagagcattctcgctaagtgtactgattctcagatacaccctatcagttgccgcggccatggttcctccaaaacctcttattgtggttcgagccaccaaatgaaaaatgagcctttcctttctgatccaaggttaagtcactaccacccctaccataaccagcggtaggaagatatgtggccccaccaacactagaaattccttgaggctcattactacactttactatgccctcagctcgtagtgctttccctaccatattagcataggtagtcgcgtcatttgttgtgatcatcaattcatgtttaattttgggattcaacacatctagatatttttctttcttgctaaaatcagttggcacaattcccgaggccaacctagccaatctatcaaactgcattgtgtagtctatagctgacatattctctttctgggtcaactgagtgaactcctttctctttgcgctacgaactgttttgttggagtactttgcgttaaacgactcttgaatttcttcccatgtaattgtggtgacatctcgggtgagagatatcatgtgccaccaaaccagggcatctttttggaactgaaagtggcacaggttgctctattattaccaaagactcccataaagttcaaaattcaactaataacagttagccattactcaactttcataacgtctggacctcctgcaaagacttaaggtgcctgcttgcagaacttttcatataatggttccatttagttaacaacagaaattggccccgcctgcatagtaggggcagcagccacctgcacatcaggagcaggcattgcaggagcaccctactatctcaaacgcctgcttttttcatttagttcattaatccatgcatccatctcaacaaacctattttcctaatgctgggcagcctgtggtgggttagcatctccctgaccgcgtgcgctacctcttaggcctctgcctaagccataaatattcaagggaaactgaactccctcaccgccactagatctgaccaaattaacctagcttctcgtgttttgcctaatgtccattctattagaacaacctgcaaaatagtgagctagcctattcagatcgcgatcaagattaaattataattattgcttagttgagaaaataaaatatgcacctattcagctattaggctactaagatgcttcctattaggcattttcttataatgaactaataaacaaactactagagcaatagaggcttatttaactgtgagttgagcatatttctaatgatgattgtacgtatcgtgacgatcttcataagacaacctggcggctctgataccaaattctaacaccctactagattaggcgtgttatcgtaatttaatactaattgtgcaattcgttgctaaccaacaggtttatcaaaaattatgtttaactaaaacttttcatgtttaacttcaaactttaaataaataaactttacaccatctaggatcccgtctttaaaaaggtataaaatattttacaaaacatataactacaaaagttgtcgcctagcgactgtcaaaataaagcatgttgtctcgaagatcaaacgctccaggtctaacc

SEQ ID NO: 311066 - DNA, 543 bp, Cannabis indica
tttttgtagtttaatatttagtaaaagttaattaactaatttacttagtggaagtctaaaacattttactttttttttatataaaggctatagatataaaaaagaaggacaattatataatttattttgagaagccattctcctttttatatagttaaagatatatataaatcctgcatgaattaggtgataatacacatggtaatcgagatcaattagaacatggtttagtgtaaaaattttcatttgtttattatttcaagtttatagagccataatttttcatttgactatatattttttttttattccatgtcttattttattgttcacaactaaaattaaaaaaaaaaaatcatataaaaattgtctgatataataactaaatcaatcaataaactatcataaaaattgaaatttttttaattaaataaaattaatctctaattcaaaataaattatagatggagtctgcgagatcccaattaaactaatttagtagatatatagattgtaggcagggccggccctaggcataggcgg

SEQ ID NO: 311067 - DNA, 1174 bp, Cannabis indica
aaattacatgctatagcctttttaacacattacatctcatttttacctccttttaaaattatttaatttataccctctttttcaagtattataccaattatgcccctgtttcaaacctattaacacaatacttttcccatcccaatattgataaaggataatacccactagcaattctcgttctatcggagtccgacactgcaagtatctcaaaaatttcagggcgtaaatggtctagattaactaatgtgagcaggtacatgtcattgaatctgtaggattaagagttagtgaatgattacagggaatgtaagtttgatggtgtttgagacttcagaatttgacataagcctactgagtccaagtgctaatctctagtgttctctaattatgttttctaatctctagtttgatttttagacaagtttgttcaaatgatttttctgtttttacttatattagctttattttattttgtcgtggcatatgtccactttggtatatatcatcttgtttgttttaacagattcagtaatagttttggtttgatgaattatttgagttgcatttcatgatcttcatgtatttgattaaatctcccaataaaattttatgtgtttgattttcatgtcatttatacctttgagatatttggacttcttcctttttattagccacaatggctactgagtcacttgtgttcatgaagttattcttgattgtggcaagggtattttgggtaccatacccataaaaagagttaagtttcaattaaatccaaagcagaggcaaatttggttaattacttaaataaaatggtatttttcaacttctccctagttccaaagtacatttgggctaaacattattataccgacacatgcatggtctgatcctctttatgtttacagaaaaatccatgtaggaattacactacatcctgtatacgtatatttgtttatatgggaactgatttggtcacgctcggtgtaacgtgcgtgctatgatgacacgttacaagctaggtgatgtccataagttggccaattggtggcacatgttgctatgcatgttgatgcttaatttgtataataatgacatttttgtaaatatcttcaatattgtccggattgggacgggacttggtatatgaatacaatggtacaatcagatt

SEQ ID NO: 311068 - DNA, 1573 bp, Cannabis indica
atgggtaatgatcattcttgcagtgccattagaaccgaaaggttgccatcaaatagtatgatagtggaatcaaagtagtgacgaacgtaagacacattccgaagttcagacgaaatctcatatccctgggtacgcttgaagatgaaggatacatatataagtctatgcacaaaagcttgaggatcaccaaaagttcactgatagttatgaaaggtgaaaaaaccaatgatttacatattttccaaggagaaactgttctagtcggagaagcaagtttggttaaagggatagaatcagatatgaagttgtggcatcacaaacttgagcatataagtgaacaaggcctcaaagaactgcacaaataaggtataattaaaattttaaattcttgtatcttaccattttctgaagcttgtcttttagggaaacaacataaactgaagttcactccaacaaggcatgcaactaagaagatactctaatatgtgcatgctgatctttaggggcatacaaagttcctacggactccggtaagtaatattttatttctgtagttgatgattatagtaggtgtgtttgaacctatttactagcaactaataatgagtgtctagagcagtttagagtttggaaaacttaggtgaaaaactaaatagaccttaaagtgaagaacctttggattgaaaatgggttagagtttattaactacgagttcaataagttatgtcaaggacatgggattaataggcatagaactgtagtgaggaccccggagaaaaatggtgttactgaaaggatgaatcgtaccctgttaaataaagttagatgtctactcttcaattccagattagagaaacaatttttgggggaagctcttggtactgcaacctaccttataaatagaagcccaaacagagttaactacttgaaaccccttttgaaatgtggcacaacaaaaccccaaacctaatgcatttaaaaatatttgtgtacaacatatgtacaccaatatattgataaactagaacctagatcagataagggaaccttcctatgttgtcttaggtaccaagggttataaaatatgcatttcctaaaagggtagaccaaaggcagtaattgctagaattttggtttttaatgaattgtaatatccccacttgacagctgggaaaggtagtgtgtctccatataatgcaggaaaattaggaaacaagaacactacatgcatggaaatagagtacgtaacaaaacatctggaagagggtttgcagttggaagctactgtggaaccaaaagatagtgtgtagacggaagttgataatcagccaaaagataatgaagaccaagtagatattttgggagaagtcaaacagacaggtctagaagattatcaattggcatgtgatagaaccagaagacaaattcaccctccgaagaggtttgttgaggcaggcctgattttgtttacactggcagtagtacagccaactgaaattgaagagcccgaaagctacgaagaggcaatttaaggtggaaactgttgggttttatgccctaaataaaactcttt

SEQ ID NO: 311069 - DNA, 1182 bp, Cannabis indica
ggctcatcaacaagctatgaaataaattccttttttttatttatttttatttagatagcatgttttttttctttttttttatggcttttctcttttctttaattttatattttgatagtatgttttaatttgaagcaactttttctaattttttaaagtctattaaaatatctaaagactatatttaggtgatgactcatcaacattttttctaatttttattttgatagtatgtttttttgggtgatggctcttctcttttctttaactttttattttaatagtgttatccgtgtttttagacgtatgacacgtggcatttaatgaggaagatcaacttaataattccctaattaaaaaccttttggtacaatcctgtcacagaaaagcttcatggaaccgggaaaatattaagatggaagaatacatggaagcctacttaactctgccttcgcttcctgattgtggaaggtgaattgcttctcccaaacctggaagggtctaaacatggaagcttgcctgggtgatactctgacgggtactcgaagggcctaatgcgaatgtcgaccaccttggagtatcgcaaatgtctacctttcatgcacgccagatcaccaagtgatgattatactttttctggcgaatatcagatcttgtcccctatatccaagcatggtagtacgcacacctctaccacctttttgtgatgtgggtattacagaactctgcttgtaaaggagaaagctttgagcgacacgtgacctctacttttacaggttaaacctttggatgacatgtgtccacttagtacagaatggtcttcattatccagctgcagcacgcacaaacataatgtttctcacgggatccaactgtaagctctaattttacatgtaatttaccccagttgtgggtttttagcaaaaaccttaagcaggtcatgggtctgtccatacctaccacttagcctataaatatcctcaattttcatacaaagggggaaatacaacctacatagctaaaactctactagtattactcttggtcttcttcctcaagagaaactgagagtatggagttaaaatttcctgcaaaaatattgcaaacacatcaaaaacgccctaagaggccaaaataatgactcgtagactaaggttaattaatacatgaaccacgtaaaaa

SEQ ID NO: 311070 - DNA, 940 bp, Cannabis indica
tcttgtggataaatgtctactttaccacattatgggctaaaaaattacaagttcttacaattatagaaaaaatataaccaacaaaagaagagaaaagttttttacaatacatagtatagttatcaatctcacatctagcacaaatccattaagagtgttgataaccactacaatcgctttccacaattacaaaattgtggccacgctccaccgccttatccagagccaaacaacaagttgtggcctcgccacaaagggactcagtgaaacataaactcttagtcattacctagaccacttgatcaccaaggtggttacgagcaaccaattgctaaacacatcttccatccccacacgaacatcacaactcaatttgatccagtcgagaggggaagtggaccatttctccaccaagtcaggagaagagtgagagaagagggaagcacagtaatctgcataacaataagaaatgaagtcattaatatataatactttatgctacccaaattattattgtgtacctcatcatttcaagctctccaaatggtgtccatgataataaacacacacaagaaaacctcctccacattaattccttttttacttaaatcccagatctctgatcccgcatacgaatgccattgtcagaaattgaatatataccccacgagaaagatctccagagatagaatgccaacaaacaatggagaaagatgtgttctgtagatttctcgtcaccctataaatagggcaaaaaatgtcatcgatttgtagttatatttagaactaaatagttatatatgcatgcaatatatatttgtatatatatatatatatattcatgcagcataaattttcacatgatcatcaatcttcttgttattgcatacaagtataaaaaacaatattaattaacttaattacagcttcttcatataat

SEQ ID NO: 311071 - DNA, 1250 bp, Cannabis indica
attctttgttttgaattttaataaacatgttttattattaataatttttaaaacattaatataataagcataaggataaaatattacaaaataatattagaaacattaattatagttttctatttatggtaattagtttaattattaatgattaaaatatatggttttatgtaataaattttcaaaatgtataagtttttcaaataatttttttttgcacattttttgtaattattttatttttgttgtacatttatgaaaaaagcccatttttttacttcactcataatattataatataaaaattgtgtcgaatgtcctataacatgaacataacgcactaacaagtattcatgtattatttgtggtatttttgcacgcacaccatcacaaattcacaatgagtctcacaatctcattagctttatgtggtaataagagaagtgaagagtgtgtggatatgtgtctatggaaaatcgatgttatttgtttgttagtgtactttgtaaaaatctgattttgtgctgggttggtgtggtgtggtggggtattgttttatataaattacaaataaagtataaattaaaggagctaggcaagttggacattatattaatataaaatgggcacagctaagcttattaataaattcagctcaactgccacgggcattgcctaattttctctttaaattaagctcatctcatgacactaccacaatcttctcattcaattaattatatattatataataggtatttcttctttttttcattttgtggatctaaaaaatatggccgatttcaacagtgctagtaatagtacagggaaagaaaaagaaaaagaagaagaagaagaaatagtaagagttgaatttagtgaaatagagaagagcaaagtggggataatgagggctctagtccaaaatcaagattcttcaaattcaaaggaagtgaatgatgatttgattctaaggagattccttagagctcgagacatggatgttgagaaagcctctcaaatgttcttaaagtacctaagctggagacagtccttcatgccacccaacggtgggtgcttcacccactcagatgtggccactgatattgctcataacaagttctttatgcaaggccatgacaaacaaggacgccctgttgttctcgtctttggtggcaggcataagcagcataacgtcgatgacttcaaacgtaataccttacccccaattgttctctcttactctcttt

SEQ ID NO: 311072 - DNA, 921 bp, Cannabis indica
ttacaggggattcttgagtagtatattcctgtaagcaacatggtggatgtatagtcttaatctgcatcactagtatatacataattttgcttttgaactaattacctactattagaaggagttgcatatcatgtctcaaattagaaatgattttatttttagtgactttccactttatgcagcatatacattgacaaaagtaataatattgacagaccacttatcatttcagaaaaaactcatttacccaaaagaaaagtacatcgaagaccatttattgtgctgccttagattatgtacttcattgcagcttaatttcatagttctttttttatttgttgttgtgtgtggtatgttataaataataattaagtattttatttttatttgttgttgtgtgtggtatgttataaataataattaagtattttgtttttatttattgttgtgtgtggtattgtatattaagacaagtaaaacacacttccactcatactatgttagtaaaataatatcctttagaattatttttaataattcttttcctctattttaagatgacatttttcttaatttttcgttacataatgtttttttttaaattttgcaaatcacatatattgttcctttgaatttttcagaaacgaataataaacgttaaagtcatatgttgttatgatttatcttatattattttttcacattaaggataactatgtatatattgagattgacgtaaatttcaatattaataaaaaatatacataagtttatagaaataattatattttactgacacacaatttactcttataaaacactttatttatcagaatctaaccaaaaaaaatcaaaccttaaataaaactaacatttacgtggctcggcacgtaacatgcacctagtatctttatatattaa

SEQ ID NO: 311073 - DNA, 876 bp, Cannabis indica
tttattataaatatatatcataactatttaatatgtatatccatttttttgttttttctttaagagggcgattgttccgtctcgcttctatatgagttcgttcctatgtagatggaaaaaagtttggaaggaaggagggagtattggcagggtaggccctaaaatttagtcgtctgtaaaaaaatatgttattttttaaaaataataaaaaattgtgtaattttaaaaggagataaattttttttacctctagactaggtggaccctagacataggtctaacctgcttatgcccaatgtagaactgaatatcagagggagaaagagaaggaggagagttaatttcacttgtttggcaaagaaaaaagtataggaagaagaaaataggttgatggatttggtctctcttaatcctccattttgaatctctccaaaaattggagggttggctgttaagtatcaagtaaattgtaaataaatacataaatttaactcacaattgtaaataaatacataaatttaatttttagcggtaataatacataagttattattttaaaatttctgtaggtacttggctgttaagtatcaagtaaattatcacgtggcaatccttgattggtccacatcattaaattgttattttttatttaaaaattaatttaaatttaccaataaaaaataacacgtggataatgatttgatatttaatggctaggtacctacgaaagtttcaaaaatataacttaaatattaggctaattagtaatttttccccctgaactttgacatgtactaaatcgtgccccctgaacttttttgatcgttaaaaattcccctcgaactattgagattgttaaatttaaggacttttgtc

SEQ ID NO: 311074 - DNA, 522 bp, Cannabis indica
gtgcacttgcgtgtatcaatttttagcacatcagctcacaaggctgactagtacgctttagtcgggaattgattaatgtaattaagtgtgagatgttggagaacaatgccacaactcatgtggcattatatgcgaacagtgaaccccaaaaacatattttcaacacttttcaccaatgtcataaattccaagccgagaagtgacatacattgtcacttcatttcaaattaatgcatctttagtcaaaaataaccatcttcccaatgtttgtgtgatttgacctagaaatgaggagatttttatttattggtaattttttaatcattattaaggatgatatacgagatttattagtgcgacatcctgacattctgggggatcactaacaaaccctatataatgagagtaagaggatgagagaggggggattgatggcttgctttgtgacagtcagtagtcctgtgatccgtaaaggaaaatacaaagtaatcagtgcaatcccacaccgcctggggaaggtca

SEQ ID NO: 311075 - DNA, 1056 bp, Cannabis indica
tgtgtcctccgtccatcgtaactaaggaccatttaaaagatttggagaaggctgggtatctgggcagagttgagtgcttcctccctactccaaatcactgagcaactagttcgagggaaggatactgtgcttaatcgggtgccacacaaaacaagaggcgatgctacctttgcacccgtacttcaaacggattgcagactactaccacctttttccaacctagttcacacccaagggcatcaagtatttatccgccttattcatcctctacgctattcaaggacggggtgaaccgtctacgcacgacaccaatgggctctttgatttgaagtctactccgaagcagagtaggttgggagatttcttcttctctcagctggacgacaagtggatgaagggcactgtgaacatggaggttagcaaaattgggtatttatttaatgagtattacttcgggaccggcatggagactgctcatactcagttttagcaaatccctgcacattgccatcctcccttcacgctgaggcttagggaaagggctcaaaaaattctccaactgccggaggctatttggaatatcactttgttaaccacagaggccaactttgtgaagtacaagcttcacccggcagattttatccccagcccgtgaaggagaagaataagaaatccaagccaagccaagctgaagatgtcaagcaagagaaaaagctcattcaactgaagcgtcaggctaagttgaagggtggtgttggagccaaacagtatgctcaaaaatattcagagcaggagaggtcgtggaagaagaagaaaacttacctgaccgagcaggcgccaatagaacatgccatctggattagggaacctggtgggcctgctcagccatcgaatcctgttgaaagaaaaggaaaagccatcctggaggagcaggatgactcttcggacaataattctccatccgtaattgtttgagagaatgctcccatcagcatacagagtactcaaacttgcatttattttttctaattttttatgtcttcacatattttatgt

SEQ ID NO: 311076 - DNA, 614 bp, Cannabis indica
aataatatgaatgcatttatagggcgttgatgggacccgaatgcccttcttttgtaatacaagaaagaaccaagaggccgatggatccttggagttggagtagcatggacgcgtgagcttgctgtcagtgtaatcaatcaaaggcccttcatcacattgccatgataagcagctagggacaccccaccctaatgggagtacaacactgtttttttttttggtattattattattactacaagcacgtagtatattttccaaacaataatttatctaattttgtatttaattatttatatttaaaaaatatattagagcaatttttttctctctcatttataaaaacttcatatgacaattttacaatatctgaaattaaaatgggacaaaattttatcacttaatcaaatatataaaaatgacatgaaaataaataataaatatttagtttggaattatttagtaatattttctccttttaaatgtagctgagtactttttcgggggaaattttacaaacataagaaagaaaaataggaaattacactctatatctttttatatcgtcctcttttatttttaccttctttttaaagtctatcattttttttaaa

SEQ ID NO: 311077 - DNA, 954 bp, Cannabis indica
tttggcaagaaatttattaaaaatttgatcttaagtggttatagtttcggtaggcaatgagtttaagcaagctttcgctttatcttttaaagataaggaaacagcctaagtttgatcgattcatccgaaaaatttgaaaacaaaaaaatgagcaaatatccaataaatcttttacatgcatgtaagggtcttctctttctaaaccataaaatgaaggcaacaattgaacgatagatggtttaagttcaaaatgagtgacattggtagtaggcaaaattatgcatgatggagcagtaaatgaaataggtgaaagctattcaagtagcattttttctttgcgcaacattaggttcttgttccattatgcctaaattttcaaaatcactttcaatttcacctaaagctactactctttttaccaaacaattttttgaatcacgttgccaatgatgcatgcaatgtcacaaatttcaccaagtaacacaaataatctcaagaaaacaattttttgatgaggaagatcagtcatacgaattttgagatacttgaagttaacccctgagaaaggaattttgttttctagaaagtcataggaacaaaccattgatgtgtacacagatgctgactgggctggtgataaaaatgacatgcgttctacttctgggtattttacctttgtaggtgggaatcttgtgtcttggaggagcaaaaaacaaagtgtggttgcccgatcgagtggtgaagtagaactacgaggattgacccttggtgtttgtgaaggactatggttgatattacttcttcagaatttaggctatgttacaactacacctattcagttatactgtaataacaaatttgctcgtgatatggcctataatctggttcatcgtgatatggcctataatctggttcatcgtgatatggcctataattctatttttggcatattta

SEQ ID NO: 311078 - DNA, 947 bp, Cannabis indica
agggcacaaaacccaacagtcttcactcgtaagctacttactctaattgtgctccaggacttctcggagctggggatgattgtggctctattgtgttctggagatgcttcttgtgttgtggatgctctccccatcgggtatccattaaactcctcccggattacgaagatgcctctgcgaggaactttgggagttatctctactaatccaaaaagttagtaaatctttttctctaatcatgccacctgcatcaaccttgaaaacatggataacaagcactttactacatatgtaaagtttagaagatagcgagacttagctaactaactgtcatagcctatatatagacctcaacatactaagctcaaaattaagacagcacctagacaggacctaaaccctaaactaagacagtatctagatgaatctaagtctagactagtctaaactgtcttttgtataatcagtccaagtatttagagtgaattgagagttgtaagcagaatacatgtgtatttgatcatgtgattcttattgtgaggtttgattgtaattggtgtttaacatcatagtattcaagagtgtgttgtaatttcaaattgtattagtgttgattcaactcaataagagttcattcatttttataagtctcgagctaagggtttgtttttctttttcaagtctcataacagtagagtattagagtgaagtaacttcactatactataccatcctttcctttcctatatagtatatatactttttgaaatatactaattaggatttttacccctaaactttaacatgtactaaatcatgccccgtgaacttttctagtcgttaaaattcccctgaactatttatattgttagatttaaggactttcgtttaatttcattcaattttactatttcagtgattgtttatgtactaaaccatgctctcca

SEQ ID NO: 311079 - DNA, 877 bp, Cannabis indica
ttatataatataaatatctaataaaaaattaattaaatacaattactttttagccaaatgaaaaaactttactagagacgactaaaattaataatggaaatttttgttgggagaagaagattatctctatataaattaagaattttggtaagtgtgtgataatgtaaaaaattcataacaaaaaaccaagaatcgatgaagagataaagtgactttcggctgagatttattgaagccccttacatatataaatatagggaatgttgacattacttttgttcttattatggggtgcattttttgttttgggtacttgtagaatttacaacttttcttttatgtgaaaacacattttgaagttcgtgtcttatgaatggttaatgataattcaaaaatattatattaaattatatgagactcaatacttaattgtaccaataaaatatgatcgatcttgtattcaaatgagtcttaggaaaaaaaaaatggggccttattataagaataaatagtatttttaagaattattaaaaaaatatgcatattttaaaagtttttttttatttgggcctctaagataggtgagtcctaggtgcgtgcctagcccgccttagcctagagtcagccctgccagtagcgataacgtaacgtccccgcttcaagccttcattggatccttatatccacagaataatgactcttatacacaagtacgtcactttggctgcttcctggactgatgattgaccctacagaaagtatttccagcatgttttgtcctcactcgcacgctttcctgggaaaacttcccaagaggtcacctatcctaaaattactctatgtcaagcacgtttaactgtggagttctttcgtgatg

SEQ ID NO: 311080 - DNA, 2369 bp, Cannabis indica
tcatggctgagcgcgggttgcggagcaacaaccgctgaactttcaggctgagactcttctgaatccaaaaagctgttgttggaaactgttggagtcgggtaaataccactcggtgctgaagaatccgactggatttgaatagcattggattgacaacgcttgagaacatttcgaagagattccgaatcaatttgtcttttaaattgcttattaggattgatattctcacatccatcttcagaaataagtacagctttgcctttcaaattgtgtgaggatgacagcaaagtagcaggcggattggtggatacaatagtgctatgatttggaggcaaaataggagatgtaacaggtgcaaatggtgaacgtgatgctgactgaacagagagagtatttggtggataagttgcaatcataggtgtaatggggagataggcagggaatggtattacagagacatcatcagatgaattaatgcatgatgcaggagatggaggtataggaatagatggaaaagatgaagttgtgacatgcgaatgagagggtgagtgagtggatgaggcagattctctgttagtcatattgagaggcaaaggaagtgttctcttggacagattaggaatagcattggcaaaagatttcttggcaagtcgggtcattaaaggccatgctcctcccttaaagaaatctgttctgtagcgatcatacccagattcaggaagaggagatccaatcatggaaggaccataggcaagggaaggttcatgtccattataaatttcttccaaaaacttatggcaagattcaaaaggatgaccgatgatgccacattcaaaacagaactctggtaagtgttcataacgaaattctaaccagaattcatcaagcgagtctttaagcttcaccatttttccgcgaagtaatggtttggaaatgtctaaaatggcacgaaatcgcagaaatggaccccaaccttcattcaatgagtcttcatgaacatctacataggtaccaaggaggttccctgcccattcagccatagctttagttttactcaagaacggcagcctatgcaattgaatccaaaaaggggtaaggaacaaggtttctggtgtaggcgactgaagtgcagtaggtgaggaaaggactataagatgattttggaaatgccacgactccaacaacaatactttcttaagatctccaaggcaaccaaaagaaacaaggaaaagtccggaatgatggtctgtgatcgtagcagggtactggcctttctaaaaactactcattttaatgcgaaaagtcttcctgttaatgtcccgtgaagatacaactagggcataaaggacatggctcgattgagagaaactgccattgtgcaacccatcaagaagtgtataaacttccttctcagattcagtgagaattaatgtatgattcatatcatgtagaagatgatccataaccaagagcaggggaataacatgaatacaggaaatgcaagtgcagaaattcaaagagaaaaaagagggaacggtcaaaattcaaaataagaggttatggtatacgggggaaggaaaaattagagataatgatgaaatattaggtagttaaaacaattaaaaagaagaaattaaactaactgccacagagctctttaagggcacacatgctcactttcttcctttttactttctttttcaaaatctgttatatttacttttttttaattattctactaagtttacgatagtctttattcatttttattaaaaattttgcccaaacttcttacacatacatctcaaaaatcttagttatataaaggtgtgaggataatttaagtacaatactcataaaattaggtatatttaaattaaattttatttagatgtaaatttagttaaggtgtaaaaaaagtttagatattttttaacttctccctaataagcctttttcggctaacagttaattgggccgggtctagggccgtgggcccatgttgaacagcccatggtcaactcctccaaagtcctaaactttcactctcttgctctctccgaactcagtgtctcaggaaaagtagtaacagagagcaatatgggtctctctctcctcatgccattggttttcttccttattgctctctttgctttttcatcttcggctttccaatccgatgagcttctcgtcgacgacgatgagtttggcctcgaaggagggctttactcaaagactcctgatcccgttcgtacgccacccacacctccctcatcgacccggaagaggtttgcggatccagaatccgattcgaagatccaattccagctcgaacacgcatttggggattctgatttctctcccgctgg

SEQ ID NO: 311081 - DNA, 586 bp, Cannabis indica
ggatattcttcactgcttctctttttaagtcgtttttgggacaatgttgcttagtaaatttgttcctttcaaaataggaacagaaccagacttacaaaaagtttatgttgaaccttttaagcaaacgattaatgtaaactttcttgacaaaagctaaaaaaatttcgatatcaatatctttattaatggcgcatctttggtctcagatttcgaaggggtatgggtcctccacatctccacattttttctaacaattgggtgactttaccatatagtaagacctgctgctagcagcatacgatgtattatgtagcatacgattttttttttcttatatatatatatctattctatataaagtgtgcctatataaccgaatttttggtttatgagaaattcatgggtgacttcttatttatattaaaaataaaatggtttattattaaaaataaaatggtttatgagaaattcatgtgtcactttttatttatatataataaaataaaaataaaataaatctcattaaatctaaaaaaaaacatcattaaataaaaacaaaaaaatgactcaacatcaaatcttcaat

SEQ ID NO: 311082 - DNA, 2047 bp, Cannabis indica
ggaagcttaaaacgtgagtgtgtcgtacgacctccgggtagaatagatgctgccacacctgatgaagcagttgtgagtgccacgacgccattagatcgtatagttgcaagcaacaccttgtataggaatgttttacctgtcccacagggcccatcaatgaagaatgaattgcttttatttgatgaaatatcttccattactgcattgtagacttggtgttgctcagtattaagtctttctaacgctgtaacatcttcttctggaatttctacctccaatttgcccttgatttctctggattggaattcgtcattatcaaagacaatgtcttcgtcaagtagttggtatgaattaatgtcttttcccattgactcaattgttgaagagattgactgtagtacttgatatcttacgttttgtgtaccattttcagaatttttgatatcaagtgacattagttcctcaaaatgttcccatagttctctgggaggattgcagtagaccaatatggttgcaaacaattgcctcaaactggaaggaatttgataaatggatgcttcatgtaaacagtcctctaaacaactatctctatgtagcaatccatgcattgttgctgcatcatgatatgttggtgccagtatgccgtgtattgtcctgatatcttcaaataataacggtcctcttacgtgatttcacagtatgcgcagaaaatatctttagccttctaatggatttgctgtatcaatacaccctattattgtctctctttcttttttttccattgagtccactttcttttttggttgttccgaacatagtattcaggaatttgtttgtataacaatgtcattgcattttcatctagtctatttactgtaaagaattctgttaacatggattttttataatgttcggaattagcaatgcttgacatgtcagaatttcttcagaatgtaactgggtgttgattcttgagatgtaaatgcaagctatatactgccggtgacatctcatttacaataaatctgtatattctctacatagcttaagggacagaaatccatcgagctgtctggaactgatgtatttcattaactgcttgattatttgattcagagaccaagttgaatgtaacaaggtcatggcctttgtatatgtattgtagagatactttaccgccttcactgtagagcatatttctacattaatgtgacagtcaaatgtggcgaggagatatgggttgtatggaactatccaacgattgtctaaatgttgccccccgaccttcacagtcacaccattatttgaatgcctataaatagggaaacagtcattttcgactgacgtaactagagcatactttttcagaaaattatttttgtatcgtggattttcccctttcatgcacacatttattttgttcaattctccataaggtccatgcatcatgtgttttacaactgccttatgcaagtggatatttgagtttttattgggaatctctactgatacgatctcatcaaaagatttaggaacatggacttttcaatccctttgcaatataattgaaaagtgtgcatgcggaggtcctctttttggtgctcaataatgtagacatatgctaagaccttgctgaatatctcttttttcaataacttgtcttttaattcctctagttttgcatgaaatactcgtgcaaccagattaggtttattgtggctctcctcgtgttgatatagttcattagtgatttcttttcaatttgggttgcatgtcatcattagaaaaatatcaagtttttcatagcgttgtactaacgccattgcctccatgtatctcttcctcatgtctcttggacatctgttgaaagatgaaggccgtatgattcattttcccaacattagaagcgtctctttctccaagcgtaatcgtgtcaactataccttgatataattctattcgaatgtgtctttgctagcctctataataatccaatctttgttacaaattatttataagatctattgacaattggactatgattaaa

SEQ ID NO: 311083 - DNA, 1044 bp, Cannabis indica
aaaaaacgcagtaaaaaagtaaaaaaataccgcctatttttgtaaaaaaatggcaaaagttagtataccatgtaaatttccctaaaaaaaggggcctgattaattgggcttaaatggtaattaaatgtgattagactttctaatgagacaattacaattaattaaagaataattacattaaattaaaaaatttatattttaacgtttaattttttattttttatttttatatttttatgactttctataataacaacaagaaaactatataaaagtaacaaaaaataacatcaaataaataaataataataataacatacaaataacaaaaaatattcaacataaattaacaagaatacactataaaaatattacattttttgttaataaaattataaaaatcataaaattatttgaattttcatgcaattgtatttttataaatcttttattattttttatgtatttgtaaaataatctcattaattaaaggtggtataagatgtaattttgacccaatggaccacctactaggagtagtaggcaagctaatgtgacttgtcttgggaagagaagttacaggtgtaggtaggggtgtttatcaaactgcttacattgtattatattgcacaaaaaaatatagtttgaaatcttttacagtgcggttgcagtatgtattttttccaagccgcacagtgcaatgcaaatttaataattacggttcaaatcgcaccgtatttttacagtatagttttacaattttaaaatctcgcagtgcggttacgttttgagaaattacaaaagcgatttggtttaaaaaaatgtcacaactcatgtaccacctgcatcgcaaatacctctaagttaccatttttgtgtatgggctaaaaaagtagtaattagagtaatgggtgtgcgtatccttccattttgaaaggaaaatttttatggtatactaatttttgttatttttttacaaaaatattgtcaggcggtattttattttttttactgtgttttaataagtttcatactgcggtatac

SEQ ID NO: 311084 - DNA, 1667 bp, Cannabis indica
aaacttgtccaacgcctatttatgatttttctctctgatgggctcaaatacagcagggatgtttctagtttggctcgggttaccaatatctatgcccctatcttcaatgaagggtctatctttaagttgcagaaattgctcttgtgcctcaatattcacaaatctagccctatcaacattggagggacccctaggtgggttagatgatgaagatccccctctttcacttactctagatctcttaggaccaatctctcaaaaatttctaacactcaaaaatttatgaaaatttcggcagcacttccccttaaaaattcacttcccgggtaacaagccaatcacaaatagaatagctctcaatcacaaacaactttttcaatcaatataatgagcacaatcccacaaatgacaataaaatttcaaaattctccaacaatccaaaattattcaataataattgcatagagagtctaagaaattgttacctcaatgaaatccccctctactctacctccattgaaggaaaccttgaagttcttgaggtaaaagatgatgaatagtgattttggaaatttgggtgagattttagggatttggggttgattttgaaaggaaaagagtgtttgatgagaggaaaagtggtttagaatgatttgtgatgaaggattggggaaagatttgaagaaaagggggtgtaggatgagattagatgaagagaagtagtttttgaggagagttttcggaggtgaggttgttatggtttagaaaaggatatgcttttgaatgtgatgattgttggccctttttaaacacgtctgacacatctcgccgcggccacaagtgggctcgccgcggtgagatagtggtgaaaaacatcctctctgcccaggacttatggccgcgacgatggtgatgctcgccgcggcgagatgtccctcgaaaaatggctttctgtagtccaccttatggccgcggctagagtgtaactcgccgcggccactgtgccgtaccccaaaaaaaactttttttttccttctaaacagtacaagaaattaaagaaaattaaaatttggttcaccagttcactaaacataaactaaaaagaacagaaacaataataaaaactaaaacaaaataagaaagttcaactaaaacatcaagaaaatttgggttgcctcccaatagcgctgtctttttcgtcatacagccggacgttgactgagttcttcagagtggcgctagaatcatggcagacttggcttggtcaaattgacctcccaagtagagctttaaccgctgcccgttaactttgaaagtctcggggctttcacctttcagttctaccgctccatatggaaacactttaaccactgtaaacggtccggaccaccttggctttagcttaccaggaaacaatttcaaccttgaattgaaaagtaaaaattgctgcccaagttgaaactccttcctaactaagctttggtcatgccactttttggttctctccttgtagatcttagcattctcgtaagcctcatttcgaaactcctccaattcatccaattgcagtaatcttttctctcatgccgccttcaaatccatgttgagagtcttcatagcccaataggccttatgttctaattccaccggtagatgacaagcctttc

SEQ ID NO: 311085 - DNA, 913 bp, Cannabis indica
ttatttacatttattttccgttattataattttttaatataatcgtactgacttgagcgtcggagtccctttggctgacaccccaccggtgctcccaattgaacttttatctctctctttgttcttgacaggttgctggtgcccaaattccgtattgtagatttcaccctctacaatagttaagtataattttattttataattatcattttaatattgcaaacagtcttacataatttggtaaatacctacttattttatatatttttacacaggcatttacgagagcatgggagaaagcatgctctacgagaggaaatgtaattttagtggttccaaaagagaaaaagtatcacattaaacttataaaattccaaggtccatgcaaatttgagcaacttaattttgaaattcttggaactatagttgcatcaaatgagcaatcggattatggtgagtatggaagccgatggctcatctttgacaatgtaaaaaatttactagtccaaggtggtggaatcctagatggctatggtgatatatggtggaaccattcatgcaaaatgaataaatcgcaagtaagtaattaatcattatattatatatatatatatatattaatgatatgtacctgcataaaattatatattttgtgttcacatatcattatttttttaatattaaaaatatatctgacttttctttttcttgaatatttttcagccttgtaaacaagcgcccacagtaagttatttgcaccctacatactatttttttgagaatttatacttattttattaatagaattgataggtatatattgtgtgtattaatttaaggattatttgtggcaaaacctcctaaagtggataggtttttgcaactaactccctaatttaaaattttggtggta

SEQ ID NO: 311086 - DNA, 1319 bp, Cannabis indica
ccgaaacagttaagggttgcatcggtacacccatttaataagaacttaaatgatactttaaattctgtgttttcaaaatagtattttgagctaaatttttatgaaattaaaatttaatactaatctgaactgagtgcgttataaaactacaattttttttttaatcacaaattaaaagtaaaaaagttgtgactaattataaatcatcattcttatgactaaagtatccgtgactaaagatattagttataaaagttacaatttgttgtgacttaatatatttttagtaacagtataatagttgttgtgactaaaagtaaattagtgacaacttgtgtctaaatattatgttttagtcacaagtaactttttatcgtcactaaaagttacatttgtcacaaaaaaattatgttgtggactaaaagattgtcaataaaggtagttgctttgtgtagtgtgatcagaatggttatattttttatatctgttcgtgctagaaattagcttcaggttacttatattaaaaaaaattgagcttaggttattattttatactattctaaaaaatatagggtacaatttgtaatttaataaaatagaagatccagttaataactttgcaaactacaaggtccaaaataatttcttttttttagaaattccgaaaagtttattgaactcaaacaacactgccaagataaagttacttacaaagctttagttaaagcttccacccattcactatctattttactcaaattcttagttttcaaagagttcactttagcacaaacactattagcaatacaattaaaagtgaccttaatagtaggaagttattgctctcaaagcacattgtttctatatagtatgccaaataaaataaattgtggctgtaatgatgctcaaaagaacttttcttttacctctaaaaagttttgccttccgaatccactttaggacatcatggagctcttttttcgtgcgaggaaagcttcattcaaacgatcttggagatctcttttgtgaacatgatacccctaaatgtgtgaataccaagcctgaatgagtataaatgctagaagctagtgcaattatcgaattaaaatgattctgaatctcatcataggtccgatcaacttgccatttgggattctgaaattcatcatcatcatcctcacggtatcgttcctctcttatgcttctactaacatctcgcagtgccttgactctttagtcccaccgttggttattgttatcaagggtgacgttgttgggattttatgccctaaataaacccatttcaatttaatctgatt

SEQ ID NO: 311087 - DNA, 911 bp, Cannabis indica
aaaacaaggagctcatcttttgaagggtcaaagaaagagagagtaacaatgtttcaaacattgagtgatacaacatctccatcaacaacagatggcagtgatggtgaagatgaagaaaccagctcggatttgcatgaagatgagtacatcgaaaacatgacaaagggaaagggaaaagtactagttgatgaaaatgaaagctcaagtgatgaagatgatgatggggttttggagagagagttatggagaagtccttcagagccagcctcaagctcattagtttggaataaaaacggtagtggaagcttgtcattgaagcggagaaaagcattgtcatcaaccaattagggactttacttaattgacgtatctttgtttgaaattagaatgtatttgtaatagtgtttagaagaaaccaaaggattaattagtacaatttcttttaaaatcataaacccaaaaaattactttacctaactatacacagaaaatgacaaaaagaaaaaggtcaacgttagttgtgattatgtaaggggtaatattagaaatatgtatttctttgaaatgggatttgttaattgtgaataattagttataccgaatgtctctgttatttttttttgaaacaaagattgcactttattaatgcagctaataaaatagcttctaaacccatagggacaaaccccctactggaaagacggtcgggacatgaatccctaactttagctgctgtcgttcaggggtgctgcagcctgaaatggtggaagttttgggtgttaaggaggcgctgagttgagttaagaagaaagattggaagaaggttgtcattgaaactgatagtcttacagtggtgcaagcgttacgtagctctattcctattgtaacgccctaatgctaaggcacgctac

SEQ ID NO: 311088 - DNA, 1060 bp, Cannabis indica
tggtcgcgactatggagtttgggcaaaaagcttatatttcgagattagcctatggtcgcgactatactttaagtagtcggaactattggctaaagacgggatttttgggcagttttgtaatttcgccattcgaagatatctgtattactttctatataagggttttgttttttagaggcaaaatacagaggaagagaaccctaaaaacaaagaaagaggctaaggaagcgagcgtggtgatccaaatcgatttcttgcttggttgtttcttttgccgagagagaaaggaagaagaaggtcggggatgagttttctggtgttgttttgttttgacttttcttaaggtatttctacttataccagacaacttctaaaaactaaaaaaagaaaaaaaaagaatttatctaattaagaaaatgattattttactctttcttagtccttaagaaaactctaactctagggcgatttggtcaacaccgaatactttaaaataactcggttgtttgaagatcgacttatctgaacaatctcaccaaaatttttaattaaaataattgtgatatttttagctttcgattgggtctccaaggtcaccaaacttgaaactatatttactcgaggaataacatacatcatacccacatatttttataaaatctccgtaattaataaactacgcttatttatccacttatagtaaaatttcctaatttacactaaattatattagtaggatcataatcccactcattatatcttaattgatctatatttatataaataatcctaattattcatatatagttaggtttttggaatattataggggtctaagtttgggtatggtgtctgagtctagggtacaaggtttggggtctggggtccgcggtcgggtctaagtcttggatttaggtttggtgtttggggccatggtccatggaggttgggggcctacatcttatgtctggccgggtgctgttaattgagcttcgtgtccacaggtcggggtcaaaacgtgtaacaccctaactaattgaggcgtattacgtgattttta

SEQ ID NO: 311089 - DNA, 4051 bp, Cannabis indica
atccgcacagccccaagttgaacgcgggcttccttggcgtcctacttggccaagtccacttcgattcgcattgtgttagaaattgcaaggctcttaacaagagtcgacttagctcgggaataggcataagccatcttcaggccagtctgtgcgaaaagaagacattaaaatccaaactagttaaagaagaacaagaggaaagtgtaagagaaggcttaccctcgaaagctcgttcaggattcctcccataaccagctccaaagacaagtcgttgtccgccctagccagctgttcgttcacctcagggactgaccgattcacatagtgggtgagcatatctctgcctcttttagtctcctagtacattactagaggtggcgcaggggccttaacctgtttagacaagcttttgatcagcttggatccaccctccgcttgttcaggcctgtccgaactacctcctacagaatctttggacttggtcacttttgagggaggagggtccacaacagtctattcttcagaaaggtaaatgaccacttcagttggtgccttctccttggatagggtctcaccgccttaggacttcttggccggaggggacaaggtcgagcttccccccactctcttcttcaaagcctcaatcatttttgagaaatttctgcacggaataaaaacaaaatagttagaagaaagtataaaatatacgaaggcatgaaaatgaagaaaaattaatgcaagatgatgtattatgcacgctggtaggagcatcagcccgaacaagcacagctggggcgtcgtcatctgaagagtctccctgctcttccagaaaaaatttccccttttgcttctacaggacttgatgggcgagcaggtaccccaggctctctgatcaggatagaatgttctatgagcctccttctcctggtatgaatattcttgagcatattgttcggcttcggctccacccttcaacttagcctcacgcttaagttgaataagctccttctcctactcagaatattccttcgcatactgcttggctcctgcatcatccttcaacttagcctcacgcttgagttgaatgagctccttttcttgctcagcttccacagcccggccagcactggattttttctttctccccttcacaggctggggtataaagtctgtcggatagagcccgtactccataaagttggcctccgagatcaacaaagtgatattccgagcatcattcggcagttggagaatcctctgagctctatacctaagagttagtgtaaggggtggacggtaatatattgggatctactgaaactgagtataggtggtgtccatgccttccacgaagtaatactcgtcaacaaaacccccgaccttgcgaacgaccttgtccacagtgcctgtaaaccactagaaatctagctaagagaagtagaagtacccctacctgctttgcttgggggtagacttcaagacctcgtgcgacttaaatgtcgtagagggcgaacagggaaaataagtccttaattcccttgggagtgaagtaggtcggacaaaggcaaaaataatccgccaccttctagaagtatgagtgcaaaggcatcatttcccgttgcttagtgtgagcacccgaccaggcacagaaccctttttgtgggttacttgctctgtgtttcgaagaagggacgtaacactcacgtctgtccagatattcagccttgtccaaggccctcacgtgcctcgctgatcatggacggagggcttacccatctggcacctaaggcaccttgcctcttcggtgacatagtcttccccttcgaccaagacttcaccctctgcagacaccgactccccggcctcgttgtaccctccaaagtttggaggttcagccactccttcctcctcgaccttggaagggctgtcaggacaaacgtcgtcctactcctcgatctcctggacctcaatgtccccctcatgatctccctcctccatggcgggcggatcttgttcgacacttggcaatgtggggagctgggccacatgaggattagatgcgttgacctttcgcatcgtctgctttgtgtgagccatgatcctcatcctggacggatgctgatgtgtatgtcgtgcaactataacagcagggacaacaatcgggatgccgaagttacctgaacttggacgaccaacaggaagagtatcagcaacacttggccggacaatacatgtccagttagacgaaagataatgcctccaactcttcttcaattcccaaatgaagcggtcgtacccctctccagcgattttcttagggtaataatggtgctgcactacgggttctagagtaggagaacaatcattactcacctcccaatcttcaaagctcgagttacaaagtccaccactcgaagaggacagattggcgcaaagacgaggctgatcctggtacaaaagttgaagcaagtcctcgtcaattgggtgttccttccctaaaactcacaaaggttggtttcatctacaaaagacaacacttcatcacaaaagacaacacacgagatgagtgtttggtcgggatatcgaacagtaaacaggcaaatatgccgaaccaagagtactcaatagattaaaaggatgaaaaatgtacaaaattcaagccaagaccagaagtttgaaatttttgggtttagggcgaaaaaattcatgaagcttcgaaagactaaggtgaaagacgaacaatgagtgattaaaggcaaaggtcataaaccgtgaagccgtacggactattatagagtaaatcacaaagtttcgagcctagattttctatctatcttctacaacaagtcaagaacgcatgtattttcgataatagaaaccctgaaattaaacatgcaaagttaaaagagaatcagattgaaaacttactcattgtttgacgcctaaatttagtccaaacgaggctgctcaaatgccttttgtatgaatctcatgacagacttgaagtaaaatcctttttttctcttagtttgtttagtagagaaattagtaaaagtaaaattatgaagataatccagccttatttataggcaatctagtgaaaagaggtaatcatttcaaaatacctcagacgctttgattccctcccaaaagcaaatatcgggagatcaaaattaatcaagtgtaaccttcaaagcgtgatgagaaaaattgggttccgatgcactaattaagtcagcgcattaattagccgaaaaccgaagagacgcctggtcagcctcacatcgagtcacgaacagacgcgcctaacacatgtcacccattcaaatgcgtaggcatctcagatgaagtctacatgcaacttcggaagtctcatacagacttgggggataaggttatcccaattttagtactttgacatggcatcacaatctggtgacacgtggaagcaactttgcatatctgttcgaaagagatatgccgaacagaacaccgtatatatctgtacacacgaagccttcctcactgggcagtggacggtccaaacagcgtgccaacacttaggaacttcaatacttgcatcatgaatcacaaaagcaatccctataattctgggatcatatcaaagagatatggcaagctgtccaaatcccttaatcagtgtactctgtatttaatatgtaatcttaccaattatagacattgtaaatagaagggaaacttttctctcaaagcttatagccctatgaatagtgatccattttcactaggcaaggggtcgaaaaacttctctaagagtatgtactcaaagatatcattgtaagagctctaagggacgaatcactacattctttgttcttacgtcaatacatatcaaggggagtaggttattactgaacttctcggggccaaacctttataaaaactctatgtctttatttatttcactatattacatctatattatactacttgtcgttggccaaaaccgaggtcaacaaaggcaaatggctttcacaattggggttgttcgtgtgagggagggttgggt

SEQ ID NO: 311090 - DNA, 1689 bp, Cannabis indica
ggcataaaacccaacatatccatacgatgctcttgagagagtacaagtgactcgatttcagcgacagtatatggttaattttgtaagttaacagatattatgaaggtatcataatcaaaaggcaggcctttaaagatcgcagaaatgtgttctttaagagtgacatgatgaccaacaattctagtcgattaacgactgtcttgattttcaacaagtaatcattaacagaaagcgatcctttcttgatcgtcgacaattgattggtaaattgatcaattttagcagaagtctgtgtcgcaaaatatacctgaagtgttttccaaacttgtgtagaggtatcgtttccaacaactcgagtcaagactccttccgacatcgacgagagaagccatgagtataggagctgatcttgctgctcccattgcaagtacagcggattgatacgtttagcatgctgatcagtctcagtaaggaactttggaggaggatcgacatcatcagagatataatcgattaattgatggccacgaatcactgagaggactttaggcctccaaagtaagaaattgtggttgtcgagtttaacagagagtttgtgggagaaaaccacaagttgaaacaaagtctgagccgcagaagcaccggtcatggccggagaagatgaagtagtcgtcatatccacaaatatagagagaagcaacaaagctgagatcgaactatgacagatacgaagatatagacaatgaacgcagaagcggaaaaaaaaagactactctgataccatgttaggcagagagaaagaattgaatgaggagtataaactctctgtccattaatgtagctcaagctcagtatatatacatcaagagaaagggaaagaggtacaaacagaatgcaactgaaagtagttgtaagtaacagaatacagttacagtaaaataacagccaactgacacacctaactagctacttcactaacatacccaagtccgtatttttgtaaatataaaaagttcaaaccataaaaaaaaattctccatgttaatgtattcttataatattttttttcaacattttcagtctattatgtcaaagtttctaaagaaaagctaaattctttctactcttggtcgtgtccacatttgattgataaaagaaagcacagaaagcaactaattaaagaataattagtatttttatctcttaaactttcgacactacctgattttgtttcttaaaatatacgctttgttaaaaattctccctaaaatataatcgttgcataattataccccttctgttaggttctatttcttttatcgttaaaaattgacattttaccccgtaaactttaaccaatacaaaattttaccctattttattaaaaaaaaataattttaaaacttagaatgttctattaattttaaaaaaaaataataaaaagtgttataaaacttgataaaaatattaaatttacttaaaaaacctaatttattccttaaaaaatgttgttaaactttattttattgattattatatgttaaaaaaatcaaactaaagttattaaaaattcaataaataattcaaacaaactaagattttttgaagaaaaaatcaagttcacttatgtttataaactcataactaaaaaaaaataaaaaaaataatttaaaactcaatttttttttt

SEQ ID NO: 311091 - DNA, 2279 bp, Cannabis indica
agacaatccctatatatatatatcaaatgtaatgaattggcaggtaacatatccaaagatgatggagttttttgataagcttggagtagagttggagccattagatatgtcattctcagtaagcttagaggaaggaaaagggtatgagtggggtactcgaaatggcttctcaagtttatttgctcaaaagaaaaatctctttaatccttatttctatcaaatgattagagaaattgtcaagttcaaggatgatactatcaggtaattaattaaggaaaaatttgataaaacatgctttctctgttaaaaatatatactataccatcaatcaacatgctattaacaataacaatcaacaacaaatcatgatcatattaactaagacgaaatatttaattttagaacatattttaatcttgatttccaatggtcacatatggagaaaagaaagcttgggtgtgatgaatgaacacttctctttctctctacaatatagctaggggtcatagaaaaaaaataaaattttagactttatttaaaaatataatattattaaaattaacaaaaataaataaatttaaaaggataattttttttaggtggagtgtaggcacaaacctaactcacttatgcccaaagctagacctgaccacgaccattctaccttaaaataccaatcacgagcacaattctctttataaggtattatgggcccaatatattatatatattcaatgtgagaaaattagttgtcttagcccaaaagactagccaaaaatattttagagcgcgccgatgagcccgagcgtattagtacgttatgtccatcctattatggcccaatagtaatacaatgtattaccgattatataattattattatatattaatactgacactgaatgagcaacacttaattatgttagagcatctccaattaatagagatgcaaataagtgatgcaagcgcaaaatatagctcactttattaaagtctattccaatggtgtgataaatcatgatgcaaaaatctcacataataaaaaattatttaaattcgcattacaatataacatgatgcaaaatttgcatcacaataaatactttttatatttaccattatgttatttttaatattttattattaaatttagctatcataattctttacattaaataaatgacttatattattattttattattaaactttacatttaaatttgtattattattaatttatattttctaataaattattaagtgagcattaaataatatattaaattttacattaagatttataattatgcattgaagcacaataataaaaattgatgtagaaatattacaaaactacttttaatttgtataaaatatagcttaacttttacatctttccatgatcttagtctacataaaatattatagatactctattttcattttgcttataattatttatttgatttttgtgaccatattagctatgttgatatgcttgagaacaaccgagacataatagagcgagatgaaacgttaggagagttcattaagtctcatggttactccaacttgttcatgaaagcttttcttgtgagattaaacactatacccttttctattaattactcaagtctatttgtacatattatactaattcatttaatattgtgtatctatatatataatctatatatatatatatatgtacatatatatatatatttatatagattccaatggtttgttcgatatggagttgccattcagaagttattatgagtttctctgcattctctgtcctttcgtttgtcgtaaccactatctctttcaggtatatatacattttttggccattcaaatatatttactcacttaatattaactattaaggatgttttcggtaaaatcttattattattattgttggatcaaaagttcaaaactaaaatattatatatatttgaacctacatatattgtaacgccctaaataattaggcacgctacccaagatacttataaagccctaatcccctaaacgggattactaataaaattagtgcagaatttaaactttaatcataaacgaaaggaaaataaaacttgtaataatttaaactttacaatctaaaaattacagaagttgggatcccaaaaacatttacaaaatattattaccagtctttttctttcagtcggcctaagcggcaaaacagagtctcaaaaaatacaatactggtagaccccaacccgcttggtctgatatggcccggac

SEQ ID NO: 311092 - DNA, 1087 bp, Cannabis indica
taataataataataacaaaaataataattaaaaataaaatacttacggtaactcttgacactccttggtccatattctttcttgttgttgtgatgacctccattgccattagaagctataacagttgtttggaccatggaaatggcaatgaaagccaagatcatgaaggagaaacttaggcatggccatttcgtcgaagaaacgagagaaagactttgagagaaagagtagagagaaaaattaataaattacagataaggccagaaacttaattatagtgtaatttcattattcaaatagttcataattggtatatattttgctctcaaggttcatttattttcatctatctaataaataatatataataatactccaattttttttctcttttgagttacataataatatacactataatatataaatctaatagtatctaataatacatattacattatgaaaaattataaagataaaaatcgatatatatcttgacataaaaaaatatactcataaatataataatgtatatacatagagatatataattttttcaacattatatatatgtaaatagtttctaaaaaatatatatatatattaacatttaatattttattgaattgattgatgatgttcacatgcactgagcaaaaaatttattgttcggtgttataactgattagtttctcagttagttagagctagttacctaactcatcctagtaagtatttgttagtttgtggagctgctgccacttaatgttgttggttgttttctgtttcaatgtacttgtatgtatactctcccctgcttcattgaataataagattttattccacaatcttcacctttcctttctttcttcttcttttctttctattcatttctttatgttcaacaatggccagaagatttaacttggtatcagagtattttctgccccttgtggctaacaaggcgactatgggaaacaatgcagctagagcagaggcaaatggatcacaagctctcgacaggcaaagtgtgaatcatgatccagtgttcttcaatcatagcatctcgatgttgggttttatgccc

SEQ ID NO: 311093 - DNA, 1055 bp, Cannabis indica
aaataaaataactcaaataaaaacatttattctgcatgctccaacctaccaaataattacactcatattatatctactctaaaaatacccattcagtattttatataaccagttctattttagttacaaccggtttgagttatttcgtgttatttgtttctactcattgtaacactgttatgaaaccggttctgttttaattgtaactgatttgagttattttgtattatttgttttacttcaacatgttacaaaaccggttatatttcaattataaccggtttgagttattttatgttatttatttttattcattatgttatagaatcaatttatttaactgacaccataagtgactcatatggcctcggttattttcaaataattgacgttatagggtgttaaaaccattcagctgataaacaatcctttagcgtctcttttttatttttcagcaaaaatatgtgcttcctaaaagccaaaattgtagtagtgacgattcgaaaatatttttcttgccgttatattttttcattccactggtctatataatacgattgaattaataggagaaacacatctttttcatactaaaaaaaaaacacagttataaaaccagttcaaccatgatacgattggagacattggtagaaagtaccatgaagctaaagataagtatcaagaagcccgtttgcttgcccaggctcatccaagtgaccttaatcttcagcataatgaatcaaccactgctgctatatttagcagcctcgagaaaagctatcatagttttcttaaacagcgaagcaaggttacttggatcaaaaaagatgacgctaacacttcctactttcatgctcgccttaaaaaaagaaaagctgataatagaattgttagttttaccaatgaacaagggctgcaagttgataactttgcagaagttgttgagcactttttgagtcattttcaaagttatatgggctataatagcagggttgggaggaagattgatctaggttgtatgacacaaggggcagttcttgttggaaattatttta

SEQ ID NO: 311094 - DNA, 890 bp, Cannabis indica
taatttcataattaaaattctttcaattgaaccagagatcctttaaatacctaacatgatgataaaatatcatcttctctcctttcaaaaataccaaacaacacaagagaatacgattctcctttgtattcctctacattctcctttccattctctactctctctatccttcctaaactattcatccttccttttctccctcctcttaccaaacacacctttattatagaatccttcacttttggaaggatttattttggaggatttggagggatagctcttccctcaatctttcctttccctccattttctttcttgccaaacaaataattttggcattccttccacccctttccttcctaccttttccacacttccatattttcttcttaccaaacatataattaaaaataaaaaaatttagactattccatcaatctaaatccaaacaccctcctttcattttctataacctcaaactaaaaccggtgcttgttaattataaggaaaaacttacttgcaaaatatgacatttaatatatgagtaataatataaaaaaaaaattatgtgacactattttataaaatagtaggttctaatttaaataaatagtttgaaaaaattctaatgttattgtgtgtaatatttaagcataattataagtacgttaattaaatattagatcaaattcaacaattttaaaaaaaaaaaaatcacaacaaattttatgatttttaaattgtaattttgatctgtagagaactcttcgatatatatataagtagtaaattatagtaaataactctaaatgatagaactatgttagtaaatgttctcatttttaaacatcaaaaaaaaaaaaaaattgttctcatttgaaaacttgtag

SEQ ID NO: 311095 - DNA, 1063 bp, Cannabis indica
ttttttttaaaaaaaaagttcaaataatttaatcttcacctaagctgttctcttttaaaactttcaaagttaattttagtatcaattcaataaatttattttattacaaacattcagattaacgaaactaccctaaaaacaagttttagagcacgaaaacaactctaaaacttaccgagcgttattgtattatcctctttgtttggtatgatgaaacagaagaatggattaaatggtatggaatgaagttatctttatttgttattgctaagaagtacgggaattaagggaaagaaataactataaattaccaaaaaaattagacacaaaaaaccatctctatcagtggattgtgtgcacaaaagtaaaattgaaatggttagtgactgattaatgtttaatattatatatttgtttatttagggtgcgtttataaagttacaatgtaattagatttatgtgtaattagagataattatactgtttgatatgtttattgatcatgtaattatattgtgatagtgtagtgtcattggaggtaattgagagacaaactgattctcatgacttccaatgagaattaaatataattacacggtgtaattattaaattttttttattttaaatattaactattaaaaagtattattttactatgtaattactaactattttccctaacaatatatgaggaaatttatatctaattattacctcatatctaaattgaaaacaaacaagaacaggagagagaaatgaagaagactatgaaggaatgcttaaatcttgcattaaacaaagacaaaacctttatttatacataaagattatacaagtggctttttataaatttagttacaaaaatactcttgtattttaaaatatagtataattactaaaaatttaattatcaccttagtaattataatatttaataagtacacagttacttctagatacacttttatttttgttagatattataattaattattaatgatggtgccaaaaaaaaaaattagattttggttaaaaataatatctaatggtacatttgtgaga

SEQ ID NO: 311096 - DNA, 1265 bp, Cannabis indica
ttctgcttttactctgttcttccatggcatgaggaggaggtaatcaaactcgcaacaatcgtaatcaaggtgttgaacattcgaatcgtttttcagcacttgatgaaaataacaaattttcaatgaatgatccaggcggtccttgttatctttcaaatgctgacaatgcatcttcatctctggtcctgaagattcttactggtgtagataactatagttcatggagaagatcgatgatggtggcattgttggctagaaacaaagttaagttcataaatggaaagcttctagctctggatgaagatgatgaagactatgatgcgtggatttaatgcaatagcttggtaatttcatggatcttgaactttatttcacctactatagctaatagtatcacgtatgtagaagatgcttctcgaatctggtctgaattgcaggagagatttcatcaaaaaaatagtcttagagtttttaaagtaaagagatcaatgcagactttaacacaaagacccagtgatgttacttcgtactacactcgtcttaaatgattatgggatttattacaggaatataggccacaaccggtttgtacttgtagcgctatgaagatcatacaagagtatcaggatgaagataaagttcttgagtttctaattggtttaaatgaatcctatctcaatgccaggtctcagatcttacttcaaaatccccttccaaatgtgaataaagcttatgcttgcataattaaagaagaaaaacagagaggaattattattccacaaactgaaacttcacaacctcctattgagaattcaggttaatttgtaggaaatgcacaagacaatcgaggaaataatcgccctaataattgatatgatcgatctgataatcgacttgtttgttctcattatggtatctctgggcacactattgcaaaatactatagagttcatggatatccacctgaccatcgattgtatggaagatttccaagagagattcctgaaccaggaaatcaacttgagcgatcatcaactaattttgcagtatggaatgatactaatgaggggatgattgaagaggaaaatttggctgcataatgtcaaaggcttatggctatactaacacaaaagatgcaagaaaattctcagcaatctcaacaatctcagcaatctgattagcctattgtatcaaacatatcttgtaacaccctaactagcatatgcgtattacgtgatttttaaacatactgtgcagctcgttgc

SEQ ID NO: 311097 - DNA, 2237 bp, Cannabis indica
aaaaagggtgactaggataaaattatagatatggctttaaaggaacaatcgatctaaagaatgcctaattcactttcctagtcatgcataatttattatttcgcctcaaagcaagcaacaaagttctagaatttttcaaacaaatttccacatttcacaattagcatacataaaccaattcaattgctagacaattgcctaatatgagtccatgctcttttaaatcacaaaattgaaattactcaagaatgtgatatgaccaagcacatgaattttttttcgaaaaataaatgaaatttctaaatcatgctatctacttactttcaaattgactcacattaagaaaattgactcaaaacaaagaaacaactaaaaactaaaaacttaaagacttaaaattttaaaaacaaaagaataaaaaataaaaaattaaattcacccccctaactaaagtgacacattgtccccaatgtgacatgaaagagaaaggaaagggaacttacttgagcgccacatcagtatagtcgtggtggtggctggtatggataccacaacaacggaggagagaagtgatctggagcatcgggggttcatcgtccacatagagaaagcagaatttaactcctaaacttgcctatgagcaaattcatgatgctgctgaagattaagagttatagtaggcaacttgggcttggttagattggatgatgtattgattctcgagatgatatagtctaatctatcatatgtgtcgatagtcctagagttcagtggtggttcaatctagagaagaggcgaacccgtctcacttgtgcccggttcttcatgctcctcttcctcatcatcatctctaccatgtggagcatcacccttctggcattttcttacctcttctgggggtgtcaaagatgcttgaagaaattcatagtaatgccttctagagatgggctgcattagtgctttaacaatgtctccttctataattggaacaccctgtctcaagcataaagttgtaatcaaggcaccgtgggtcgtgcccgctgtggtcctcatttcagaaacatagttaatatttttgagaattacttatcctatatcgaacgtcatcttcgtcatgctagcatagacaactagacaacgatcatagtccagagttgaagcatgtgatgtaggcataattttggaatttacaaaatagacccgggcttttaccattggattgagttccactagtatagagacttctaattcacatttccctcaacataaaatcaggtacccgattgccacaaaattgttggaatggcctcatctgtaagtgtttctctcctcaatgctagtattctctcatctcgtcatttctctagtgtgccaagaataaaaaagttgttaatattgtctaacctaatgggcacctgtactcctccaacatatacttcgtcattatcgcctttgtagagatagttggcaaagaattcctagataatattatagtttgcttcgcccacattctgtacagcacataactttttccattcctctattagtctcatagctcaggtcccttggaaaaggtttgtcctaaaattgaaagaccatttatcgaagtacacccttctttttgagtttttcataactttttgcagcttcctcattcacaaatctattaataggttgggttggttttcttggggatcaggatctcttgatgacgatccttgcacattacgttgggctcgagtccaaattaccttagtcctagatgtcatgccaacttactagccaaaacaaaaatcttcggtgtcaaaaacaattaagcagcacctcccctatatttttcacttcctccaaacatgatttaagcactaattcaccttaattattctctaacaatagcaaacatcactatccaatcttccccaaataaaatttatcctaatatcacacaatccacaatcaattactcttcaatcaccaaaatttagtgagaaagaacacttacttgtagaatagaagctttgatatacttgaagtagtcctcttccattaagaattcccaaaaattaaatgatgaacataatggtttaggtttaaggattttttgaatttttttttggtttaattgaaggaatgtgggtgaaaattcaagaaattggttagtggattttgtttatgggtgattatagtagagattgtgtaaagcccgcttagttaatttggaaattagcagttgttta

SEQ ID NO: 311098 - DNA, 915 bp, Cannabis indica
cataaaggtctatgatccgaggtgcttgtctgagaggatcaaaggatagctttaggaaataactggagccaagctccattgacaagacctttatcaatagcagatttcacatggcccgtgccattccggtggttatcccaggtcatcttatctccttgaatatgcatattagtaagtccccgggaatccacaagattagctatcacagggataaaagggtccctaccagacgccccatcgcgttcagagttgctaaggacaaaattggtatcgcccagaatcaaccaaggacccccaaacctatctccaaggttcatgaggtcacccagaactttttcttagcatgaaggtaaggagggccatacacacacacgagagaagccaagtgtgggtaggaggatctgaataaacaaggccgaaaatgtggttgcgggaacaagagatagtcttaaaactaaaacccagtttccaagctaaaataatacccccaacagtgccaataggaggaacattaacattaaaataaaaatggagagatttcagtatacgtaccagggaagtgggttccactttaagttcagtcagaaacacaaaatcaggagagcgtgctctaatcagggacttcagttcgcaaactgtagaggtctgccccaaccctctacaattccaagcaacacctctcatggctcctgtggagtagatatgacattctcctccacaggggtatgagagtgaacagacaagctggaactggaatcttcaatcacaaaagaaccaaccagagggttcctcataattccatcagagcagctaggggatccaaaactctcttcagttggttcttcataggccactttatcttccttttcttattccttagtatcccacgggaagtcacgaacaacatcagggtgc

SEQ ID NO: 311099 - DNA, 1124 bp, Cannabis indica
atgtccatatatataattaatgctcttactcaactgaactactgaatttccaatatacaagtatgagcttatttgacgggtatgtcggtaacgaagaaatcaaataacgttaataatacaattagcttaaagtttaatcatcttagcattaagataaattgatttatgatcaattaagcgatattgaatggaaaagatatgacggtaagttcatgatatcttttctattttggtttagactgatgtaaaacccatacatttgatccttgtttactttgctaatgccttagaaaagacattctacttagccaactgtactgataatcatatcagtgtaaatctagtgtactgataaatcgtgagacttaaatagtttgaaacatataataataataattttttactatggtgacaacactataattatgaataaccatatgttgacagagatttttggtaaaccaataaactacaataagtctaaagaaatataatataaataaagaatgagataagagtttttatgtggttcaaagattaacgacctctagtcggcaagtcaataatattataataagactggaaaagtcttttggatttgtgttttgccaagtgtttgaaccctataatttgctagagtactccaagaatgagattctaaccctttgcatgaatgagtttccttatatttatagtggtagggttctaatatgtaaaccttgtccaataatagggtaaatacatataataaattaactttgggcttatttggtgaaacccaacccatgagttattgatcttctgctaacatagatgccatataatgttgatagttatcaaaccatgtctacttttgtgaataataaagacacataaatgcttgattgataattactttgttatttctatctttagaagatatgattctctgacaagatcttgagaattaagtcctgatattgtgggatttaataattattgaatgcaatacatagctgaatatcaagatgtatattaactactcctccaaaatctcttctgttgggttttatgccctaagtaaaactcatttcaatataatccgatttacttattaatatagatcagaaataacatttaatgtt

SEQ ID NO: 311100 - DNA, 1464 bp, Cannabis indica
gtttgtgggatttcttcattttgtgatctcagagtgattctgaagcacatgtttggtcttagttttggggtttgaaagtttcctagagtttgttagttgaagagtgcttattagctgtgatcaacaaaacttgaattgcatggtgtagattttttaagctttcaagcgaatctgttcatgctttctaccgcattgtaagttctatcaagagtttgagtaaaatgagcatgttgagctgatagttgagctaaaatttcttagtgcatctgctatttcttctctagaacttgttgaaattttgggttttatttttctgtttttttcacatcaaagtttgcaatttgtctctcagtatcatacaagtgaacttcatgtctctattattgaacatttgtttatagtgaaagatgggaagatgagcattttgtatgtttgtattgttttctcaatcctatttatgtctaagatacttaccaatggcatgtgttttctttaaactatttcagttatttttttacatgttacggtttgctattaaaaagttgtttgatgcaattatgataaactagttatagaaaaaataaaagggccatttaattttgtgctagatctgaaacatggccactgaaagtgtagagattgatgatgcttgtttatggggatcaactatagaaaagatttttatagatatcatggttgatgaagtgaataaaaggaatatgaaaaatggtcaatttagctcaaagttatggaagaaatttcttgagaacttgcaatgcaaaagtaagcaaaattactcaatgaaacaagttaagcaaaagttcaatacgttacgtactaagtatcgcgagtttaatgagctacgaaaacacaccggatttggatgggatggtgcaacacagactgtggttgctccagatgaaatatgggagaattatttgagggtaagaattaatttagtcaattttttatttagaaattagtcttaaataaagttgataaaaatagttttcttttttattataggcacacccaaaggcggcaatctatcgcaagaaaggatgtgatcattatgtattgttggaactaatttttagtaagtctactgctagtggtaaattccatcggtctgctgctttaggtccaccaaacaccgatgatgaaaaagaaattgaaaatgactctgagcgcataggcctgaatgacattgatgatagtgctagttgtatgggcactcgacttgttgatgaagtttttagaagtgaaacaaaaacttctgtaacaagtacagagcgaaaagctaaaagacaaagatcagaacaaatgagtgctgcaattgctgcttggacggaagtagctaaagtaagagttgagacaactttagctaaagctggaaaaaacaaagatgcaattgaaggcaaaagtgaaaatgatgagtttgttggaaattattttacgaggatc

SEQ ID NO: 311101 - DNA, 1998 bp, Cannabis indica
caatgtttgcggcagtactggttttattttgctagacgaaatcattcttggctttccgaattgcacaagctaccatggcaagctcttctaattcccctgcttttcctctgccagccaacaccaaaagccagtagtaaaaatcgtcgtccagcacgttgccaatgtcgaccatggtcctactccagtaggctcgagcataagaacacccaatcaaagcatggaaaattgtttctttcgttatttggcagagaaggcagatgacactcacaacaacatgccttttaaccaactgtgcacaagtaggaagggaccccgaagtagccctccaaaggaagttacagaccttaagagggatttttaaactccataatttacgccagaaatcagtggcatgagaatcaaaccaggcccccttagtctcttacaactgtcgatatgcacttcgaatcgtatacctatcattagtctcaagcttccaagaccaatgatcagtccttgctgaatcactcaactgtatagagtagatgagattttgatctcgtacattaaaaagatcaataataatctctttgtcctaagttcttgaattcatctcaaataggtagcttacttctttgttataaagagtggtatgatttgaagtaacaaagggattgcaatcaaggagccacgaatccttcaaaatggagacagaagcacctattaatatcttcgaaaatactccgccaaacgaagcttggattatccttcaattcagatgaaagaaaagaactatgacatattgccaatatgggacacttccaaccacaatattgaagaactatccccgagcattttctttgtcttcattcaaaatgaggaaataagttcttttggggaagaaagggatcggcctggagcccaaaatagggacccatcacccatgttgacctaggtgttgggcctagcgcccaggttgacactttgtcaaccttggccacttttattagcagttcagatgaattattctgataatattctccgtttcatcaaaattaagatttgagtgagttcaggaaacaaactgggctatctagggatcaaaactgggacccaccaccaaggttgacctggtgttgggcacagcaactaagttgacacttcatcaacctaggccatttccaaggataattttttataagtcttctacgcatattatccatttttgtcaaatattaagatacaagtatttttgggaatcaaatagagtcatctagtgtccagaaactagacccaacgccctggttaacattttatcaacctggactatttctaatatgttgacctcaaaaattaatcaatcgacaatagggtcgtatagatttgatgtttgccacgtgttacacaattaaaattaaaaattaaagcacacatcgaatttttatagaggttcggccccctttgatagcgggtaatgacctacttcccttttagttgtattaataccgagggttaatactatccaaatcactataggtgggatctgatatagcacccttaacgatacaaagtagaaatcaaggttggcaaatctcaagtgatgagaaagatatgggcgtgtgagagagaatgaggaagagagttatcagacttaggcttaaaccttagaggctagcatcagacttaatgacttaggcttcctaggttagagttaaggtctttatataggaagtctaaaccctcgtttacaacttgaaaccctagaatttatatattaaattagttcattacaaaagaccaaaatgcccttgaacatagatattattcaattgttttattggcttttagggcccaattcacagcaaatgtacatattcgaccagtcttcagtacctttaaaactatggtcgctttgataccaggttgtaactgttggaaatatttgaccaggatctagatttactaataagtatgtttcattaacatcctaatatgaattcttaaacaatgaaataaaca

SEQ ID NO: 311102 - DNA, 2403 bp, Cannabis indica
tcttggatggttgagcattcttggttttagccattgatatttaaaaccctaaaaaaaatctctcttgaactaaaaagatcaattttagaacgaaaagaaagagagaagtggctagatagaggagattatggtaatgtggggtgaagagattagatatatatatatatatatagcaataggaaataaagactcaaaaattaaaataagaaataatggaaactttaccatcttaccttgagcaccacctgtgccttaaaaaaggaaacacaaagattttccaaatttttttcaaaggttaccaaaaataaaaagagaaataaaaactcaaccccacaaaattaaaaaaagaaaaatgcacttacccaaaaactttgccttatacaaaaaatgtcatgaaaaaggaaatcaacaataataatttaattaaaagcacatgattcctaaacccacacaaggagaataaatgtaaatctccacaaaatcataaattaaagaaagaaatcttaccatccaaagacgaaacaaaaaaaaagataaaaagaaacagaaaatatgtaataaaaatatgtttccataaaacaaatgaaataataaaagaaaaaaaacttctcaaaaataacaaaatccacaaaaatatgcctccttttttcttgaatttttcaatggatgccccttttttaaaaaaatcgaataaaaaaatgagaagaaaaataacttacaaacacatataacatcaaacaacacttttttgagcaaaaaaatgactatgaaaataataaaactaaacaaaaaaatatagttatttttaagaaaactcattacaatcggtcacctttttttatataataaacatgtgcaaaataaaaataaaccttgattttatttccaacaaagagaacaccatgcttgctttgtctttgttcctaataaaaaaatcaaaccaaaagaatgaacaaaaattattttatcaagctaatgaactagtgcaacaagatcatacaagttgtgcgagaaaaggatttagctcagtcaccaaaaatattttaagcgattcaaatagtatgtaacaactttataagaccattttctaatgtaaatattttcttttaaactgtgtcaagcatatgtatatgaaagtgaaagcatggaacattgcccaaattgtcaaaaagactttttctgagtaaatgtaaccaatggaggcgctattacactacctcaatgctaaccctttttaatgacagcatatcctctacatagctcctaattacatagtaccaatttactcaaagacattttttacacattgagataggtagctctattcttccaatggagttgaaaatggtagcttatataacattgtttaaagaactcaaatattcctagcgggagtgaaaaacttttcctgaactaaacctatatgaaatcatgacactaaaagcattagcaataaaaacaatgatgtaattctcttaagtttaagattttcttatggaacaaaaacaaagataaatcattatgaccattgagtcaaagcaaaaattcaaggaccgttaagcacacaaaaattagacagtccaaatccctaaggatttccttagagagataaaatgaactgagtcaagagctttagtaaaaatatttgttatttattttctagtttcaatatattctaagaagaattttatttttcacaagctctctaataaaatgatgtcatatgtcaatgtgcttagtgcgagaatgttgaaaacgatgttttaaaatatttatagcactagtattatcacaaaaaattgttaaagtttttaaatcaaatccataatcttccatcacttgtttcatccataacagttgggttcaataactacccgctgcaatgtactcagtctctgcagcagacaaagagattgagttttacttcttactgtgccatgaaacgagaatgtttccaagatagaaacaactaccactagtgcttttcctatcatctacattacctgcccaatcaacatcactaaaacaagctagattagaataagtgtccttagaaaatcaaattccaaaaattacaatattatttacatagcaaataattcatttcatagcaaaaatatgagatttcataggattttctagatagtgggcacacacacagacattataactaatatcaagatgactagcagtaggataaagtaaactaccaatcatactacgatacaaagtaggatctatctttacaccttgttcatctttagataatttcaagactgtgctcatagaagtattaatcattgtaggatttttgaccaaactgacctacaccaacaaaacacttaatatcagtatacaaggtcaaaaccgacctttcctatgtctaatttaagtttagacaaa

SEQ ID NO: 311103 - DNA, 971 bp, Cannabis indica
ttttgagttgtattttgacattggtctttttattgaagcacttataaatttccaacactcactatttctctaaaataaaacaatttttcttcatcactcattatttagaagcaattaatccaggccaccctaatgaatccaatcacagtaactactataagatatacctaatgtttcaacattatatgtcacactttttaagtcgtggagaaaaaatcgtagctagagtatttgtttcaaaatttaggtgattcatgttttacctgaagatacaaatggcgtaaaaaaaagtgttggatattatagaggttccctacctattgtgccaagaaattagtaaatcaacacaactagaaaaactacaattattaataacaccttttttaaactaaccaaaattaacctgcagtgttaccaaaatagtaatataaggcaacatttataccatatgttactaattaattagacaacattttcattaaaaacattaccaattaatttatgaaagtttacaataatataagtttttttttcttgcatgtaattgacaataattaacatactactattactaacgtctcacgttaatcaaatctgatgcatctgacgttttttcatagtttcttgctttttttatttttcttttattttttagcgattttaagtaactttttggttactaaaaatgttgataagaaactaactagttatatttttatgaaaaacttcattttttatcatataatttaatatacattttcggttacctctaaaatttatgtatagatcttaagcgataattgcggcaaaagtccccaaaaacttagggttgatgcagattaattcccaacctcaaaaattggtagtaatagtccccaaggtcacattttctgtaagtctgttggtccctaacttaactgatccgttaaatacaaataaaatgccacatgtcaatttttaattggtttaaa

SEQ ID NO: 311104 - DNA, 701 bp, Cannabis indica
actcaattttttctaattttacaataggtaatacccattaaaagtatatagagtattttagactcgatggtgctctctatcatgttttatatctgttatatatttattttcatatgatgttgtgcatattgtagttatgtatgacttttgttataggaaaatttcattttttattcttaattaaaaatacacctcataataaaatttggaatcccacctaatttatgccaaataatatctttgattatatttttggacctttttacccttgtttaattaaaaatagatacaaaatttgaacctcactccctttttctccccctctcgtctctccctctctcatacttttctctctatctacatcatctctctctctggtagatagtcgaaccacaccctaatctcaagaatcattcactattataatgggtaagttttttcttaacaatttcttaaacatttagaatagtatgtagtttattccgctatatgtgtgtagtgtttgtttgaaaagccaagatctgactttctagcaattgctaggttttttacgttttatcgatggtttattaatactatgctgatgttgtgaaaaattgtatacgcaagtgcacgcaatcgtaacaagtaataaagtgataaatcgagtattgtctccacagggattgaaaattgaaaattaatttataaaactaattact

SEQ ID NO: 311105 - DNA, 1037 bp, Cannabis indica
ttttttttttttttttgttggagtatgattgtacctaatcttaacaattaggttacttacatatcctttaaaataaatcaaatcgaacgtagtttcaacattttgaatcttgtattctttagagacattgagtttgtttagaaaagaaacctcatatttaatttcacttgaatgaatttaaaaaccatttgagttacaattttattttgatgagcattgtgaaataaaattcaaaacaactttacagtttgtgttgaaagaaatatgaattttatagcttagaattggacccaaattcatgaaaataactgatatattattgacttcagtgccacgagtgtatacatgaaagatttttttttgagtagtaattgtaactacacaaaacagggaaaattggtacaaagttacaattacaacagagaaaaaggaggtaagctctccaaactaactacttatcttgtcataatatatatctctagcaatattatgtgctgaaacattgagattcctaaaaatatggtacaaagatacattaagaaaagtaaataaagagtcgataatctttgagatgaaccctaaagccgttgaaagatatttccatttgtgcttgatcttcaatgccagctagaggcaatctgtctctatgtgtatgattgtcatcttgattaaagagcaccatctgagaacgtaaaacaaggcatgtgcttcgacgtaaagaggtgaggcagaacccaccatgagagatgaaaaacctgctatcatgtttccttcctaatcagtaacaaaacaatcgctcctaaccctgtacactgccttcggttgtctaaggcaacatccacatttcaatttatattgtcctggaagtattagaggaccatttgtagtgtttctcagagggagaattgtatggtgtgtctaactttgttttgcaggtacatttctgttaaaaatattttgattatctaaattgccaaatggggagattgtaaagtcttttttttttttggcaatttaggtgtcaaaatattttttat

SEQ ID NO: 311106 - DNA, 2043 bp, Cannabis indica
acatgtcaatcaatatccaattcgcacttgaattttgaattttctaatccaatctaattcgcacaagtgcagatatccgcactttgcggattggattgtacatattaaatttgatcagctattttatgaatacctctactaagaaggccttgaattgctgttggagcgactcttgcaattgcagttgaagctgaatagccatttgttttttgcatggaatcatggagtaaaatttgaaacctcattcttcaaatctgatttcaatgcttcaaaatttgataagattattgtttttttttttttttgaaatctgataagatattgttatagagtaaaattatatatccaattttgaagaaagaggtaagcattcctccaaatgatgaaataaaagaataatctagctttcgagagagttattctcttccaccagagtctattctcttctatttccaaacttccttagaaatgaattcctcccctttattcataggtactagataacataaaacagtgtcagctaggtgtactaaaaactaagacatagccctttaaaataaaaaccagctagaaaaaaaaaaaaaaaaagtcctctaacctagcttaggtgtccttttgttatatcaccatgtttgtgtgtatgagtgaatgtatagtttaaacttcatgcacatataaataagctgtcattgtacatacatcatcttgatttatatacagatagaatagatgagtaaggtttcatgtccatagtagatagtacaattgcattagttaaacgatgaagctaatataacagttaagggttttccccatagatacaaattaagcaaatgtaaaatgagttggaagagcttcttcgtctaagctgcctcagcaaatccaactctcattttcccataatcgaacactgtgtggtagcgacccataaatacatctcccaaaatcctacaatattatatgcagaagcaccagtatcagtaatttactaagaaatgaatagaattcatggctctgatgatttgatccttttagttacttaaatgaagctccttaatggtgttattctaattatattttatggtaaaaacatgacacaaagataagaatatggtaatagaaagaggtaagattttaattaccagagaggtccacgaggaggagccacatccaacgcaatgaatccgctaaggcattgagctgcggaaccctctcccactttgagaatgtactgatggcaacaaacaccaaaatttataagcagctaatagcagctcggaactcactaaagagagtgaactgaaatcttttttcataatcaagcttgctaattgggacttttaaagtttaaaatgaccaaactgaagaagtctgctatacctgctctggagcaaggtcaaataatttaccaccgatggtgaatgaaacacttggcatggatgataagctgctgcaatcaacagctgactcgccatttggactgggcagccgttcacagagctgtgattttaaacatttgagggcatgattagcttgcatcaattcattattatcatgcatgtattgatgagtaagagacaacaaatatttacctcattaacgtagttcaatatctgctcttcagtcatattacggtttagctgattttgaatccatactactgccatctcacaagcagtacatggtgcaccatgaagactgctatcgtgtttccttcccaatttctcattaatcacactttcaattccaaagctgtaaatatacatggaaacaattaaattagaagatagatacagcaatcatttgaaataaagttaaatgaacttttcctagaacagccagatgtactttcatctcacctaacacctcgagttccgtcaaaagcacagagaccaatttgagagcatatttttttaggttgtgtctgtagatcaagccaggaagaagaagaggaaaacatcggatgatttactataggagacttaaaatgggttgtatgaaacgaaaatataaaaagcaacattatgtaccttagcaatcagc

SEQ ID NO: 311107 - DNA, 410 bp, Cannabis indica
aaaccgtttagaatgagtgtgttcgttcctcgtccatacgagactccttcactgcagtcgacaccacacgatgggaaagtttcctaccagccaacagttagatcgtcatgatatagtgacagcccttgtagcatgctaggtacaaaatccatggtgggtaaagagaatacccttgcccacatttaagcctataaatacccttatttttcatgtacaaagggtgagaaaattggtattagccgaacccctgctgaaattcccacaagtttttttctttcatcaagagaaacgagatgagtgcagagctagggtttatattataaacacttgtattatccaaacacttacccaaagggccaacacaactgactcatggattacggatcattaatgcccaaactacgtaaaaa

SEQ ID NO: 311108 - DNA, 3463 bp, Cannabis indica
ataacaaaaactcaactatgctttctacaaagactatacttgccataaatttacaaagttgaaaaccaattagtatctactgaattgacatttttaagccaaatgcatgtaattcttctcttcacatcttctttgataactcgaactacatgctccactttctactttgctgaattcaaaagtaagtcattttggttcctccaaatctggtatataagagcagcaattacagcagccaatactgctttcttgaacctgcttagcttggctcgtttgatccatctcagcagtttgcatgaagatgtcaattctactgtccagccgatccattcctttacttgtattaagtaaagtaaagagaaagagtaggagaaaaatagatgatcagatgtctctatttggtttcggcagaacaggaagaaatattctccgatgatgttgagttttgcaacctctctctagttctgagtctatcttgaatggaaatctacaaacaaaagctatgtcgtggaatattaaggctatgccatacttcttggctccaattcacttttctttgagtaggatatagagccttatatccattggagatcttatattgcatacttgtaaactgctgaatatccatacaaactctaacttgatttttgacagcaaccagttttttccaatatcagctagcttggggtgggacttggtagctccaccagttctctcccttgatatagatacagtgaatccatctaatccacatgttatcttctttgtttgcaattgcccaaacatactttgtcatcgctgctatattccattctaagcttcttttcaaatcgatttcccctactacctttggttggaaaaccttgttccaagcaattggtccagaaccaagggacaaatattgacctttccaaagataagcacatcatatggcttcaacatctctaatagtcttctttggtaagaccattactcgactccaagaagagtgtatggatagaaaaatcgaattaacaaacactgctctacctgctaatgataaattccttgaacaccatgttttaattctagctgttattttatcaactaaaataatgcattctttgccaaaaatacgcttagcacaaatagggatacctaagtatttgaaaggtacctctttcttgctaaagccagagttgtcgatgatgcgttgaatttcatgatcttccataccacaacagtgattggaaatttagtgggttggttgcagacccgaagagcaggagaaaagccttatccttgtagaacatagtatatactcttgaagtcaccatgacagaagagtataacatcgtttgcaaacatcaagtgattcaatttgagctcctcacacctgtcatgaaatttaaaatgtggtttggcaccaattctcaacattattcttgatagatactccataccaagaacaaagagtaatggtgacatgggctctccttgacgtaacccccttttcccctcgagatatccatgaagagatccactgaacataagagagaatttaggagtacgaacacatatcattactagcttaacaaacttatcaagtaactgaaaaagcttgaagtttttcttccaagaaatcccaatcgagtgtatcataagctttctataaatcaatcttgatcatgcacactgctttggtgttttccttccatagtgcctaatcagatcttgacagaacattatgttgtgtgcaataaacctgccagtaatgaacccccctgattttgagccaccaaatcaggtaagatagcttttagcctagagtagattagttttgttgtagtcttatagattacattacagcacgcaataagtctaaagtcaataaccgtattaggacacttacatttgagaataagtgttaatacagtagtattgatttctttgagaatttgacctgagtgcaagaaagaaagaacaacttcactaatgtcatctccaattaaatcctaattttcttggaaaagacaactggtatagccatcgagccctggtgccttgatccctagaatttcaaaaattactttcttgacttcatcctttgaaaacttcctcaatagtgattcagcttatgatttggagactaaaaggcgcttgtttcgtgacaccatcaataactttcctcctattttccattttagtactaagcagctggtgataaaataaagaaaggcatcaataatctttactagttcatcagttctttctccatgatgatctttgctggcatgaaaaattgttgtattttcgtctccatctttatccaactgagcttagatttctattgcaaaaatgaagtcagacccttgagaagatgcccatacttgtgtctagcagccacttctttgtcgattaattcatggttcagaggctctgtttgtaatttcttttggagatctttcagttcttctcttgctttttcagtcacttcttgtatgtttaagaaatccttcttatttaattctttgaaagctactctaagtttcttcaattttaaaataacctgatacattttggaaccagagattatttgttgccagactcctttcactatctctgcatacctcgaatgggaagtccacattctaaaataattgaatggtttttttccactaagtatttcatggtacatagagacaatagtaggcgtatggccaaataacccctcagctgaaaaaatggcttcagcatttgggaaattatctaaccatttctggttggcaagaactctatcaatctttgagcaaattctgtcacttccttgtcttttgttgttccaagtatagtagctaccaccaaactttatgtcttttaattggcatatccccacacaatctatgaagtcgtttgctgcattatacttcaccctcttgcccattctttcttctttgaacaaaatttcattgaaatcacccataaccatccatggttcatgagtagcaatgttctttaaatctgaccacaacatcttcctccctttcaacttgttgaaggcataaacaaatgtaacataaaacctatgcttaccatctaaagttgcaactaaaagatgaataagctgactggtacaattgagtatgttcaccgagtaactgaaaggattccatgccacaattatacgccctccttcatgccaagcaatattcgaagtgaagcaccaccccttgagcatattaatatataaggccccaagtttctgggccttaactctcgtctcgaggagaccaacaagaccagccttatgaacatttaacatgttcttaacttgattttgcttgtaatggtcgttgatccctcagacgttctaactaattatcgtatccatctccaagaggaggttctcctcctcctcttattttttctgttataggaactctgttgaaatcgattatgagtgtcctgttgggttttatgccct

SEQ ID NO: 311109 - DNA, 629 bp, Cannabis indica
agagtagaattcccaacacacacaccatcatataacaacttctcaaacactttcatgtgttcaactttcaaagcaatagcaacaaataagttaccattattaattgggcctggaggtaaaatgtaagctttaccctctaaacgaagcccaacaggggtcacataaaagggccgaccccatccaaaatcagaatcatacattggcagcccaatccaacaaactatcccaaaatttgggctttcgtaaacatcagccccacgaccaggcccatgaatgagattgggcctaagctccaagtaatcaatagccgatctcaagtaactattatccattttaaccaaagtttgacgaatcttactagcaccataatttattgggttatttacaagatcaccaatggtaacaacagttgaagttgcatataaaacattagcaaataaatgaggttggagtggtgggtccaatttagtcctaccattaattagagtgaacaatttagtaacttggttacttggaagtgaccttgctttagatgcacatctccaaatatgagttgatagaatctcaaatgtgctatagttattggtaccattttgttgagatttggctttgagaatcttgatttggtc

SEQ ID NO: 311110 - DNA, 1182 bp, Cannabis indica
aatagagttttatttagggcacaaattccaacaactagcacgtcaactcattcaggaagtacaaaaacctgaggaaataggaaacccaacggggccttcaaagtgttcccgggctattctagaacaagctctctgcacttggagagagacctagccagtgcgcaaaagaaggcttcgtcatgtggagttgggcccatatcgtgatgggagcacacttgcccctgaggtgctattttgcttaatatgtgccttggctggagtagcgccctttcagattatcccccaagtatattgccttctagcgatatggtatgttttttgtgttaaacaaggcaaccctatgccaatgccgaaagaaatcttgtacttctaccagatcaaatcccaaccaatgaggggtcacaaggacaaggtcggcttctatcggttgtaaagatacaacacaagtgtcccttgcccaactagtcacacacagcctgcgcaagacttccgggattattacttcttcgcctccggcttcctcttgaggagggttcccaccctcagtttggacttcaatcttgcaagtaagttttgactgtaattttgactcacaaaaccatgttttcccttcatactcattatactgatttgccactattttcagtatgctagactgccttcctcagtccacctagactccgaagctggaagaaagagttaagttctacaaatccttcgcgccccaagaattgcaagttgaaagcctggtgtgttgggaatattttatcaggatctagatttactaacaagtatattgattaacatcctaaatatgaatatctctaaattaatgaaaataaacacataagggtttaataaaaccttacattggttacagcagaatataatgactccttccgttcagatgtctagccattgattcctttatgtcgcaatgcattattaagatctgaacctggatctcttttcctcctttgggtttggttactacgtcttactcactatggttgagtacttgacttgctatgtgtgggcatggcactctttcactaagggttccaatatggtgaagaacaatgaaggaggttgaaatcactctagaaggaactctctcatctactagttgtctgacatagaaaactagatttaagtttggttgaaaagtcaagttgacaaagt

SEQ ID NO: 311111 - DNA, 1353 bp, Cannabis indica
tagttctctgtacaactacaagcacaaccttatatatgaataatgaattttttgatatttaatataaatgattcaataataatattaataatttaatattcaatgtatatgtcaaaatattcaactctttattaataattaaaaatatctttatagatttttcaggacataaactccaatatcgacaataatcaatgcataaagaaaaacttcatttgcatccccagatgaatttaatctagtcccacatgcgaatgactgacccaacgataggaaagataccccacgggaacgaccgccacaaatgaaaagccaaattacacaagagatgaaaagatactccatagattcttcctcacccccacaaataggggaaatcacatcattaatatggaatctcttattaagcacaacttgaattgggaggccattagaaaggatgcaccaccaaatgatcttatgacgctctaagatttttactattccaaagcttgttctagagggagggggcgaccttacagtgaggagcccattacaaagcttggataagatatgttcacgagaagcgtccattactttccttggtccaaagccacttatccttaccctgactagaaggtctgccccttttaaaaatggcaataatagtttcattgtcaaacaagcagttcaacttcttagtatcacaatcaccataatatgtcagaagatcaaccacttggtcaaacccaaaagcattagatttattagactttggataaaactctttactatgagaaacccaaagatcatcccaaatactagtatccttaccatttaccactactattttaccatcacttttttttaagatggctttggctttcaccatattttttaaaactaaaaatctgagtctttgtacttgcagttaaagaaatcctttcctttcaagtacttagcttccaaaattcgataacaaagaggctggctaccaatcaacaagttccacccccactattagcaaataataataagagcaatttgcggcgaaacccccttatgttttaatttttatacacttaacccccttatcttttttttggtggcaaaacccccttatgttttaatttttatacacttaacccccttatctttttttttggtggcaaaacccccttatgttttaatttttatacacttaacccctctatcttttgttttggtggcaaaacccttaagtttacttttctttgcaaatttaaagttttagttaaatattaccgttaaatactaatcggattactactgtatcgacttcgaggttttaccgttacatatacaaaggtgtatacagtggtcatccagttgata

SEQ ID NO: 311112 - DNA, 719 bp, Cannabis indica
gtggtatttttttacttttttactgtgtttttttataagtttcatactacagtatactttgttaagttttcactggtgttctactggtgttttttagttgttctactgttgttttgagttgttctgttttgtgttttactggtgttttataaaaacacagtatttttgaaaacttttccgtgcgacagtatttttgtaaatttcccatttactttctccatttttaattagaccaatcttatttatcaaataaataaattcaataattacttaattaattttataaaattagcttatatgaagtctctctatattttattcccatatttactatttcataaataataaatttctcattattaatttttcaaataataatttttgaaataatactgtattatttcttgagattaaaattaattatcttactaattcaactcaataaattaatttattaattataaaattcaccaactaaaatctcatagttgcactatcaaaacataccgtctatatattatttaaaaacaactaagtacatgtattttcaatgaaattatgattttccactaaatattctttggatatctttgtttattaaccttttcaagattacaattaggtatcgtgaaaacatcacaaaacatcgagatatattggaagaaaaaaatgttagaaaaattaataataaaccctagatcaatttgtatataacatag

SEQ ID NO: 311113 - DNA, 632 bp, Cannabis indica
taattaaatatataatttattttttatatataatttaaaatattttagataaccgtcgtaatgcgcaagatatttacttttaatattattaataatagttattaattaaaaaattaatgtaaataatactaatataatatatttatatataagtatatgtgctgagaaaaaatgttccaaaggtgtgacacaaccttaattgaggtatcccatttttgtaatggtatttattgttagggaaatttcattatttgtccttaataatataacccatatcaaaatttatacccttttataatttgttcaaattgattccactaattttaaaagattcctaaaatacccctaaattaaactttccctctctctcgttccctctctctctcagacgttccctctctctctgtcctcctccacgcaatcctcacgagtcgaactagtcgaccctccctcttcaccaaccttcgccaccaccaatctccagccgacctcactcctcacgaacccatgaacccacgaaccggtctcaccccacgaacccacgaacccacgaaaccaaaggcgaccgacgacgacgaagaggacgaagagaaccacgttgatccacgacgacccacggcgacccacgacca

SEQ ID NO: 311114 - DNA, 668 bp, Cannabis indica
attaaacgagtaacaaaagcatttaacatatttaatataaattaagtcaaatttaaataaattttaatagtgggatcttcgttcatttagataccaactagtggtttcttatcttttgtatttgcattgcatgtctccttgagaagcgactctaaagcctgccacgaagacccaccttcctccacagccttatgccccataactgcaacttcctcagccttcttcctcacctctttccccatctcaccctccattaattccttcaccattttactcacctcctcactcttcacaaccccattcaatgatccatcccaactctcaactctcaacccaaccttaatctcttccaccaccattttcgcatttaaaggctgctctgccgccaacggccaagctagaatcggcactccggaacttatactctctatcacagagttccaaccacaatgactcaaaaaccctttaacgcttttgtggttcaatatctgcatttggtcaacccaacctctcaccaccattcctctgttttttactctgttttcgaacccttcaaagaacttgtactcctcactgggctctgccatttcagcttgtgatttccgtagcacccataagaaatttacgtttgaatcttccaacccttttgcgatttctctaagttgttc

SEQ ID NO: 311115 - DNA, 961 bp, Cannabis indica
tcccaaagatcgtacgcaccaagtctaactgccccgacatgtacaattcactgtgtaagttatctttgtcggcaaaaagtgtgttgattttgtgaaactatctactataaccaagaccaaatcatacattctcgtggttgtaggtaaaccaaccacgatgtccattgtaaaatcttcccactttcactcaaaagtgttaatggctattgtaactctttcagtttctaatgctcggctttaatttattaacaagtcaagcacttggacacatagtcaaccagatctttctttattttgcaccaccagtagtagggtttcaaatcttagtacattttagtggtacccgggtgcaataaataaggtgcaatatgaacttcatccaatacttctttcctgagctcatcactactctaacacaaacccaagttttaaaaagtaacattccattgttagagattgagaagtccttatcctgaccagctaatacctcttctcgaatcttgattaactcagaatcttccaactatgcacctctaattctttcgaataagtttgactgaagcattaggttataaagtttacaaactataaattgaatacaagccttaaccatccttgctaatagttgaggatagatcattatggtacgaaaaatctatcagggaccttttttgctcaaagcgtctaccacaacattagctttctcggggtgatacaaaatctcacagtcataatctttgactaactccaatcaccgtctttttctcatgtttaaaaccttctaagtaaagaagtacttgaaactcttgtggtcagtatagatctcacacttctctccgtacaagtaatgccaccaaatttttagggcaaacacaacaacaacttctaattcatgtgtcagttattattgctcttactcctccaatgaatgggaggcataaactgttggaattattttacc

SEQ ID NO: 311116 - DNA, 1884 bp, Cannabis indica
acgatcgcccccaccgtctcgtatgaggtcgtcgtatcgttgaaagttccgcgggacttcgtagacccgcggcggagagaaccctggcggggtttggtgcgagatagtaatgatgatatggtctttcgtttcggaaaacaaggtagatgaaaacactatggtggatgtgatgaataggtgggttttggtaactcgtgctgtattccagcagttggcgttgctgggggcttttgtgtgttctggaggatgggtgttgtttgtgtaatcacagaagtttttgatgctggtttttgcgtaaggatgcagccccctggggatgtatatccttggtgcctcttttgtatatacggtactccgtatcaggctatgaacaactcttactgggaatggcttacaagtaaggttatttgttgtaattcttcatgggtcgtcattggggatcttaatgtcattttagacacttcagaaaaggaggggtgcaaacatttcaatagtaaagaaggggagcttattcaggactttctctttgatactcggggagtagatttggggtgtgaaggaggtttcgctacttggcaaaattcaagaaatttccatggtcgaattcgtaagcgcctggatagggtcattgcggatgcgaattggtgtactgatttccaaaaagccagggtagttaagttcccaattttgggatcagatcatgccctgatttgccttcagaccacgggtgaggcacccaagctcagatacccctttcgctttttggaagtctggacttctcggcctgactgtgagactgtcatcaagaatgcgtgaaggagaggtggttatggtagtccggattttcagtttttggggaaacttaagggggttaagtatgatttaaaaaagtggaaccaggaggtgtttggcttcagtgacagaagactagtggctctaaggcgacaattggctgagattcagaaggattcgatctctcatgctagtgtacaaagggaatcagaggtgcaattggaaatcatagaaatggaggaaagaatggacagaatatggaggcagaaatctcgagagaattggatacgatttggtgacgctaactcaaagttcttccacacctccactattatcaggcgtaggcgaaatttcattggttacgtggaggactctcatggggtttggttgagtgatcgtgaggcgatacgaaactatttcaatcaccatttcagagacatctttgagttgacaggaagcaccattgataatgagttttctatgttgtttgaggataaggtcacggatgctgaaaacgattacattggtagaattcctaattcaaaggagattaaagatattgtctttaagatgcatcctctcaaggcgcctggtccggatggcttcccaagaattttttatcgaaaatattggcatacagttggtccccaactttgtgagatggtcaagggcttctttgaatcaggggtcctgaacaagaagctaaatcactcgtacatctgtctcatcccgaagaacccaaatgcttcaaggtttgatcactatcgccctataagtttgtgcaacttctgctataaagtcatatcgcgcatattaacggactgaatgaaaggtgttctagatcgtttgatatcgccccttcaatcgtctttcatgccggggtgatggattgctgaagcttcaatcctagctcaagaagtcctacatgctattaaatccaagaaaggaaggtgggggccattgctatcaaaacggatatgagtaaggcttatgatcgccaagaatgggatttcattcggcatgttcttcaagcaaacagtttcagtactaaagtgtgtaatttgattatgcaatgtatcacaacggttagtt

SEQ ID NO: 311117 - DNA, 1349 bp, Cannabis indica
taatccgaccaaactgacaaaattatttggcaggttgaattttttctaatttttagttgggcagattacaattaaatatttacaatctgatatttatatggggttggtaaaactatactataaggcgatatttttttctctaataaataagtattttaactcaagaattgttgagctatttgtttagttaaatgtagctacaaactattcatgagtcaaatattttatattatttgtataccttgttgttttgtcttttctttacaaaaattaatattttaatttattatttttcataatatttaattaataaaaaaaatttaaagatataatacttaaataatttttaaaaaaaataaagaaaatctaatttttggagcaatgtaaatgtgtgagttgaggtaaaatataaaaaataatttttttataaagtattttaaaagatgtagtagagtagagtaactattgagaatgctttaaggactttaaggtgcttaaaaccaaaaaaaaaaaataatacacaaattattattaatgtattttaatatcaaatttcacaatttaatataataaataatttttagaactgctgagtaaagtattacaatgttgagcacgtcaaataataatatgctcttatttcattcacgtggcattgtagtggtttatgtgtgtgtgtttttgtttttgttaatttttctattgcttttttttttaatctttctttctcgagtggatagtatacttactacttgtagtgtatattgttttgaaataccaaaaaaaaattctttttttacgtataactaacaaaataaatttgactttttaaagttaagaatatactcacacatgatttcatacgatatataaaataaaataagatctatagacctacactctttctctaatacaatttaatgacataatttaagtctaatattatatcatgaaaaaagaaaaattgtgttagatcatgtgttttttttcaatcaaaataactgtgttcaaaagtaagataaatcatgaccgaatttgatcttaaaaatagtaaaacaaagttaggtgatgatgtacattttcagacaatcacacccctacaaaataatcgtaaatattatgcatgtattctgcaaagttgaatatggcataaaatatgtctttttaaaaaaaaaaagccatgaacctcccaacccaactacttttaccaatttaccgttaagggtaattttgtattttatatgacttaaataaattaaaaattttattattataaccaaaacttaaccaataaaaactatttactttttttacaaaacccaaaactacccctcacaattctctctctc

SEQ ID NO: 311118 - DNA, 569 bp, Cannabis indica
tcgtgcgattggatttgatcggctattttatgaacaccgctagtagtaaccttcacttccctatactcagaaataaaattagcacaccactcaaccatgtcaacagcccttggaggagtatcaccatgttttatattatttcggatatacaacatatgccaagagagaactaaaaaatattcaaactcttatgtgttccataccttagccaaccgcatcaaaaaaggcaagacatcctccttcccatgccgctttacctgctaccttagacttacatccctaaatcacatgaaacacattctccctagctcctgtagagcacctcgaacaaataggatcaatatgaacacctttagcgaaaagaccagggggtgttcattggatcacatccaatgaatttggacccatccgatccaatccaattatttattggatattagatttcgccatccgatccaatccaattgaattgaatcatccgatccgatccgatccaatggatgtattggattggatcggttccatccattggatgttttaactggctttttattggattggattggatc

SEQ ID NO: 311119 - DNA, 960 bp, Cannabis indica
ggtcaactcgaaaaattaaaaaactttattttgttcaggcggatcgagttcaacccggtacacttttgggcgggtttgtgggtcggttggtcaccgagtttcgggctgaacccgaacccgcccgccaacccgaccacttttttttatttttttaatttttaataaataatttttattacatatataatttattaaaaattaaaaaaatttaaaatctaatcattttttttgaacaagaaaggaaagttctttattcaaaacaggcaaatgattacaaagtaaacgaaggaaagcagccaaccaaaacgagcagcagtcgcattctattaccaactttccattacattgataatatagttgaacaggggttcatttctcctactgttacagtttaagaatctcagctttacagtcgacttgacctctttactaacaattttacctagcttacattttagctcaaacacacaactatttcggtttgtccaaacagcatacaaggttgctaaaacaatcacattcaacacctgctccctaacattgtttgaaggcctagacaaccactttctgatgttgtttggccagctaaaataaccacaccaggacataatctctttgatgattttttgagtgaggcagcaactataaaataaatgactatgtgtttctctctcagtaccacaaacaggacaattctcattgggaatttcaatgaatatgcttatattatctctgttagcagttgttcattcactaattgccaaccaataaacctgtgttttggcaatatcaatctattccatatgttctttgcatactcaacagtcggtacttgaacaaaagaaacataaaacagtttagagtggaatttacccctcctcaccgccgccttgacatcatcttcacctattattgagcagagccggagaagctttttaaaataccaactagcatcttgct

SEQ ID NO: 311120 - DNA, 3269 bp, Cannabis indica
gtaaaataatttccaacaagacattctttgtaattgtgatttttttttttttgtagtcggttcgatagtgtccgatataagttcgataggaggttctgaaattaaagtttttgaggttgatggtgaaggtccgatagtggtccaatatagattcgatgatggtttgatgcttactaactgattggtggatgtatttcgtgtccgatggtggtctgatggggtcaagacgtactgagtctgatattggactggactcagtacgtccaaatcccatcggacaatgttgccaatctgttaccaaacattgacaaccatcaaccctatatcggacccccatcagacacgaaaagcctaccaatctgatattaagcatcgaacctacatcagaccactatcggaccttctccgtcaaccttaaaaacttaattttggaacctactattgaacatattgggcctttattggacaccatcggaccgactcagaaaaaatagaaaaattacaaagaatgtcatattggtgttggctcgtggtctgtgtttgtggtatatgttcgtggtttttcgtttgtggtctatgttcatggtggtggtctctccttttgtggttaaggagggagattggcgtaggctcagaaggattaaatggagttaaaagggtcagtccgatttgttttttagtgggtcgagtggtcttggatggtagcagtagtcttggatggcgacggtggtcttggatggtggcaatggtcgtggcggttcagttctcttgaagagaacgagcgagaatggaggaaaagagagacaagagtgagttgaaaaaatgggcggggtaattttgggtttaataaaaaattaacctaatctaacaatgttgatacactaatatttagaggataaattttgaccaaataaatagatataaagttaaattttcctttcaggttgagacaacggaagacttgagaaggagagagagaagttagagtgagaaagtgagagatatctaagaaatagtgagttgagattggaaatttgtattaagcaacattggtaaaacattgataattttattgactcgggttaataagttagtgagtgttgagagtttacactatggaagatgttgactcaaaaatctgtcaacgatgcggagtcaaaaatacgataatatattggctcgggttaattttaaagggttaacgcagatttttattaactaaatgtataaactttttttcgtaataaatatactacgaaattaattgaaataaatgaacactatatattttttacgtaattttgtagttaaaatttacatactttatgagtccgtcttattatagatgatattcatgataccaagtagaattatctcaatgaatataatatatatagttttttctctcaaatttaccgtccattttaccctgaattctatccttatttataagtgtatagggtgacaattattttccttgggatctaatcattcataactgctcatgaaacgtggacattctccacgttttatttttatgcacgggataatatttaataactacccaactgctcttttgtctttattcttatacaattatgctgattgtgcacgttattccttgctaaatacaagttgtccttaattactatttttgtaggaaaaatgctaagtatagatataatgctcctcgcaatcttcttttatcatgattgcattaacgaggtggttacttctacttatagaagacgagatggatgaatatagttattctctccatgtacacatatgtggactaattaatcgcaagctcttattcccaagtatgtgggtcaatgagctgcaagctcttagttatttcgccttaaacacttctattatgtactcagtctatctcgacatggacttattatctcatcaatctttaacaggtaatagttagtattcttatctcgcatctgcttatatggcaacgagtttaaatatttctatcaaccgtaattactgaaatgagttatttaaattgcatttaataacataattattgagttgattcatattcctcctggagtacacgtatcggcttctagttgatagcctaattttaagtataacataaagattacgtgaaacataaggtttggcttctaactttattttgaaatgctccaatttaattggttgagtctaccgcacaaattttacactgtacgaagagtataagagtttgaatgacttaatcactttatcttattaaaaataggctaattaagatttattcttcgaaactttaatacatagtaaatcatacccttaatgtgatagtcagagtcttgtgatctgcaagagaaatgattgggagttgtgctatttcatatcgcttggggaagattaagtgtgatgattttaagactgtgtaggtatgtgactacacaattgaagatgacttaaatggattgattggtactacatatatcgacaaagtgcctattattttttagtagcccatcatgaaagaattccatagtttgaagcggagacgttatacctaaacttttgaggctgttaaaaatccacacctaaattattgagattgttagattcaaggaccttcgttcaatttcactaatggacgcttgatgtatatgaaagttcgaggggacataatttggtacgtggacaattttcacattaggcgtctactagtttattaaacgaaagtccttaaatctaataattttaaagaaaagattttatgttaaaattcaaaaagtaaaaaaattataatttgtcataaaaatataaagaaaggatgcagttattaaggaaatattttggtgattttttttttttaataagtatataaattataaaattcttactattaaagttggtttaacaaaattaggtgaacggtggttggattgggattgttctatgagatagatgagagtcattttctcaagggttttctggttggaccaaaagaccacattgccaaataataattaaacattatgtagtatgttatgagtcattaaaagtctatacaattaaatcaatcttggaaagataatgtcacatgtatagtattatttgcttcataaatgagataattattgttatttattgcatataggtgtttgcttaaatggaaacaaaagtaaataaagcttttatttattttttggggaagttattgcaatttttttatctatgataggagtggaagattcaaaaattttgttctataggattttttttttttt

SEQ ID NO: 311121 - DNA, 892 bp, Cannabis indica
tcggacccccatcagacacgaaatacatccaccaattagctactatgcatcaaaccaccatcaaatctatatcaaaccactatcggaccttcaccatcaacctcaaaacttaaattttagaacattttatcgaacctatatcggacactatcggaccgactcgtaaagacagaaaaaaccaaaaaattacagagaacgtcttcgttcgtgttctctccgttcatggtctgcgtttgcagtccctgttagtggcagtggcctcttcgtttgcggttgaagaagggattggcgagatctaggtcggattgaaatgaacccctctcgatcagtcggattggtgtggtctcagtcgaatggttgcagtggtggcggtcttggatcctttaatggattttcagtgtattttagtgagaaccaatgagagcgaaagatagagaaagagcaagaaggaaatagaaggatgttagtaagttttgagataaaaaaaattaacctattccaccagtattaaatagtttaaattttgattattaattttaaccaacattaaaataatttaattttaacctattccaccaatattttttttgaaaataagcgtgaatgtctcattaataattagagttagacctctcggtcattacataaaaggttctccggaactgaagaaaccggaataatcccatacaacttgttaataaaagcccagttagccacattatgggctgcaaaattacaagttctgttaacatacatgaaattacaacaagaaaaggagggagaggacttaacacaaaaagagatatggttgtcaatcgcccaaatagactccgatccatggagagcattgataactgatctcgaatcactctcaaccagaataaacttgaac

SEQ ID NO: 311122 - DNA, 1063 bp, Cannabis indica
caatgtgtgccagttttcagttttagagtcttttacttatttcaaagtctacaaatttcctaatatttgatcttgtgatcagattctttcaaatgtcatgtttggtcctgtggtctcttaaaagtcgttcgttatatccacactttctaagcccaaatgtgaggaggatgtaatagagttagtctcacattgttaaatgtgtggaaataaattatcatatataagatgaatgggctacttttttttgtcaattaattttgagatgaaacctcattcatcttaacctcgcttattcacttttatcctaaattatagcaaaaggattggagaaaaaatcttcaacatgtgatccctgttttacataaatatatataatataccgatacatatacattttaaacttgtaaaaattatatgaatatatattatgagtagtgctactgtcaatcttctattacaatcttttagtcaatctccgtgctcaaacatacatgcatgccgaaatattttttttcaaatttttttcatggcgatgttcgttatacttacaacattatccttgtaaaattttgaaattttttaaatattttacattaccgaaaaacatatttgaagttttttaaatgcgcgtggtgaactgaaatatcaaaaattctatttttggtatcctaaactattaaaaaatttacaaagatgatactgtaactataacgaatactaatatgaaaaaaaaaaatatttgacatataattttagatgtaaaaattgactaaaaattaaaattagcatttctctatatattatgattctattatttagttgttgcaattttgtctctagctagctagtattgataattacctagagaaaataggaagaaaaaaatcttgaaatacacgaattttggtgggattaacttgtcattaattgtacatatttaataatttttattaggatatagcttgtaaataaaagaatgacgtagtttttgtttatttaattatttatatattataatgtataatttggcttgagctatatagtctcaagtagttaacgtact

SEQ ID NO: 311123 - DNA, 1045 bp, Cannabis indica
gtgattcgagagcgctgctgccaatactcttcttccttatagagaagcctgttaagatccccttgaagttggtgacagagaagaagctgagaattggaaggttgggaatgactttgggtagcttgaagctaagattgaacatttttgatttgttgaggaagagggggcccaatcgatttttaccactgtgagatagtgagagcacaatgttgaagtttgtttgtaagatcagagatatgattgttgtcacatgaatcatgattgggggcccacaccttatgacggcagtcctcaaatccattctatgcaagccatctattatcgaaatgcaattgctggttatgaggccgtaagctatcctcatcctaatgcagggaaaaggttagaatgcggtggtcaaatccaaaaaagtctccatggaggagatgcaccttgggaaaagaagaaacccacatgaggttcgagatgccccagtacaatctttcttgtatgtgggtgtgatgagagtgtttgttggtccaagtgtaggggctaccatgaccatgaatggggtgaagagtgaatgtatcgaggaatttcttaaaaaagaccgaaggctgtttataaatatcacccccaattttgttagcaggtgagagaaagtcgttaaaatcacccattaaaagccaaggcaaattatgaatagtatctccaaggcgatgaagaagttgccacatgttagtgcggttagtgtgatgcggagccccataaaaaccagtgaaagtgagagaataataattgggaaaccaaatatagcaatgaaagtgatttatattataagaaagtagggttacatcaacatcatgagaccataacaaaaggaggctgccactaaggccaacccaagggacttcaagactgttaacaaaactaagcttagtacgaaacttatttatagcaccaacatgtagtttagtctccataatatacaaaatggctggtttaaaatgcttaactaaaagagagagtcagcaaaatgctcgtttactccccaatccatgagcat

SEQ ID NO: 311124 - DNA, 765 bp, Cannabis indica
ttgttggtttatgaatacatggaaaataatagccttgcacactctttatttggtatgtttgttattgttatacatttttgttgagccttgccttactatgactaaagtttatatatattcattaactatctaccaaattttcaatacttaaaaagagtctgaagaaggtgaagtgaaactagactggaatacaaggcaaagaatatgtataggcattgcaagaggtttagcttttctccatgaagactcagcaataaaaattgtacacagagacatcaaagccacaaatatacttttagataaaccttaccccgaaaatatcagatttcggtctggctaaactgaatgaagaggaaaacacccacatcagcaccagagttgctggaactatgtgagcaataatatctttcttcatgctataacatatgattaattgattatcatggaaatcttattgatcaactttttttgttgtagaggatatatggcaccagagtatgcattatggggttacttaactgataaagcagatgtatacagttttggagttgtggcaatggaaattgttgctggaaaaaacaacatgaaatatcgcccaaacgagaactttgtgtgccttctagattgggtaacaaacaacttcatagttagttttgagttgatttcttattctttttattcctatattggtaagggtaaatactattttggactctctgttttacaaaagttaccaattgggccctgtgttttgttaaatgacaa

SEQ ID NO: 311125 - DNA, 917 bp, Cannabis indica
agaagaggttcaggatcaaccggttactttgtaatctcatttgatatataatagaaagactcaaccagtttcattgttgagtcacattcattcattcgttcaccttctctatttttctctcaagagttcagtttgtctaatgtggacggaaattcagaggacacaatttgatacatgttaaaatttagggatacaattaagtacatgttgattattaaagttagagaacacgatttgggtatatagacaatcgtcacattctaattccatgaacgaaatttgatgaaaatctttgaatccaacaattttaatagtttaattttaagaattgaaaagtttaggtgacacaactttagtatatttttggagataaaaaatcttaaattttaccttatgattcattcatgctatattggtttggcacaaccatgtttgaaactagtcatcttcaataaactatgtcattgacttagaaaaaggaaaaggaaaaaccttatgaaaaacaaacaatacgagtttcattaaattaatgttataataaaatagtatattgttgtgtcacatgaaaatgattacttgttttaataattcaatatacaatttttttttttttgaaagcaattcaatacattacaaattctttgttaaacaagaagcattataaattgtccccaaaaaaagatgaaaataaaaaataaaacttcaattcaactagtttgagagtgtccataaaaaaaaaaaactagattgagagtgagatccaaatcaacatataaaaaaaaaaagctaactttaaacctctctccatgcagcccatgaggatttttctattttatttttatatatatattttgataagtctactttatacatcttacaattttttattgttagataaattaacaattaacccaaga

SEQ ID NO: 311126 - DNA, 1274 bp, Cannabis indica
atctttattcatttattgctcgatatgtattgttactatggtaacatacatttattgaattataaaaagctattacatcatctgtctaatctttagctaattaaaagatagacattttaacgatatattttgccaaaagacattacttaagagcaatgattttgaactaactgtaacttcagagtggtcacctgaccttgatactagttgtttttctaaacgtttgagtgaggtttgcttagaaggccaccacttaggaatggtgttcgagcactatgcaacttatgtggtcccctgaccttttcttaggtgttcaccattctaaactagttcaatgttttcatcatgtcgaccaagtttgtatgctcgagactttgtaactgcagttacccagtgttgacggtgagaactcgtcaataaaatattaaaaaccaaaatgtaatattcagagattttaattgaagagtggttaaagaaaaatcttaaattcttaaactctcctcagaaaactactatttcattgatctttttttccaaaaaaaaagtcccctttacaaatacctcaaaggacctatttatagtgagttctctacaattttgaagtccatcaaaccccttaattgaagattgtcaagtcactttcatactaggtagactagtacctctgatagtctgatgtcttcaggcatcctcagtagcacaaaagctctctcttccacttgtacttgggaagaggtaaactttgtcttaattatcaatacttatcgtgtagtcgctatcttgtctatgattttagtgcttaaacaaccctagcctcgatctttgctccctataattatccacttacacattcaagacgttaatatggagcttaagcacacatatcatttgtgtgaggagggaaaaggggtcaaaggaggtgtaaggaggttgggcacgcgggggagtcgggcgcgcaagggagtcaagcgcgcaaggggagccaagcgcacggggggagttaggcggaggctgggcgcgcgggggagtcgggcgcgcaaggggagccgggcgctcggggggagttgggcggaggctgggcgcgtgaggagatgtgatgagggggacaaggagaaaaagggtggggaccgacccgtttgacccgtttgacgaggaggacaagaccattcacttcttcaccttataaatatgcttccaatcttttacctttacttatccctttcttattcttacctctctatctttgttgtccttctttgctttctatttcttct

SEQ ID NO: 311127 - DNA, 1375 bp, Cannabis indica
aaaagcaaaagtaccatatggacatgtgaatgtcgtctactcctggtcttttggtgcaatggccatttgatgataccatgagtaccaatcaagaaaatagtagtacttttggcgtgccaatttatcaagcatttggtcaatgaatgggagaggaaagtgaacttttctagtggctttattgagtttccggtagtctatacaaattctccaccccgtgacagttctggttaaaattagttcattattctcattcttcactaccgtcattcctcctttcttcgacaccacttggacaggactcacccattaactgactaaaataggataagccaccccagcatctaaccactttaagacttattttctgacaacctccgtcataggtggattcaatctttgttgcgtatcaatggttggttttgctccttcctccatcaggattctatgcatcactgttgaggggcaaatccccttgatatctcccaatgttcacccaatggctctcttgtgtttccttagaaccctcaatagcttatatgtctccatagtagaaagggaagccgacacaaggataggaagtgacttattctctcccaaatattcatacctcaggttatctggcaagacttttaagtctagttctggtggcttttcaatagatggaactgacttcgttgggatgactcctagctcttcataatattttctgtttaatggcccataggattcaagccacatagcatactccatcacttctttaccatcttgttcaacaacctcctcttgcagcaaagtcagatttagagggtcttcactatgcttctttgactctaccaacttgtccaccgcatcgattgaaaaacaattatcaatagctgttggataagtcatcgctttgagtacgttgaatactacctcgtcttcttgaactctaaggtttaactctcccttctgaacatcaattagtgctcttcctgttgtcaagaagggtctccccaagatgataggaacattattgtcttcttccatgtcaaggactataaaattagcatggaatataaatttgtccaccttaataaggacatcttcgattactcctcttggatgggctaaggaacgatcagctagctgtagtttaacagttattggttttgcctagcactactaaagtcaatcaaaaagagaaaccatataagctactgaagtcattaaacacagaaaccatataagttatctaaaccatataggtactctcctcctatatcgaaattcagttctatttcactatagcataatttacactcacttttcagatctcgcatcaaaatcataaagcaattaattgatggtcaggaaattaaaagtaattaagtac

SEQ ID NO: 311128 - DNA, 917 bp, Cannabis indica
tgtaattgggtttctcatacatttaagatatattttctattcttttgctactgttctactcctattattgctgctgtttgtgctatttattactgttttattgtgttcttgagcttggagttctcaggtcttatcatattcaatgccttttcttgtgttgaattagttctggatttggagttctgggatgctgagaaaactatattcatgttttttcttgcctataatttctgggttaatattcaaataaatatatgtttgtatctttgtatctattttgctcttagtgaaaataaaccatttttttagacaaaactatgcaaatgaaatttctttatatgtttctaatttgttttttttatcaatgtgaaaattttcattaatcaaacatgcagatcacatcaatataagagcatacccctaaatatctataattttgttaatcaaatagctacatattatttacaagtttcataagtactgtatctatatctttcttaaacaaattactcttcttaaaaaaaactaacacatgtcttaatgctcatcttaactacgttaatttaccaaaaaacaaagggaccaaacattattttttaaaaacacataaattccaattatactatattccatacacaacttcagctattacatagtacaaatggtagagaagagtcttaggtagtgtttggttgagagaaatgaaaatataaaaataagaatgagaataaaaataaaatagaataaatttacaatctataaaaaaattattaaattttttcaaatcttacattggaatgatcttttcttctactttaaaatagaatagtcatttcttcaaaataatagaaaaatcattctattagattttaaaatacaactaaaaaaataaaaagaataaaaattattttctttct

SEQ ID NO: 311129 - DNA, 2067 bp, Cannabis indica
tctctctctctctctctacacctaatgagtagtacatcagtttatatagctataggtcggctaacttgctcacatcattaatttttaatagggtgaaaaaaatggatatatatataaaaaaaaaaactaggggtgtatctgttccgcactaagtacaaatatcatactttagatctaatccaatccataaaaatactttgtttgaaaaagtcttattcaatcccacagcaacaccattctgctgaggtgtgtgtgcttcacagttctgtgtctaacagtgccatactcataacacaatattgaattcagtattaacaaatcccaagccattgttagttctcaatactttcaattttctatcatatttgttctcaactttagttttgcattcagtaaatcttagcaaaaattctttctttgttttaagcaagtaaactcaaacatgtatactaaaatcatctactatggacaagaattagcgtttacttgagtgagttgcaactttgtgagatccccacaagttagcatgtacatattccaaagatcttttagacacatgtattacagtgttgaattttagtctgtagtgcttccgtaatatgcaggcttcacagaatgggagtgaacttgatttaaattttcccaacaaactttgtttgttcaattctttgatgccttattcactcatgtgccccattctcttgtgccacaccttgattcttggtgcttgacagtatcagcttcaaaggacaaaatggtctcatctagcttgcaggatgtataatccatttctcttttcccctttcatcacattaactggcccttttgagatcttcatgtgaccatttgttgatctataattgatgccttcatcttctagtacacctaattcctcttcaaatctggtatgtgcctgatattgttcagcatcctaattatgccaacaaagtgcttgattgccacctggcctatgctaatgaccctacaataattggaattacccatcagaaaagtgccacgatcaaatttttgataatcaatgaaatttttaatggttagacatatgtagaatgtgcaaccagaatcaagaatccattctcttgtgattctttaatcagaaatcatctacaggtcaccatctaaagagcattggtttgtatcttctgcaattgacatagatcatgcttttggtctttctcttctttttgcttgttcttgaattcattgcagaatcttctaatgtgatcaatcttgccacagaaataacacttcctgtccatgtggtattttctcaattgagatatgcgatgccccctggaatggtcccttcaatttggatctcctccccatgagtgatctcttcctatagccataaacagctcatctttcatcttgtccttctctttgttcagttcttgttcctttgtattgagagctccaagaacatcatcaagtgtaagagtgtctcttccatacttgatcactgctttcagttcttggtatgtagttggtacatatcaaaggatgatcactacttgactttcttcatctacaatatatttcaacttagctaaactaattatattttgattaattcttccaaaaaaaattatattttgattaaaaacatcaagattatcatctaaagacaggtttgaaatcattttaaagccatataatgattccaataaattaatcttgttagtaaagagggttcatgtagatctcctcgagtttaacccataactctctcgctgtcttcaatccttgaacttttcttctcactatatttgacaggtactttataatggcatagtaagccatctttttcatgtcctcaatctcttccttattcaatttctaactcaattcctccttcggcttgagtgcctttacaactttatgatgaacaagaatctttttcaatcattccctctgtgacagtgagtagtcccgtaatctgtaagggaaaatatcgagtaagttgtacaatcctacattgcctggagaaggtcaagtggatgattctgagactgtgtaggtatgggactacacagttgaagagag

SEQ ID NO: 311130 - DNA, 799 bp, Cannabis indica
ctgggcaacattgtgaattattgtttctaatagcaacggacaatggtctgacacttcaagattaaataattgagctgaattaaaaagttgtgtccaagagagactaaccaaagcacgatcaagtttgacttcaacccagtttttgcttccacgacctctttcccaagtgtacaggtaaccttttaactccatatcatgaagattagagtcatcaagagcaagctgaaaaccatccagcagccattgtggataaggagaacctccatttttatctgagtgtgaaagtgtattattaatatcgtcaataacacaccaaggaaaaggatgctcagttgaaagtgtgcgtagaaggttccatgttttgaaacgaagcgatcgattgggttcaccgtaaacccctgtaagctgccagacactgtccccattcaatccgatttttatattaatatgacacacagagtaacccaacacaagaacatcttctttatgtctccaaagcatagcaacacctccactatgtccccttgcatctgttgagtaaaatccacttaaaactagaccttttacaataaatatccacatcagcaacatacaaacagaaacaagcaagtagactcgatcctaggtggcttcgcctctagtggatcaagatttagtagttagttacaactgaaattgtaactaactcctaaacctttgatcaaccgactttacaataatacaaaagcatgaatcaaagcaaataacctaagatctacaacagaaataaacagatcagagaagaaatagagagagagag

SEQ ID NO: 311131 - DNA, 2045 bp, Cannabis indica
agagagactgatagtcatggcagatgatatgaaaatggtaaaggttagccaaaaatatatatatttgaataggcatatggattataaatgcccacatggtatgtaatatttattaggtgacagaggtgaaaactgtaaagacagccacgacctctctctcacactttccaattttaaaataaataaaaaagtatatgtcttttgactttcctagcacctagcacgaaaatttgtgcttaattttcgggtttcggatttacacccaaaataatacttatcttactttaaaatccgaactcgacactcgtgtggagcactttcaggttagatccgacctgaccatacgagtttttaattttttggctttttttggcagcgggtcggggcaggtggttgggtttttgggtttgcgggtctaaatgttcagccctattgataattcctaggttagcaaacagtttgtataagggctcatactccttgcctaaatctaattgcacactttttacttttaattgaaaaaatatctcaacataagcattgaattaaacaaacaaggatgcagctttagatttagatttcatgggaaataaccacaaaaatcttgtgaaatcatctacaaagcaaatgtaatatttgtaaccatcagtagaagggtaaaaagatggaccccatacattagaaaataccaaatcaaatggtatagatgttttattagtagtttgtttgaaactgaactggtgtagtttgcctatttggcatgcattacaaaactcaacattattacatttaatgtttggagacactttggtcataactttggctagaacattcttggagggatgtcctaacctattgtgccaagtgggaacaattttggatctatcatgaacaagattggaggtggtggtgaagttgaagagatttaatggaaattgactgtagtggattgagttggaggatcacttggtgagttggagcagggctcttggagtttgtagatcccttcatggatagtgccccaaagaaggtcctgcttggttgtcttgtccttgatgagacaacaaacaaagtcaaattcaataatgatattgttatgtgaagtgaactaagatatgctaagtaagttcttggtaaaggtggaaacatgtagaatatctttgaggactaaagatttattagcagaattagtatgaagaaaggtattgccaatttgatttataggaagagtagagcctttaccaaccattacttttgctttgcccttgtagtcagttgagactgtcatattgtcagaactgttggttatgtgatgtgttgctccagtatcaaggtaccaggctccagacatatctgtagtggctggagattctgtgagatttgcatgtggagagttaatgggaggggcagatgaagaagaggcttcttgatttggaggagggccaatgaatgtaatgtcgaacctatggtaacacttgagtccaatatggctagctctaccacacaactaacaaataagtcaatttcctcttcctcctctattagaatagtttcctcttcctcatttgcaaccacaatatccacagccagagttaccttgatatgcacctctagtattggttgtgttagcaagatttacttgcacatttgtgagagaatcagaggtgagttgattgattctcatttcttgactatgaagcatgaattgaacttcgtgtagggttggattttctgcacgagaagttaagttgacaaaaacaacttcatatttagagccaagacctccaagaacaaaaagaattaaatcatcatttgataaaggttggcctgctgtagcaagagcatctgcatactacttcatctttagaaagtattcatcaatggaaagtgatcctttctttgtggattgtaggaggccgcgaatttcgagaagtcttgctctcgatcagtgccggcccaagtattttgggggccttgtgcgaaatttttaaattggaccctttagaaaaaaaaaaaaaccatgtacattaaaactacaattctat

SEQ ID NO: 311132 - DNA, 1407 bp, Cannabis indica
ccaaaatgattgaagaaaggacctccactctcaagttctcatgttgtttacagagagagcgagccctaacatttcttaaatcatcttgactattcttagattaaagataaattagagaacttccaatcaacgaaaaggtgtctcgattgaaagacctttatttaacaaaatagttaataattgtattaaaataatatattttataattgatattttaaataaaaaaaattagtaattacactctcattttttatgactagaattaaataatatacttggaagttggaaccccttactttcaattacacaaatattctataattatataattacctcatattaaaaaaaatatatgctaatgatatatatttgcactcaaaaattacatgtaaattttacagtattagctttttctaaatcaatcacatttatataaactagaactcattattttaatatgagtaccaattacttagaaattaaatacatgcataatcaattaactaattacatatatttatttattttaacattattagtgactggttactttttttaactagtattataggtaactatctaattaaaacataagttatctcatattaatgttagtattaaatgcatttttcataacaaatctagcagaatttcaagtaaatttgaaaacgacaaattcgacatagttgactatgcgaagctggttgcttaaaataatggtaagaaaaacttaaaaacaacagtaaaaaaactgaatccaaaaatcgacatcaacaacgcgaagctaataacagacaaacaccacccagaagttgaaaaaagtcaggcatacgaagacaaggaaacactgaagaaagtttaaagctactacgcaataacaacttccaatacaatttttgaaaacatatttaattgggtttcagtaagaatttttttaatatcttcaataacagagtaataaccagagtttataactctggaatggtagtattccgatcgggtgtacttggattttcaatcctataaaaaaacataagaaaacactactaaaacaacacaaaaaaaaagaacataaaaacaagcacaaaaaattctggaatggtagtattccgatcaggtgtacttggattcccaatcctataaaaaaaacataagaaaacactacaaaaacaaaactaaaacaacacaaaaaaaaaataaagaacatcaaaaataagcataaaaaaacattaaaaactaaaataatgaaatgacacacctcaataaccctttttccaattatgtcttcaaacagatcagttgattgaacaattttcacttgatatttacccttttctctaagagttaacaaaataaaaccaaaataacaacaagacatggagtcaaacaaacagaaaactataaaaa

SEQ ID NO: 311133 - DNA, 1678 bp, Cannabis indica
agagagagagagttgtgttatttttgtcttttctaggaaaagcatgtcaaaatatgcattgtttggtataaattaacgaagagtctaaaaattaataatgaataaatttttaagtttacataatgaaatttctctaattcgaaaaaaaatataaaaatataaacataaaagttccttaaacataaataatattttttaaaatcttgttcatggtaattctcctagaacaaataataaatttagactaaagggaaacaaatagtttgtatttttttttttttgaaaaaaataattagtatttctctttatatgagaaataattactcaaaaatatgattattttattataataataagactagaagtaaaagttttttattaaaatatagaaagaaagaaaaaataatttatttcgtattactattaagttaaagttgtaaaatatgaggagatttacgatgatgcactttcacaccgagatgcaagtttggtttggaaagttttgattagtaacacttttcatagcacgtggttttgggcaaaagaaagcttgggtatgtttttttttgttaaattcgcctatattgtgttacaagctcagcgaagaaattggtctagccataatcaagatgggctttggaattaaagcaactgtggaaaatcaaagttccccctaaagtgataaactttctttggagagcttgtttgaataacctgccaactaggttcagttggttgtgcgtcatgtgtcggttgattctagttgtgccatgtgtaatggtgcgtcgaagacgactctgcatattctagtacggtgcccgtttgcctagaattgctggtgcacgggtctcgagttcttgtcgtgggtgcaactgccatggtttttctaaattggtttgaagaaggattgaggtattggagtcagatagagttgatagaggttattatgttatgttggtccatttggcatcattgaaactgattagtgtggaaagagagactgtcgtgtgtggaggatgtttctttgtttgcttgacttagctttgacgattggagtaatgctcaaaagatatctatgtttccaacccttgtttctcatgggggttttattgagcattggactaaatcagacattcataaaatcaagatgaatgtggatggagtaatgtatgaagacatggggcggtatgattttgattgtgtggctagagattcggctgagatggtgtggagtgttaaatttggaactaagttgaaaagttttgagccgcatgttgttgaaacattaggcatctaggaggtgctaagagctgaaggttggtcggatgtgatgcttgaatctgatagtctcaatgtgatattcgatttgattaaaaatctgatagtctctttgtgcacttttgaattgtcaagctattatttttaatttccttacattttattaagtgatctactaataaggtggtggtgctttgttagttttggatgatctttgttatatataaggtagggatgtaaacggggtgggcgggtgcgggaattgctcccctactccatacctgtttcttaaattcaccctcatacccgccccaatacccatttaaattaaagcgggggcggggcagggattacccgatgggggaaggttctcatcgggtacccattacatatatatttt

SEQ ID NO: 311134 - DNA, 1273 bp, Cannabis indica
aagcataactgagccatattttttggagagttggcataaagattggtgaggcaatgaaccaagctggtgtaaattgcctatgaaaggaagctttggagggcttggaggaaggttcttgttttgtttatgaacagttttcttgatcaagattatcagtaatggaaagaggaggaggagaagtgaaacaagcaaagctggttgagcatcaattgccattttttcttttagatttatctctaactcaaaaactacctatcattttaagggagtacatatctatattttgtattgggaaatggttattttgtccttttcttccctaaagttgtacttgctgacgaaatatgttctaatactatcgatagtattcatattgaattgtcttccttaaagttgtagatgtgatgaatttcatcaccctgtggttgttctctaaaatacaaatcaatctgcaaatatcattttaatattttcgtgtgattttctataattaatatgtaatacgtgtatatacattctaaaaaattttagtttgtgattaattattaatcaatattcttatgttgtgattaaaaagtcagtgactataatttttgtgactaaaattaaattagcgactacttgtatttaaatactatattttagtcacaagtaatttttttattatgactaaacatcacatttagccacaaaaaaattatgttgtgactaaaaagttgtcactaaaagtagctattttttgtactgataatacaatgaatattttatattcattggatttggtcacaattaattggttgatattttatgtatggtcagattaccatttactaaatatttgatttttcgatttaatttcctaaattaatggacaaatattgacaattaattttggcatagaccatgatggaaggtctaacctatataaatatagggtcttgatcttcgacctcactactcattctatgaaacacagtaaatctatctaaagaaatcgtagatggagcttggaagcccgattacccacactaattagtttccttttcttttgtagatctaaaacttgtgtgggattgaagctcaaagaattattggctggaagtattttgattatatatatatgtttgatttaattttgcatttcatacatgataaaatatatttcatatcattcatataaatttttaacagttagtatcaaaacaaaagtatgtacctcgattatttgttttctatatatatatatatgggtatgggtgactattcaatggtt

SEQ ID NO: 311135 - DNA, 2122 bp, Cannabis indica
aaattgagttttgtaaaaaagtaaattgcttaatttttcccatactatccaataaaataattccaggacaaaaatccaattgtttttcataaaaatttcacaaacatcaatcaatcatcaataaacacatagatcaacatgaatcacatccaaatcacacatacatcatcctttcctcgtcatcaaggatgggagttaagatgatatcgggaggcacaggatactcgtccacctcggacggaaaccccgaatcaacactgggagcaagagtatccactcgcctcggtttcttagtagcttctgtctttaccatcttgcctttacgcttgcggtccaggggagggatgatctcgccttcttcttcttcttcctcgtcaattaagacgacttggtcctcgggaatgctagtggaagatctcccgcaagtcaccaccgggtcgcgcgactgaggcatgccgggttcaggcctataggtttgggcaagtacatccaggaggtcctccattggcttcgttgcttaaggaaataagtaaagatgttagaacatcaccaaaaagtcgtgcatacaagaataacataatgaaactaatcctacccttgtgatctaattctgccttagcaaaggtatatactaaaaggttggtgtcgtcgtcccctagaaagctgtccgaggggaggaaccaactggaagacagataggtagagttatccaaggggatgggtacgggaggaccgcaacccattcgggaccggcctaggaaatgactaaggttgaaaaaaactcttagcgttgtcacccatcgagaatggggcattctaaatttatataatcggtcatcaaattccaccggcctataagtaaagtaatcctgaacaaaaggaacgtgatgaacaatcagtggggattaccagcttcggaagtgctggcatcaggtgccctagcgttaggaattgagaaagggaacttaggccgggaggtcgcctgttcttttccaacttctatctgaaggaccatccccgaagcagcttgggctttgatgtaggctgactcttgttccctcctaaaggggtatttcttgtacctatcctctgcggaagcaatgatatcgtcccggagcaccttacgttgaggcaaaggaccttggataagttgaagtcatctactgactggccctctgaaatcaacttagccctcttgcagtttgcagtcgtgaccaaatccctacgttcaacccgtctttatcataggtggagaagactttggcatgttgaagaaagagttgagtaggggcggtatgatgcataggaggggccctgacccattcagtgagcaattctgggcgctcaacggctttgaagccggaggagaagaagaatcgatggcagtactccttcacgttcttttgaaaaattataaggtaccaggccctcgttggcagaatgggcctggagtttatagaaaccgtccttaagtttgtcccctttcttggggacagataagagttcataaaaataaagaattctagccgggctaggcggggcccaactcttagcaacgtaaaaaacatacaagcctaaaagcaagcgatagacttgaggaatgagttggtacggcgcaaggcaaacaaaaattaaaaaatcaataaaatagtcctagagaggtagcatggccccggacatgaggtgggtttgactccagaccccaaagtcgccataattacgattgggcgtctcttcatccttggggaggcggtgaaagactccagatgcagaaggcttgatcccaacgaccgtaactatcttctccagttggtaggcacaagtcaaggtttagtgcaattcgtctgcctcccagcctgtggaccgtcaggtgtatttttttgtggaccaccggaccttttatcacttcttccaaggtggctaaggtcttggacgccttgtccgaggattttgctccagctgtagggacagacctgtcttgggataggtaaaacactgaaatttcttgattaaaaccaaagaaaccgtaattgtgaaggtcgcggagaacctcactcatctgaaaaaaaaaaaaatccagcagttagcccccaaaccaaaccctaacataaaaggagggaat

SEQ ID NO: 311136 - DNA, 832 bp, Cannabis indica
gaaagttcttatttaggatgttaataaacatacttgtgagtagatctaagatcccggtaaaataatttccaacactcataaggttcattctagataggcttttctttattctgtaagaagctctgagcaggtttcatattgagatggaccacaaattcaagctccatctttggccttatgtccatgtatccgttttggtcatgctcaagtttcatgttcgaacttcaatagcatttctctcctgttcatggaggggggtttcatccaggagcaactctccttaaagcaactctcccttctctatgccttcttttgttctagagctctttcttcttctactcttcttctagttgctccattagctaaaagattccctctgctcgttctattacttctatcatcgtttttttggctttgagagtatgagctactcacttagcaaggataaatttagtaagttcttagtgaaataactagctacatccttgggggtcacctcaatcacttggtactttatgtttaagaacctctctaagaactgttgaggatgttctccttctttcttttttgtgtggtagaggtctttccttttttttttctcttagcatttcccccgtacagtgtagcaaagttttgtgtgagctcatcgaatgaattgatggatccttttttcaattatttaaaacataacatagttggtcttgttaaggttatggagaatgccttacatctgatcgcatgattattggtttgtagcaccattattgtaacaccctaactaacataggcgtattacgtgagttttaaacatgttgtgcagctcgttgctaat

SEQ ID NO: 311137 - DNA, 595 bp, Cannabis indica
ggatctatgttcaatgcataacagattacatgagggccgattccagtcatgttagaataactacagggctaacacatcaccgttcttcttgactgtggagactatcctttctttaacaaccagaggcatattctttctcactttgatgactttggtatgatcttcatcactgatgcatacttcttctacctcttctataggttcaattattcgttccacgcctacccgtagatctagttcactctcttctcgagccacccctagtgctagctaagaagatatttcgggttctgctatgtttcctttccggaccatgagatcacagttctagttaaaatattgtagcagcttcttgtacttttttagttgtctttaattgttctaacacttctagcatcgcctactcgaacttgtgcgtgtgtgtaaggctaattaaaaaacgcactcataatttcactacatatttattactagctcagccaagacttggtggcactactataagaaaaggccttttatcccggtttttaaggctttttatcccggttttcgctaaaataaaaaccgggatgtatgccagtgggataaaaggtat

SEQ ID NO: 311138 - DNA, 3011 bp, Cannabis indica
ctagtgagagagtgccgcccatgtgccaccatcagccaaatattatagaaataattattatttttttcgttaatattccttctctcctctttttgattaccaaaaaggagctgggaaatttccttcacactgtcctttacattctattctctgcatttttagcaatataatatcatgttaaccaaccatcatcatcgttttccacgacacgtttaaacggataagtgccacgtcgggatccacatcgtcgtcccaacggacgaacactctagtgccacgtgtacccaaatggataatttccactctttcatagctagcgcatatctctctgctatgccatgttcattgctcctttctgattctttcatctttgttttttcaaaattatttcattcataatcaagtgattgtctttactaaacaagttgaaaggtcatttattaattaatcacaaaaaccaaaattaatcttttcttctgatcccaccagttctaaattagataaggttgcatctttttcttccaatatagtggtggacttcaatttcattggttgtcttcctttaaaattcaaaagaggaccatatactaatactacgtctctctcagctctctataaatataaatataaatatatatatatatatgtatacagatagatatatgtgtatatataaagctaccaaaccatatcttcatagctcataagtatgaaaagttggttgtatacgtatagaacatagagacaggacatgagaatttaaaactagtaaaacttgtcgacagaaaagaacaatttctgtgtcaatgtctttttgctgatatagtttttgataggatttttctttggatggtagtgaagaaagctctagagcaaaaaaaaaatcattttggtgaaaataattactggtttgaattgaattgatcaatgaaatttaaaactttctgagccttagagactacagagctcgatcctttcagactatttgcagcacttcggtagatataatttgacttttggatatgagacaaaatacaattatttgttgtgtcgtgcattttgagaaatgaaaaattgtaaaagattctgttttctcatggattgtaacataaaaaattaagaatttcttttttagaaaatttaaaacttaaatgtagtataattcatttcttgttaaaatataacgttcaaactgataattatttgtataagaaaaataaccagtaaataagaaatgttggaaaattagaattttatttaattataaaattaaaagtaaaagagtataagaagaaaattttatatagacaattaacataaaagattaaaataaaagaaaaaactaaaataatcctaaataactatttggcacattccctcaaactcacgacgttactgcaagaaacattaagagtttgcctaaaaaatacgaaaacgaaaacgagaaatcatatgcgacttagtaaaaaagtcagcaaactacaataaagaaggaacaaaagacaaaataatggtgtccaactttagatgatgacgagtaaaatggcaatcaatctgaatatgtttggtgcgttaatgaaaaaccgagctgtaagcaatctaaatatggcagtttcattgtcacaatacataagaataggacaagagtgagtgacatacatatctataagtaaccatctcaaccaaacaatctctttagtagtagacgccattgcacgatactcaacttccgtagaagattgagaaacaacagactgcttcttgctcttccaagaaataagagaatctcccaaaaagatacaaaaaccagtgacagatttttggttgtgggatcacgaccatgatctgcattacagtaagcttgcaactccagaaaggatgtggaaggcagtattaggctctaaaagatggtaccccaaaaataccgtagaatgcgaagaatagtagaccaatgaattgtagtaggagaagcaacaaactaactaacaatatgaacaacatatgcaatgtctggacgagtaataatgagataaactaaactgccaacaatagtacgatacaaagtaggatcttccaaaggagagtcatcagaaggagaatacagaacattcaactcagagggagtgtcaacaactctactatcagtgaggtgagcatgcttaataatgtcagtagtgtactttgattcagaaagaagataaccttttggaaaaaaggcagcttcaatacccagaaaatagcatagagaatccaaatccttcatctcaaactgacaagctaagttttcctttaacatgtaatttcttgtaaatcatccgctgtaataattgttaatgtaatgatcggttaaccttattttgaaaattaacagataattagggcttatttttaaaagtaggcttttaattattatttttgcaattatggagatttatttgaattttaggtgtattagttatgatatatgtaaaattttatgatttttatattttatgtctagtaacagtggagtgagatgtatggcctgtatagtcacttagatatggtttgataccttagaaatagtagggaaatataattagacatttggaatgtcaggagtattcgagattatggattaggcccattttactcataagtgtgttgattacttcatggttaagtatgggtaaaaatgtcattttatcctaggttatttatcattattttaagtgatatttttaaaaaatcttgtaagtttttttttttttttttgagttaaaaagctgaattaattagagagattagatcttatttcttgtatgacacttaaatcattttatcacaaaaacaaaattaaaaatccccatctttctctctcagggtcggctacaccaagaaccaaagggattcaagattttcttagtaaagtgagcaattaagggattctttgggcaagatttcttagtccaatcaaggtaacactcttcttcttcttcttcttcttcttcttcttcttcttcttcttcttc

SEQ ID NO: 311139 - DNA, 2536 bp, Cannabis indica
attggatatccaatgtttggcggtcggttgtcattggattggatcgatttatgcacacccctaatcagttatatgatatttatatttaaatttaaattataaatttgaattaattaaatataatcttttatttcaaaggattaaataaaaaagtttgttatataactttaatgttatgaaaaatccaacacgtaagtatacgtatcgtttataagtaataaactcacaagagtgaggtcgacccaacaaatactgtagttaattaccaaacaattgaattcctaattctatttggtgacaataaaaataaaagaatatgttatatttctactaaaaagaaaacaaagaaataaataattaaggtgaaattaacaatgattaaagcttagagtaattaatttttattgtatctactttatatagtttaatttaatttaaggaatattattatgctcatattttgagcactaaatatggacatgacaaatttcatttaagtctaaaagaatgaaggagacaataaatgcgaggaatgaatgaatgtcccgcctcgggaataagctgctatttaaaagatgtgatgacctcgtggggtactatcagtacaataatttacgagaatgacatgattacaagttaaatcctcatgactaggctgagataaacgaggcaagtgaatagcaggaaagaatgagttaagtggaaaaggtagataacgagttctttcaaatcttgcaactcattgacccacatagtcgtgagtatgttgaaagatggccatggggaggccgatcctcgggtcgctcaactcaaccaaaatgtggctgaattacaacaacagttgcgggactttctcaataagcaacatgaacaatttttaaccctagttcgtggaaaattggaggaacatcgaaagccagcgcattgagcaagaacagcaaggagctaatctgtctcaacggattagaaaacttatcactctaatcgcgaaactacttcacgtagaggtatttttgagttggtgaaagagactccccatcaacaaattggtcacatggggactaatgctcaaggcaaaacccttaatgcttagaacgccaccactacacctggtaatcgagcaagcacttagcaaacactaggcgtggagacctcccagagggaaggtaccttcgaccatgagcccgaaaggactcaagcttgaggatgccaaaatgggccctccacttaatattgaacggcctcgcaacaatgagagaaccaacaggactcctccaccaagtctttctcaactaaaagaagtagtaggatctgcttctcaagctaaaagaagtagtagtatatgctacttcgaaatcgaaggctacgagatgaaagggacgagttatgtcgttacgttgatcgtggcaccgaaggccaacagtataaatacttccctcgagtacatggagaggagttgaactcgagcaaccaattcaattctcttcacacttatgatccagctgaagactactttaagggaagtagccactataatgctctgaatgaacactcacacagtgcgttgtcctgagacaatctagagttcatttcggatgcctcaacggagttgccttcatgaccccgtggtcgggagacaagctaggagctcgagtccttctttcactttagaattcactctttcttgcttagatttttagtgccctaaattcttgcaactatttcctccattaatgatagctccaaaaatgtgtgtgtaaatatggtgcctggtactttttctttctcttattctcttagggtacacttcatttaccctaattagaaatcccaactcccttttggcccattggttctccctgtttcttattctcatatcaaccagcaggcatagatttaagtgattgccacctctgcgctgactcagctaaaaaaactcttactgcactttgtccacgtcactgcccagaatgctaaattttttgcattcttgattgtgtaatacgataagatgcatacctaactgtgtaatacaaggagatgcattcctaattgtgtaatctaacgagatgccaaatctttgtattacaaccaggtacaagatctttgtattacgaccagccacaagatctttgtattacgaccaactataaaatcttcgtattacgagatgttgaatgtttatcgaaatcacaccccgataacgttaaaatatctcacttcatgaaccttgtgatccttatatagataaggtcacctcatgggttgagtcctgagtttatttaacctattccacaatacatttgttataagatttattatttatgccacgtgaattcgacttgtttattaataaatagtctaaacaataagtataacaatatccgtaattgaaaaattatatcataaattcttatttttaatataggacttattttcataataatgtagatataatcataatttactacttaattagtcatatagtactaataatctcttaatttccatgtttaatcatgccttattacacaaa

SEQ ID NO: 311140 - DNA, 1154 bp, Cannabis indica
ttttattttattttttgttagtttatcttggtctttactcgagggtgagtaaaggttaaatttggaaaaaattgttaggtttatttttatatatttttatagtctaatttagggtgtgttttagtatttttataattttatcgtgcagatttatgcttggtttttgttttcatttgttttttaagaaaaatatttagagatcttcaattttggtaattttggtattctacaagcttttttgagaaaaaattgagaaagtataatggggaaatgaaacttcttttagcttggatggatttcctattcaaaaataggtcaaaatggcattttcagctcttaaattcgtagtcaaaggttataatggtcaatttccaagtttatggtggaaaatcaaagaaaaatgaaacttggcctgtaaggccgcatcttggcttgtaaggtcacggtcgtagccttgttcgctgaaaaaaaaaatggaaattaactggaaacaaagaatcagctgagtgttgaaattttaaaactcgtttgtaaggccgcggccttggtgttttttttggaaactcgaattttcactataaaaagggggttgatggcaagctttctacaccattcaaaaactgaggtgaattttgagtgtagaagaatagcaaggagcagaaggcacaaatgaaggactccaacattgctccatctcatcaactctatcttttatgtctttagataatttcttttgttttagaatgtcttctaatagctgaattaattctcttaaggattgttatgtgaaccacttgattttattttatagattaatgtgatgattcaatttcttcttctctttattcaattccatacaatatgttctaattgtacaattattgactgatcattcttaattgtaatctatgaatttaaattaaattctgaaaaatatattccattttgagagagtgaaaaaacactatctcgttgaaaagttaagtgagatttaaatatactatgatatgaaaatcaatttaggatgagtgtatctagagtatttgtatgatttttactagttgatctgcttaatgctatttttgtgattaaacttaccatagaaatatagaaagttttcagatagattggatttataagtcttaaccagatta

SEQ ID NO: 311141 - DNA, 1414 bp, Cannabis indica
taaaataatttccaacagaaggtagtcttgacatctaactattccagttcgaggccttggcaagcaacaagtgccgaaaaattctaatcgatctgtgcttaacaaccagagaaaatacctctttgtagtcaactccttccatctaagagaaccctttagcaaccaaccttgctttatattgtgcctcttgtacacccgaaatgccttccttccatctgtgcacccatttacatccgatgactttaccattttttggcttaatatcaagtcccaagttcggttgttctttaaatagtgcatctcttctgacatagctccattccatttcttcttatctttgcttctcattgattgtggatagctagtaggctcttcctgcacaatctgattagcaacttgaaatgctaacactattaaatcaacatgtgcatatctctttgaacctttacttctctctgtatcccgtctctcgcagtttataactttttagatcatcactttcaaaaacatcttttgaatcattacttccatgatctacaagcattttagtctccactcttgtcggagggtccaccttaagctcggttcctagagcttccttctggttagatctggcttgacttccagcaggtttatcaatgaatcccataataaattcattaaatgtcacatctatactaattatacattttcttatttcatactccagacaccacagtctataacttttgactccttttggataccccaagaaaatacaattcaaggctcttgcctcaagtttatcttgcccgatgtgtgcatagaagacacattctaatactttcaagtgtttataacttgttggagttccctgaccacacttatctggtgtcttgaaattcagtgttgttgaagaacatttgttaatcaaataagcgacagtagacacaacttctgcccagaacactttaggcaatccaacactcaatagcatgcacctaactctttctagaatggttctgttaaacctttatgcaagcccattttgttggggagccttcctcacagtcttgtgccttactattccttcattcttgcaaagcacatcaaactaatcagaataatactccaaaaacttgtcaattttaagcctgttaactttatttctggtttgattctaattcattatcttctagtgtttaaatttttcaagaacttccatcttattcttcaaaataaacacccataaattttcttgaaaaatcatcaactatggaaagagagtaactatggagagaatgttggaaattattttaaccaggatcttagatctactcacaagtatgttgattaactgttgggttttatgccccaaataaaactccatttcaatgtaatctatttaattcaacatcaataaagaaacagaagt

SEQ ID NO: 311142 - DNA, 827 bp, Cannabis indica
acacaaacaaccaaagattttgaacatggagtaatttgttggtgtgtgaaatagtggttgtactaaaggcttcttcccagtactttaagggaagagaggctggagctagcaaggttagtcatgtttccacaatgtgcctgtgtttcctcgcaacaacactatttttttcatctgtgtgtggacaagcaagcttgtgcacaatcctagaattttcaagaagtgttgtgaaggatctgaattcacctccccagccagattgtaaggttttaatttttgttccaagttgcaattctagttgtgtcttgaacttagtgaatgtaggtagggcctcatctttggttcttaacagatagatccaattgcatttagtgtaagcatcaacaaagctaatataatacctatatccacttgatgagtttataagggttggcccccataaatcagagtgtattaactctaatggagcattgtattgtgtggtggatttaggaaatggtagattatgtgtattaatttccataaactatgtataagcctcattcttcttttcattctttacttttcactttctaacaacaaaacttctctcaaagattccatagggccaaaatattatttcactataatttgtgaggcttacaaaattactaactactaactaattatagtatactaaattacatactagtaagtaatcttaattctaccgaaatttcatcaacataatagctataattgaacattcctaataaaatttaaagctattaataacaacaaaaaaaataatccaaaataatataaaacaattacaacaacatttaacaata

SEQ ID NO: 311143 - DNA, 2386 bp, Cannabis indica
ataccggaacagctcggggagctagagctgtcctccgaaggatcatcaatctctaactccaggtcattctcatttttcttagtgtcccagggaaaatcacgaacaacatcagggtatttacgaggaactttatggggccgagaacatagagaggcagacgcttcaaatttccatttcttgaacggagttgtacgctcattgacttccgaggaagccgggaccctaatgtcccctcctatgttccgaatctcatacaagtcaagcttcccaaaatgtttaaggtcatgcaataagccttcttgagcattaaaaaattgagttaaggcttgtttctcatttaaatgctcctgggccccgtgaggaacaataggaaaataagagttatttcccacttgttttcctttgtctttagataaaggtgccggcccaaaaggaatagaggaacttcccaaagcacacgggcccaccaaaccaccctttgaacaattatcaactttcgggccacccaaaagaccattagactcaagtaaaggaagcccattgctcaaattattaaaagccggcccatttccaaaagacccattaatcacatccagctcacccacttcatcatgcggcccaatagcacacggcccattgttattaacggtcaacaaattcccaaatgaagcattgggagtcacaacagccgtactctttaaatttaaattagatgaaggtaaaataggtaaagcctcagagttctttcccttacccacttgatcagacacacctccatagccagaaatggaagctttcttctccacgccaagaggacggtgcttcggatgccacaccgcatgctgggtcttcccgaggttagccgaagctcgagcagtccctgtcataacccctctcgaacgtcgagaagagataggagaagatctctgcaagccaaatgcacggtcgcctgaggtcgccggcaacgataacacaggcccaccatggtttcttccagccgaggatactgagcttcgagtgataccagatgaagggccagagaaaactgtcaggtaggaggattgaaaggagagccaagggccaaacatagggaaagggatcccgtcaatgttcgcaaccgtcaccggcgacgagagagtacagcccctgcgttggtgccccaaacgtccacagaaataacgaaaaatgccaatcttttcatatttcatctgcacccatttcttcaccccagaagctaagtcaaagaaacaacccgaaaacaggggtttatcgacctcaacatccacctcaaccttgagaaacttgttccatgaagccggcctgtcttcctccaattcgacttggaccaccttaccagccaacccccccagcagcctaccattagccttggaaaaatattcatggggaagattgtgaatttgtaaccaaacacgcaggaacttgaagtcaatcggaccattactggacggagtccaggcttgaagaattagggtgtacccacgaacacaccatggtccattatcgagggcccaattcctatgatcagaacactcaaaacaaaacttaaaaacattggaagtcttcccttcatccacgagcgccaaacagacactggtattttccagcatttggccacaaaatcagtcacatttaattcctccaccaccatgggagcaacaactttcccaaacaaacagcacgaggccagagccttaagagaactatcagaaggagttaggttgacagaggtttcaaggcaagaaaagcatttgcctttaagaggggaggatggaataatgattgacgccataaatatctaataaaggagaccaaataaaagcttttgacactcaagacaaacttaccaacctgaatcttaccaaccacacaaaccaccaactcgagaatggataaaaaaatacaaatgggtagagaaggttaacaaggcactaaacagagaacacacattcaaatacaggagaaacaacacaaacccaatgaaaaaggcactacagaaaggcagctaacacacacagaacagaatagaacgacacaaagaaaaaaggaagagagtaaatgaaaccagggatcgacactttggatacacgaaatgaatgggatacagaaacacacactagagagacagtagaagaccatctctcccctattattaatatttttatttatatcatgctagtaattagtgttttatagttttgaattttagtattatttagtatattttttcttaatattgttaaagacagacttttagctcccctttaatatatgtatattttgtttataccgttttacctttgcatatttattgttaccctttcttaacatgacaaagctccccttaatcatatactcaataaacttg

SEQ ID NO: 311144 - DNA, 1683 bp, Cannabis indica
gttatatgatataaataataaacaattttttatatcaagaaatgttatttttcatgagaatatatttccctctcataaactaaagaacaacaaaaactacattgatcctttctttaatattgtttttccttcaagagaaattactaacaccaatattgaggatttccctataacagatgaggagaacaacggttccaacaacaataatctaaacgattttcctgctgaaaccgatactcccctgactgcaattcctgaagaaaataatgcagctacagaccctcctctgcagcaagaagaaaatcccacagttccaagacgctcaaacagaacaacaagacccccttcttatctccgtgactatgagtgtcactctgttattcaagacaaaacttccactccacattctctaaataaatatttatcttatgaacatttatcccctgcttataaaacctttattcttgccttgacagctcacttcgaaccaacaaattacattcaagcttcccaacaccgtgtatggaatcaagctatgcaacgagagctattcgcccttctcaaaaataagacttggacatacgtttgggttctaaggaacaaaagggccataggatgtcgatgggtgtacaaaattaagtacaatagtgacggatccgtggaaagatgcaaggcaagactcgtggcacaaggatatacacagcaagaagggttggacttctttgatacattttctcctgtagcaaaaatggtgacctttaaactcttacttgctattgcaaccatcaagcagtggcacactctacaactcgatgtggacaacgcatttctaaatggagatctcaacgaagaggtttatatggagcttcccaaaggacttaaccttcccgagtcaatggatcagaattccaacttggtctgcaagctcaacaaatccatttacggattaaagcaatcctcaaggaagtggtatcgaaagctttcagacgccctcatacaggaaggattcacgtagtacaaggccgattacaccttgtttaccaaaggccacaatgaatccttcattgccttactagtttacgtcgatgatatcattctagcacggccaaatcttcaactattgcaccagttgcaaactaacctacacagcatgttctctctaaaaacgctaggcaatctaaaatatttcttgggatttgaaatagctcgagcagcagaaggtttatttctatcccaaagaaaatatactcttactttactcgaagatcacggttttagtggtagcaagcctgccaagacaccaatggatcccaagattaaacttgatgatcaacaagggacacctattgaaaatccttcacaatatcgccaactggtaggaaaattgctctatcttaccctttccaggcctgacataacttacgttgtcaacaccctaagtcaattcatgaacactccaaggacaccacatcttcaagcagctcatcatctgctacgatatttgaaaggcagtcctggacaaggcttgctctattcgacacaatcatctctgcatctcagagggttttccgattctgattgggcttcttgtcaaaccacacgtcgctccacaaccagtttttgtatattcattggagattgcctagtttcctggcgcacaaagaaactgttgggttttgtgcc

SEQ ID NO: 311145 - DNA, 1505 bp, Cannabis indica
tcattttaatagggggataattgcaacgaccgcttagttatttttgagacttagcagataataaaggtctaaattcactagtggacttttaattattatttttatgatttcagagatatattttaattctaagtatgccatttatgttatgtatgaattttatgctttttcgtatttttatgcccagtaatagtggaatgcgacgtatggcctataaaataacttttgtatgatttagtgtttctagaatagcggggaaaactagttagacatttagaatgtcgggattagtcggggttatggttttgaccattttgcccctaaagtcattttatcatttaagcatacaagtgggggtagttttgtcatttttgactttgaggttagatggcctcttcttatgttggaacctggccaatattgagttaatttgattaagttttattatggatttacttagaaaattaagttggaaaaaatgataaatgaagactatcagcctcttccctttctctttcttctttcagccctaggaaattcctcaacgaaccagaatttttcttcaccaatctcagtaacttttagctagaattaaagagattttgggagctaggatccaatgtaaaacctagaatcctttttccattgcttttaatggtgaaagttaggttcaagcatgcattttttgtgttttagttgctagttaggtttgatttgttttgctattattttttgaggttatgttgaatttgtttaaggctattgggttgtaattaggtgtttttttttgaagttaccaacttttagttcacgaactcaaacttggttcaacaatggtgattttagcatgtttgtgtttgataaggttttgccactttgaaatggtttattatgtatataggtgtttcagagcttatggtgaagtttggggttgttttgatttgaaatgagggtctttgtttttctacagtgaaaaacagcaggccgtttttacataaataacctaccttttttccaggtgcaacaccctgaaaaatggcaggccatttctagatatcgataggaaaacctttagttttgagtttaaagtccccgaaaagtgatttagcgtatcatttattaattttgcgtatattgtgacttaggggcatgtaaactgtcaagcagcatttccactcaagttgaccgatacacttaaattcggaatcgaggtaagattattataatgatatacatacgtgattacatgtttagcgtgttggcttttgtgccctaaataaaactcatttgaatataattagatttactaattaataaagatcagaaatcattctatgttgcatggttcacatgatttatttcatgattatgtttaatatatcaattttattaagtccagaacatatataaatatatatatttgttcatgataatagtatcgtcagcacagtggattataatcatgattatatgttcaaaagtttgattcccatgatttgtcagtt

SEQ ID NO: 311146 - DNA, 1887 bp, Cannabis indica
cttgtataaaattctgaactgggcatgcccccacaccaaaagaaattggttatctctttttcggtcatggctgttccagcgagaaagaatgccgcagggggcttctattatcctggtactcattctagcaagcctaaaatcattgttgacttgcccaacaaagtgtactttcaaagacaacttcttctggacatctggtctttctccagtcagcacaacctacctttcgcaggcttcgtaagtgatttgttttcatcttgctcagttacattaatccttgttctttttatttttctgacaaaattgttttattttctttttatagccctcttgacgaggcctaccactacccccaagatggtcagtcggcataggcgcctgatgactcttccctatggccttaggtcatgcgactttcttctgaacgaggccaatcttgatcggtgggccttctttcggacaaggagtgtacttgtgattataagtttcccaagtattcatcttagcagcaggttaccatccaagacaaggataaggctttgaatcatgtggctcgggcataatatcttcaaaaaactacccctcgggaagtcggtgaaggagcatcccgaggtaatcaatgtggttggtcccccacagtacttagggctgaacgtaacacattattcaccttccaagatactcactttaatttttatatttgggattcccttctgttgatagaattgctcctaagtatgacagctggtacagaatattccacattcagattaactgtcatgagtcgtattattgtatagttgagcagtatggtactatggcagatagggaaagtcatatagatgcgagctataatttagaacccattgagccctttgacatattcaagattacaggctgtagagatttagtggttattacggtccttctaccccttcttccagtgatagctcaccctctagtgaccttggtaaatcctttaggtgaaaaattatattcctcccctttttcatctgcctttttaataattgtaactctttactttgttttgcaggcatgggttgttttgatgatatcatagagagaaaaagggaagaagagggtatccaacccaggggtccctacgactgccaaggtggcaccccctaaaaggcacaggaaaaccactacccataaaatgaagtccttgtctgaacctattgatctcgaggtctctaataccgagactcaagaaaaagtccctcctctggttgtccctaacaccaatgctccccctcttaagacagctcgtgcttctgcctcctcgagctggatcattgagcccttatcgaccgccacgggggaggctagatttgaatttgctcaggcgtacggggttgcttgctggcgcaaaattctagctcttctccctcctggttgggatttaatccatctcgggagtccagaagatatgcttttgaagagattggactacaacatcatggtaagttggccttattattattatttttttccctcctttctcatattcatatgttcataattctccaagcttctctcatctcgttttcttctaatcgaagactctcggagcggctcaaatacctaaagggcgaggtccagaaattactatcccagtgcggggttgtgactaagcaactggataatgcctagcaagaaatcacccacctcagacaagaagccgagaaggcaaaagaagaagctaagaataccatcaaggcccaagctgacgaatttgagaagcttgcagagaaggaggtcaagatgagaggacgatgcaaaaaagttggccttcgtactgtgtatcgagcctggatgctgaatcctaatatggacaaaagcttcttggaggagaaggaagaggaa

SEQ ID NO: 311147 - DNA, 1423 bp, Cannabis indica
ggagacacttaattccgctgccatcactgtaaggtttcttaacttttatgtgtttttatttatcgttttagaagttcatatttaggctgttaaatcaacatacttgtgagtagatctaagatcctggtaaaattaattccaacagaatgatggtggcaaagacctttgaaagagaaggaaatgactcaaggatgagtagttgagcatggacatcatggtataatactttgagacctatcaagaattgaaggaccttctcttgattctgaaattttaggttgtcggcagaagcttgacaagtgcaaggaatatgaggtcgcaactcgttcatctcatcccaaatggcccgaattttgttaaagtaagtcgtgacggagtcatctccttggcatagatcactaagggattcattgagttcaaagagagcgaggtttgttgccttggctgaatcttagtgagctcagcccacataaccgcaacaatatcgagaaacatggcactgttcttgatgtcaagggaaacacagtagatgaaccaagacatcaccatatggttacatcgaatccaagaatgaaacagaggactcataggcactagttgcggaagagtaccgtcattgaattcagttttgttttggcaccaagagcaaggtgaaatctctatgccattactaaaaaaattgttgtctgaaagtggtggggtgacaagtatgagactaggatgatctcatgagccaacgaagtaggggttgtccttgttgggagtgtagttttgatgatccattggctgagaagtgtgggatgataaaggatgatgtcccacctcatggattagaagaacaccaacagtgaaggcttggttggcttgcttagttacataatcaaagtcatcaatagagaagccaccaatggtgatgggaggagcgtcgattggaggttgggaacatgagactccaaccaaatttgtatgactagaagacaaaggattcatatcttgatttatcagaggagatggatcttgaaaaattgggtgaaccatgggatcggtggtgtcagtcagtcttggatggcagaaagaaccacaacaacaggtgttgtcgatttgagaggaagtggcaggagcaagagggtcaaggatggatcctaagccagctgccatggatggatcagagttcgatcttaagccaatagcaccatgagagcccacatctagaggtaatggtggtcaagcctgaggaggaaggcagctgtgatggcgcgccatggatgtttgcagagaagacggaactggtctgagatgtgcagaaggaaacatggccagagaagacggagctggttcgtgaaatatggatttggtctagaaagaaacgtctgataccatcttaggaaagggagagaagatatcttttatttctgagagaaaa

SEQ ID NO: 311148 - DNA, 998 bp, Cannabis indica
agatggttcatgataataagagtctcatggtgtcttttaggtcacttgatttctgcattcgatatcatgaagcttagatgaattaaacacccgactgttcagatgcaaccagttgctattcaacagagccgtcgtatacccaagaccggctcaaacagtgggcagattgggccattacacaaggtccccattttgtaaggtcccttttttttttattttttcattttgaacaaaggtccttttttattattattttattataaccgtatctttaaaaaaagcgtaatggaattgtagatgatttttttggggattatttaaaaaaacacaaaaactaccaaaaaaaattacaaaaatatcattgtacgtaattttaaatatttttacagtttttaaaattttatttacataaaatactctcttgatgtatcttttatattgtactcttattattttgttgataattttttgttattttatattattttttatgttgtttggtcgttatttttttgtgattttcttgttattttcttgtatttatagaatacagtaaaaatgtaaaataaaaaagttaaaagtgtaaaaaaaattacaaaaatatcaattgtatgtaatttgttttaaacttttgtacaaggtctccaaaatatcaactccggggaaatgtttttgtatgtggatgctagcgtgtgtgcagatttaattagtaataatttacatggtatgttttatgctccatgcatggttgttcctcataaagctcatccctctccacttctggcagaagccattgctcttatccaaaggtctattactctctagtgacttgggtacaataaggtttatgccctctctaattgcctcaaattttgtcaagcaatccgaaatcataattgacactacaaaaaatgtcacttttgccagtgtgacagtcagcaatcccgtgatccgtaagggaaaataccgagtaagctgtgcaatcccacaccgcctgg

SEQ ID NO: 311149 - DNA, 4934 bp, Cannabis indica
ggactagctagtgtgacgtctcgggaaatcggggcgttacattgttggtcttggatcaaatggtactgaaagttctagaaaaacaaaatttataaaatcgattgttcctgcaaatttggctactgttgcaaattcaaaatcttttggtgcataaccgtcttctgcagcagcaaaatctctagaaagcataaaaaaggtaagctctcaggcgagaaggtttattcctatttatcatttttgtggcattaatgggcatattcgacttaaatgtttcaccatgcaaaattcgttcaaattaaaatattttggtattttgaatatttttcaaagaacataatactccaaaacaaaagtggattgaaaaaggaaaatgtcttgctagattttttgataaaagttctgcttctcaaatgtagtattttgacagtagttattctagacatatgctaggtgacaatgattttttggtgaatatcagaccaatgcaatgtggtgtggtcatatttagaaatggtttagcagaaaatatcattggtatgagaactctcaattttaaagggttacaaaggttgaaaaatgtgatgcttgatgagggactaagggctaatttactcaacattagtaagattagggtatactgtaaattttgacagtgatcattgttttgttcttaacaatgaaacagtgcattttacaagattttagaaatgttgataattgttacactcttacttgtcattctgtttgtgataatactagtgctataaattttttcaaaaattttgttcgatattcttgtacaaaatacattaatataagacatcattttattagaaaactttttgacaaccaaatattgcagttagaatatgttgatattaaaaagcaatttgttgatattttactaaggccttagattcaattcagtttgactccctcataaaatctttgggggtttgcattgtctaattttttttttttcatttggttctctattttgtacaaaaattttgagtagttcttatcttacatatattcttctttcatcattggttgataaaacatgtttatgcttttggatgatatttatcttagtgtcatgtactttttatacttttgaggttgggttaaaagatttgagttacttatatgtgtgattgggatactaaaatattaatacagacttgagcgatctttgttcagtttcttgtcaggccccttgttggaatagagctacccatactgaagtgtgaataccatcttttgagtaggttaatacttggtaattaggagttatgaagaggatgcgaaaccatagaaaagggctactttcagtatggtgtgaaatcatctagttgcaagatcaaactaaaaaaggagaaaaataaaaatattgcaaaggacaatgatcttattttcattgcacacattaatgtctgataagtgtgtacaagtttgtaagtctcctctactaaaatatatataagaaaaactggttcacattttatgtaatttgtctattttttctcaacatctagtaagtatggtttgtatttgagacactaaattcttatcatctttaaaagcatatcatggttatttgttcctttgatgaaacaaagaaagatgaacgctttagaataactcaatttttgtataaaatattttagttcttttgtattttatgttaattttgaaattcatacaataaaataaaaaaagaggggagttgtgtgactttgtaatggctgtatgattaaaatataaattagtagggcaataagcattaattatctttattttatgattatatatgaatttaaatgttatgggccctattttcagaaaatagacattagagttataatttcttaattttagaaaaaatgacaattggagttataatttcttaatttcgaagattttattaaaatctaagtgtattatttatgctatatgtgaaatttatattttttatgatttttactcagtaacgatagaaaatgcgacgaatagctgttagagtcactcaaattagttttgaacttttgttctagtgggaaaatcctcattgtgatattggtatatcgaggttaggcagaattgtggtattgaaccattttacccctaagcctaaaggttgcttaggtaggaagcaaggattagtttggttatttattttatttagtgagtgaattattccactaattcttttagctggccatattgattaaatgctaagataagttaatcttatcttttattagattatcattaaggtgaataagaacaaaaccacttttatctttctctctctctaaccattcgacctcaagagaaccagaaggaaccagggtgttcttcatcagattttggtgaactgtagttaaattcaaggggtgaagatccaaaggtaggccctagccctaattcactttgtttttagtaagttgtggctaggttcaagcatgcaaaaatgagaaatacttgttgtctgagttagatgagtgttgatttagttttttggattaaattacagtagttttaagcttatttgaaattatttggttggttgtttgttgagttgagcaagttcgagttcaagaacttaaacgtcgctcaataatggtgaaaattgcatattgaggttatttttgattatattgcttagaattagtgtatcatggtatgaataggtattatggagctcagtttttagtttggggttattttgagcaagatttaaggctttgttgttttctgcaatagaaaatggcaggtcggttctgtggaaacggtctaccgtgtttactggcaggtaacccaaaaaaatggcttgccatttttgcagaatcgacctgccatttttcagacagttttcttgtaatgttctttttttttttgtgttcctcaatatttagggcatttccatgctatttatcgatagggaaactttaagttttaagcttaagtaccctaaaaggttttagcaagttatttacatgatgattgtgacatagggcctccgttcagcgcgtgaatttccattcaagttgaccaacacatttgaattagaaaacgaactaagattattataaaatatgtatatgtgtatgtatgtaaattgcatgttgtgattatgtgattcatatactatcaagactagtacggtagctgtacaaagtgcattggtacaatatatgatgttcagagggtacgatccagtgttaccaacactagtacgagatgagtatgtcgtgcatgtagtacaacactcagtagtactcagggtacggttcagccctaccaacactattatgagacatgtacttagtgcatgtggtacaaatgtcatacttttgttaagaacattcttgatcatttgttaagccttgtagataggtgtatggacgcctaaatacaagtcagtaatatgttgtgtgttatatgcttttcttattgagtttgtcaactcacagatattgtttacatgtttaggtaaaggaaagtctaagacttagtgagtctagagctcaaggatgattgaacatgtcgagatggttaaagctgaagagtttgatcaaaggatgacttggaccttattttgtagtcgttgtgcgacatgtttatagagtatattttgaatgtgtttgtaaattttaaagacgggatcccgaattgaatgtttggatatatatgtattacaaaagtttaaggtttaattaaaaagtttaaatttgacatgatttttgagaaaccctttggttagtaactgtgtgcactgtaattagaaaatcactataaaatagggcattacaactttgatatcagagccactatgttatttatcgaatactgttaaaatatgtacaatcatcgtcagagacaaactcgactcacagtttaataagcctttacttgtttagtaagttatgtgattagaaaagcatgataaaaaacatgttagcaatatgttagttgtttaaatacgttgcctaaaatccatataaataaagtatttaggttatatgtgatcgctgactgacgtacctgaattatgggtttgcaggctaagtcccataatatggtcgcctagggaaacacaagaagtcaaggtaatatggttgagaccgaaggcggtcgtggaggtcaaaatcctctaaatccccatggacgtggcagatgtcgtgggaggtttcaaagaggtggtatgaaaatccatcacaggctccttaagactgggggaaaagatttgcagaaatgcaagtccgaattaatcagcaagatgaggagattcactagctaagatagcagggtcctcttgtagtgcctccatagcaagtggcaactgctttggttctagcagtgccagcagtatagcctattgttggtaaccgtatagagcctttgtatgagaggttttgcaaacaagcacctccaacttttctgggagttccagatgtcatgaaagccgagtagtgactgacaataattgagagaattttgaactttatgggtgtcactgaaaatgaccgagtgacgtgtgccacattttagttccaggaggacgccctcgtatggtgggaaatggtgtccctcgcctgggatgtcactgcaataacctcggaatagtttaaggatttatttaattccaaatactacaataagactgtttgcagtgctaagaggaaagagtttattgacttggttcagggtaagaatatgtcagtaacagagtatacaacaaagtttgatcgactatccaagttggcttcgggtatagtgcccacatacttcagtaagaaggaaaattacttggcgggtttgaaagccaagatcatacatgatctggttattacaacaaatgacacaacgacttatgctgagatggttgataaggctctttgagtcgaggattgttgggttttatgccc

SEQ ID NO: 311150 - DNA, 1683 bp, Cannabis indica
tttattagtaatttgtaaatagtataaaagtctataaatatataaatgtatagctattattgaatatagaatgagaaaatagaattttggttcaattagacgattaatactgtctcgaagagtgcattttaagaaatttatcttgttttgaaaaggaccgttacttatcataatgtaatcaaaaaactcgaatgagtgaggaggtggctgcataaaagatatggtcattgtgaagtgaagtacataattgtctgaactatctacatgcctcactatgtacttatgaactgaaatgaaatgtgcttcaactgttgatatttcattcatgtagagattctcttgttggctcaactacaattcccctatatttagtacaaattcattcaaataatataggacaaaggcaaaaaaaaaaaaaaaaaggtagccaaaccactaaatagtgatgtgctaactttaaaaggtatttaagttagtttggatgtgtggcaatcggttaatttacatgtcatattcttattggctcgctctataaccgtagcaatcacctcacttgtgttatatattgtgttgtcttttgatatgtgattatttcatatttgatttcttcaggctttaataaaagcttgggagaaaaagcttcttcaatttttgcgaggacaaccattgtaattcttgctataaatatttacttaatttattaagaaatttgttaaactaataatgtgaaataataaaattcgcaaaataaccacacacaatttactctatgcgaccatgatgagtcaatactctatttatcttggcagaccttatggctcaaagctcattataagggtaagaagagttaataagttggtcagttgcttgctccatcctaacaaaaggattgctatttatttattttttatttttttataatccacattttgcttgcttgttatatttagtttagcattagtttgaagatttgaagtgaaaagacaatattattacatgtaaaaagacttgtatattatcgtgctacaaaagtaaaactatgatcataaaccaatatcccatattctaaatattagatcttcttgacattgttgaatgagaacaagaacaaaccagaaaagaagagagaaaagagagagtaaaggcagagagaaaagatgatgaaaaagatgaacaaagagaatgaattccttcattgattattaagccattgttcatgacttatatagatgcttacacttagatcaagaacaactgaaactaactgaaactgttacaagttggttaacaagatacaactgtaaaataacagataactaactaataatagtttctaactaactcaagctaacagtatactctaacaggccccctcaaacttggaattggtattactaccaattgtaagtttgtttcgaaaatgataaaacgagagcttgagatagccttggttaaaccatcagccacttgatcgaatgcaggcacatgcttaacttgcaactgcttcggttgaactttttctcgcacaaaatagagatccaactcaatgtgcttagttctggcatgtaacactggattaagagtaagcataatggtgctaagattgtcgcaccaaaccacaggaggctggggtagatggatatgcagttcatgttgggttttatgccctaaataaaactcttt

SEQ ID NO: 311151 - DNA, 836 bp, Cannabis indica
tgtcactaaaaataactatttttgtagcgaatataaaaataaaaaaacccttaataaaaataataatgtatcatttgtttaaggaaattctttgacaataattaatttctgttgttgattatacatatgttgtctaagtgtccaataatgaaagagaaaaggaagaaaactttagcttagacgaaacaaattaattatatattcttaaaaataaaaataaaaaaatcataaactttttgtctctcaaaatttaggcaattaataattattaagaacctatttaattagctatagtacttacatggagagatttagttataacatgccatcatactctatttatttgtccccatctcttttagcaaatagtataagattcttgactatgattgttaataataactataattattatatataaatattggatggcagctgcatagcatatataagaaaccttcctaattaaattttttttttttaaaaaaaaaaacaaaacaaaaaaaataaccaaattatttagctatagtacttccaattccatatgattgttaagcattaaaaattgtcttttatatgactaattaaattgatatctcaaataaatttatatatatatttgtggttgagagatttacacacaacatttgccaaacatgtaaatttaaactttttttttattttattttataatttgattcactttctaactatgtttatctgattgcatagtgaaaatatagttgagaaagtaaataatgtgaagtgtacataataaaatatatagtcgtgtaaggtctctatttcaagtttcaattgggtccttacatccacgg

SEQ ID NO: 311152 - DNA, 826 bp, Cannabis indica
tgatctgtacctgatacttagattaaaaggggatctgacttaataaattctacacagattccctctatgatcgatgatagttgatgatttttagagggtcttagcttgaatgaccactagggtcagttttctttgtcaatccctaccaagttcatgaatgtttgaacttagctagggttaccactttagtccccatgtcatagttatgttcagtgggaaccttttccactatgatctcttcttgtgtcactttgtctcaaataaagtgatatttaatctcaacattcttggttctctcatggaagataggattcttgtagagatgtacacaactctgattatcaaagtatattataagtacactactcagcaagtttacctcgtttagaactcctttaatccacactgcctcttttatagcttctattgatgagatatactctgcttcaatagttgatacggccacaactggttgtagttggactttccagctcacacaattacctcaaatcaaaaagtagtaagttgaaatagacttccttgtatctatatcccctacgtaatctgagtcacaaaacccttctaccaaagtttggttttaggactgtctaaacaccagtccaatatcagtagttcctattaagtacctaaaaatctatctcatagccttccaacgtctctttcccgaattagccatacacttgcttaggacacttatagtataagcaatattcaatctagtactcaccattagatacattctagaaccaactgcatttttttagagatattcatatttaggatgttaattcaacatacttgttag

SEQ ID NO: 311153 - DNA, 1846 bp, Cannabis indica
agtaaaaatattttcagaacaaaaaaaatatctatcaacgtaagctgcgatttccatacaatcatcaaacatgcacataaactaacatgaaaccatccaaatcaacacacacatcgttttaaatccatatttcatgaaagtaaatcattaccatggctttgaggtcaattttgaggattatttactaggatctagatttactaccatgtaagttatttaacatcctagatatgaatctctaaaacaatgtaatttaaacacatataaagttcaagaaaccgtttattggttgcagtggaataaaatgactcattccgctcagatctctaactcttgtatcctctctatagtagagtatcacaagatttgagcccgattctccttcacttgaattagattcttcatagtcttacacactatcattgagtaccaacttggtatgtgtgggcacgtactctatcactatagggtttgaaaattgaagagagaaagagagaaagaaggattcgaatatgagagagatagaaggttcaaaattttgattgaaacacttagtacatcatcttttaatttgagaccatcactgtctatttatagaaatccatctaggtttaggttaaaaaattgataaaataaatggcaaaatcaagcacatgtgaccggccataggatgtgggcctaccatttgcaattttttcatttttcaactatttatcttatttttctcaaaaaataccatattttctaattcaaccacttaaatgccaaaactatttatttaataattaaaattaattatcaatgtaattgtgaataatcacaattaccttccactgttttgacatcagtgtaattgtgaataactatatgttctggatttaatagattttgtcacataaaaccataaacatgaaaactacatgtatacataaataaaaactaatcatttattgataacaaatcagattaaatggaaattggttttatttagggcataaaatcctaacacccaggggtccccacgactggcgaggtggttcctcccaaaaagcacaagaaaaacactacccaccaaaagaagctcttgtcaaaacctattcatcttgaggtttctgatgacgagacccaagaacaagtccctcccacagttgctcctaacaccaatgctcctcctcccaagacggctcatgcctctacttcctcgagttgggtcattgagaccttattggctgtcgcaggggaggctagatctaaatacgccgaggcgtacggggttacttgctggtgtaagcttcaggctcttctttctccttattgggatttactcaacctcaggagtccagaagtaatgctttcacaaagcttggactacaaccttatggtacgttggccttattattatgatttattttttctctcacttctcttattcatatgcttatagttctccaggcttctttcatctcgttttcttctaactgtcgactttcgtagcgactcaaatacttcgagggcgaggtctaaatattatcatcccaatgcggggttgtgactaagcaacgggataatgcccagcaagaaattgcctgcctcaaacaagaagtcaaaaaggcaagggaagaagccaagaagaaggaataggaggaaggcgagaagaccattcaggcccaagctgatgaatttaagaagaagctcgctgagaaggagatcgagactatagaacgatgcaacaatgttggccttgatactgtatgttgagcttggatggcgaatcctaatatggatactgttgggttttatgccctaaacaaactccatttcaatgtaatccattttattcaatatc

SEQ ID NO: 311154 - DNA, 616 bp, Cannabis indica
gttattggtataattaagtatcgcataataaaaaaaaaaacattaaaaaaatattactaaacaatcacgaagaagtaccaataaaaaatattgaactccactaatacctaataacaatattctattacaccataaaacctacaaaataccactaatattactttttagcaattttctttatttattgatttatttagagaatgctttgtttatttctttcttcgtcgttctctattcttggtaattattcgtaaaaaaaaaatattttattttttaatgcaaactacaaagtagaaagtcaaaattgaaacaagtcacttaactaatagcgatgacatttcagttgtcgttttctatttctagaatttctggttaaataacaaatctttttaacgaagctgatgattgttgggataacatattataaatcaactagtaaattgagttttaaataaaatatgtttactcataaattatattaaaatattgttatgaaaaaaaactatattaaaagattattatacagatacgtgtgtaatatttgttgtagtttgttaggacaaatacttcacactgttagacaatttatatgtataaactgaaatatatatgttta

SEQ ID NO: 311155 - DNA, 490 bp, Cannabis indica
aagtttagcatttaccctaatggcatctcttgcatcacaacccttactcctttggcaaaagaggttaggttaacaacctgaacttagaactggacaaaccctagttgataaacaactatatcgacattccgagcgatataatatttccaccttcaatcagatttagcctccttagcggccttagcaactgtttccttaaaacaaaagtttgccaatcggtccaatttaatgtcatttttcatcaccatgctacccgggatcaattgtgtaagttttactatcctgccactcagataatctcttactttatagcatacactttcccccagcttatggtagtagaagattcatacccacactaccaacttcaaacctgataagcccacaattattcttactagatcgcttcaggtacaccttctagtacattcgcgattattcctttctcataatatctttccaaccagaattaatgctaataagcattacc

SEQ ID NO: 311156 - DNA, 581 bp, Cannabis indica
tagagtgtaatttcctcaataaagaacacctctatttagggccagtcctagtctaaggtggattaagtccgtacctagagcctactcttattaggggtccaaatataaaaaaaaaaacttgtaataaatatacatatttttttaataatttttaaaagtagtaaaaaggtaaaacgacatatgtaacaatttgttcaccaatccaagtacataaactttcatacaaaaatacaatcaaagtttactaatcatccatatcctctttggtgaaggtttttgaaaccatattgttccatataaataataatggtacgtatgccaataataatactaaattgattgttgtgtcaaactagaataatagaggaaaaaatggatgcatgcattgagaatattcatcatgccaataaaaaatcatagcaattgagtgaatgatcaaaactgagtttcatattaaaatgaagattaaggatccaaatgatcgagagcaaagattatttctaaacatcttaataatcttaatgtaagactctatttaataataacctcgataattagttatacattttataaatctgata

SEQ ID NO: 311157 - DNA, 1088 bp, Cannabis indica
cttttgtgagaaaaataaattacaaccaaacttttttttcaagtttaatttttaagcatttggtcaatttgttttacaaagtttaataatatatattcgggtaaatattattttgtaccatgtattttgtaaaaattattaattggaccatctgttttgttaaataataaaatgaaccctccaaaatgataaaagtaagaccttaagttcaattttcgacattttctttcttaatataaccaacatgaagacaattcctaacacaaataaatacaaaaaatgtaaccagttttgtcataatacatgtctagatcgaattatattattaagttttattttgacaaaaaattaatccaactcctagttgtacaattttaaaaattacaaaatctattttatcattgaacaaaaaaaaaaattcagtatctaaaataatatttatcctatacattcataaatatcatgtacatgcgggaatatagatgaattattttacttcttatttaagattatagttaggggatttagtgtgttttgtccccataaaatgcttaccatacgaattaatacagaggaatgtttgtagtcatatctgttcaatcttcattcttagataaattattataaaatataacataataaataaaacatttatgttttttcaaagaaaaaataaagaatataaaatctcaacattaaatttacaatgaactaaactcattactcatctatacgtgggtgaattttcacagaaaatttaaaaagacaatcaataaggagtaatttataactatagtactgcagtttatagctagcctgaatataaatgttattgtcagtctaacatatatatatatttatatatatatatttcatctactaacttgaaaatataatactaaagttttttaacaatttgattgtaattgttttgcaagtcatgatatatattactcattagtcattcatggatatttaggggtgttcattagattacatctaatggatttggactcatcccatccaatctaattatttattggatattggatttttccatctgatatccaatccaattgaactgagtc

SEQ ID NO: 311158 - DNA, 1620 bp, Cannabis indica
actttgactttgactttcgggttgacttttgactttggccttttgaagacctcttttgaatagggtcttgagttgttgatctcttgatgaatcttttgctcttgatatgcttgttgaatccatttagggttgctttaaaaagtttggtaaaaataccaatttatttattttctcttttaattttgctacaaaatcaacaaatcattaataacaaataataatcaaatatttgttaatcatcaaaacaaggagatataaaagtttgagttaacagttaacacgaggagacctccggttgccccatctgcatcatcgggtctacctcaagaccctctaactacaaattttgatgtccatgttctagccacaactggaattcccatgaacacttcatacatggtcaatcctgctgccaggacaagcactttgaatttggtcgctaaagttggccaaagtgacacgaatatctcggtagatctaagtagcaggcccttacctccgagggaggaccctccactggcacctcccactgaaggaaggacccttagggaacaacccctaagaacaacaaccggatctcgtctttagtactatgctggagagacagtaccaggaatcgatgagcctgctattggtgagccccttgtggacttgggagaagatctcgagttagccagactaagagaggccacctgtcaagctagcataactgaagaaccacgtgctgctgattgtgatgtatttgctcgcaaagatgtgaattctagagatggatggatgaccaggagtacatccttcgacctcaccagatggagctcgatcaccgcaacagagaagtcagcgatctgataaggaggttcaatcaaataaccaatggaagaggccaggatctcatcagagatccactccaaggaagactagttgatagattagggagggtctatcaacaagctaaccaaccaggttctttaggaactaggatagaccttcccctacctgaaggaggataggccttcccacgaatgtctaatggcgagaacagctagatcctgacaaccaacgacatgggggcccaaccaaggatctcggactaaacaataacccctatcaaccaaactttggctagctagccacatgtaagaatacctctggcaagctaagggagtacactcccttcctaaggggagcaagccactcaaaagctaatctttaactggctaggcctaggaacgggtggaaacacccaagaaaacaacaattcgagaagtgaatacagacatttagattcaccaaactccaacaattattgtgatctactccatttcaacgcacaggctccactaaccagttagggagacatggttggccaggccctgcctagtatagggctggctagccatggacagttgcaaggcctagggctggctggccttcaacataccctttcccaaggtatggcatgccatgctctagctgattcggggctgtagctgaatcaagaaaggttaattaaccaggcccctatagcaaaagatccttctttgcaagcacatttggatcaaatacgagatatgctcaagggtttggctagcccaaaaccatcaaaccttgagctagata

SEQ ID NO: 311159 - DNA, 2313 bp, Cannabis indica
agatctaagatcctagtaaaatagtttccaactgttccaataatgttgcgacacatggagtgaactacttaacttatattttctcttgcaaatctagcgagtgagtgtttgccagatttttacgtcaatattttggcactttcattgagagtcataactcgagataataatcaagatggttgcaacaatatcaacaagcgtttaaagaagcactacaagtggtcaacccgctaggggcacacttgttattggagttggtgataggacgacacctgcatcccaaatgctaggtggaggcctcagaactagttcctcagctcatcttacaaggccttaaacaattgatgctactgatgccaacaatcgaatcccaccttgtggaccacacgtagagatagaagaccccaaagaagtcgatcctcttgttgaacagcttagcccattagttgataacttacaacagtagttgtaaaaagctcttgacaagcaatatgaatagttccaaacctggttcatggaacattgagaaactttgaaaatcaaggtgttgaataagataaaatgttgctcaacaaattcgagaagcctatatatccgacaatgaaatggctcctctggaagttgcttccactagagtttggaaacaacccttgtgtgccaactagccatatggaataaagcgctcaaggggaagccttattgcactaggtacctttaccattccttgtagtcatactactcagcgtgtagtaggcacttaggatccccaaagaaatgaaaactatgagcaagtatccaaaaggattcacacttgagagcgtaggctgatgggccctccacctgatgtggagcgacctgttagggaaatggtctatgagtgagcatccaaaggacttagactcgagaacgttgacctacatggctagcacttgccactatcaggaccaactgtgaccctacttaaagcaatctaaacaatgcgagaaattgatctccttcgcaggattctcctcatacgtctaatgattctaggcctcattactctacaaagaggaagggaactacagccaaccttgggggagggaattgaagactctaccatgaaacaggagggtatgagattcggagagtaacgaccaacgaaccactccacactcagaagtatttccatgatgaaaggggtgttttatgtaggtacttcgtagtggttttatgttactaaattaggtacacagtggaaatatattttatgattatgattttacaacattccatggatctccatatgtacatatattaaatctaaaataaaagacgaaaggaattatttacctcttgaagcgtatcagggtatccttaaatcttttcgtaatttgtatccttaatatggtgatgaagaactcacactgtgatgttctaaatcttccaccacacacaaggattagtgtgggctaaaaggataaaaatgtataagtattcttgagtttttctcaacacatgagcaagaactttgctttctttgagtgaataataatgcgattaacctttttaggtttcctaaattatacgtatctatagatttaggattagaccaatatataataaatataataaaaccaataaaataataaaggttttatcaaaataaatatttatatttcaaatattaaaataataatatttaattatttgaataaatatatataaccaattttgtatagacatttattttgaattagatatttaggttttaattaaatatctattaaccgattgaggaaatctctcaaccacttgagagaatatgtcaaccacctagaaaaaatctctcaaccactttgagagaatatctcaaccactataaatatctataactacttttcatattcaaattcaaataaatatttgcctcttcaattaagtaattaaactaaaaaaaaatccaatagggctcaccttatcgtataagcccctataattgtgtcttaatatagtgaatgtggcgccaccatagtcttaaccagatagaggtggtgtctttgtccaaacaacactttgtcttttccccaatttatttaaacaataaatttgaaacaaattatgtattacaaaataaataattactatttcaaaaattcaaaatatatttttcccaacatcattatacaactttatccattcccttaatagtatttcaaggtggtgattcgaggaccatggacctacaatactaagctccaataaattagattatttattaaatctcatcaactgaataatcttacttattaattccatgattagtccactata

SEQ ID NO: 311160 - DNA, 4344 bp, Cannabis indica
attgtatagagttttatttagggcataaaacccaacaatattgttaacttagggcacttccaataacaatatagaagaagtatctcgacaaattgccaacctaagtgttcgtcacaattgatatttcaccctaataactgttgaacatctccgagaactggtgaacaactttaccaaaactaagaaaatggctaagcgatgtcaacatcacttaggcctcaaaaaagtctaggatgtttttccacttaccgagcgtccaggttgacgccaggatgtcaacctgggcgctgggtgttgaacaactttcagtaaaatcaccataactcattcaatattcatctgaatgacaagattaaaattgtattttaaagctctttcagagctttatcaagtaaaatctcacaccaatgttacaattctaaagattttaagtccaaaatttgtactcaagacaaatataattatttctacagattgcccgaaaatgattcgacgaacaagattcaaactctaaaaattgacgattttcatcaagagtttcaccgttagatcatcatcaatggtcaagatcaggccaaagtaaatttttcatattttttgtattattttataaatattttaataagacgtcattccctataaatgagagctcctcaagctcaattaacacattcttctaagaccccataaggtcagagtatttctctctactttctcactcttaagattagacatcttgccttagccagttttcttgtaatttttatgagcaataaaatctcgaagtagcatagctccaataccgtcgcaacacaatgagtgaactactataaattgcatgtgtctctctatttattacttaaacttatttgtcctcttgccaatctagtaagcgaatgttgaccagatttttgcatcaacattttagtacttcctttgagagccacaacttgagatcccaatcaagatggttgcaactaggtcaacaagtgttgaaagaagcaccacaattggtcaacccattaggggcacgccaattgttggagctggtgatgggacaacacctgtatctcaaatgtcaggtggaggccacgaaaccaattccacaacttgtcctccaagatcaccaacaactagtggttttgaggccagtagtcaaaatccacctagagatccacacgtggagttagaagatcccaaggaggacaatcctcaggctgaaaaacttagccaagcagtggctaacctaggagagtctcttgaaaagaaacatgaacattttcaaacctagctcatggacactacaggaatgttgaaaatcaatatgtcgaacaagagcagcgaagaaaaaatcttatcaacgaatcctgcaagcctatagatttagcaatgaaacagctcatccatgagttgctttgattagagctggaaacaacccttgtgtgccaactagccacgtgagaagaagcactcaaggggaaacccttaatgcacgtggtacttctaccgttcttggtagccgtagttctcaacatgtaatagataatgagtatccctaaagggatgcaaactagagagagcgttcgaaaggacttagactcgggaacacaaaccaatgagccccccacttgctgtggaacggtcacctattagggaaacggtctacaagcaagtgtctagaaggacttagactcaaaagcgtggacctacagggccaccacctgccgctgacaagaccaactgtgtgttagaattttatgccctaaataaaactcaattttaatgtaatcttaatttcattatcaataaaagaacaaaatttgtttcattacttattttttatattgcttggttcacatgttaattttatgaccatatgtttgacatgtaaattctattaaatccttatcatattgttattcataattatagtgttgtctacacaatagaaaataattatgattatgtgatattaaatattttaatctcgtgatttatcagacccaatagactgaattagtccttttaccctgccaaggcacgaagcacttgttgagctaagagtttcaagcggtacatcctttccttcaagaagtcattctaggcaagaaagccaatcagggaggaaagtaagttagccaaacggtagcaagccagttccctcccattggaggaggaggggaaagaagtcactcgtgtcaattgttattacgattacgatatgtagtgctcaccctataggaatgcatcttctatagacgactttccactagttccattcttgatgacttctccgaatgaaggttcacaaggcatactaacaggataccaatgatgctgaccattaatgactagttcaaactaccaaaaacttgaatagaatagatgtttcttggcagctccttttatgtgcccaaaatctcagattatgagccattttctgattccctcatccaatctcatgagaagaaacccagtaggcctttgtttaacagtgagggtgatcgcaaaagtcactgaatgggttagtattttcctttagtttgtcctatattaaaaaataagtgtgggaggacgttgcagatgtttgggatggacatgacttcttctaacgctagaagaccactggaagacattcgggaccatgagcatctcgtgaaagaagcacattgggcgggcgtgtttcgaccgtatccccagggcatatgtgaatgtaaatatcatgaatatgagaagaccttttcctagtaagagaggaccgggaaggacgtgttggaacttattttactaggatctagatttactaacatgtatgttgtttatagaaccataatctaacatcctaaatatgaatttcctaaaaagaatgaaataaacacatataaagttataaaaaaaccttacattggtggcaataggttataatgtctccttccgtttagatctctaatacttgatcctttctgtcgcagagtatgatcaagatctaaacctggatcttcttttattgttggaattcttcacaatcttctacaaaggcctgagtattggcttgaattgtgtgggtaattcctcaactcactaagggttcaaaaattttagaggaagaaggatagggttttcgaattcaggaggctctctctttattttttaagttgtctgacaaaatagtctaataagaatcataaaataagacccatctttttctatttataggattttatctaaggttagtatttgaattatacggaattaaaaaagataaaataatggctctaatttaaaccttaagtggtcgaaccctattgtgggccctataggtttcaattttgctattttatttaacaacttatcttttctttcacaaatgtcatattttaattttaactctataaatgtcaaatctatctatttaataattataattaattatcaaataaaattttcatttaactcattttttaattagaccatacaaagtctcttaattaacaaataaactctaaatcctctcattctttgcaattaagcccttgctgagtgaaaattcataaataagatatagtcttatttagaattataactgattaattaaaactaattaattgagtctacaagacaatattatcttggacaatgtggggacgatgggcctatataaccaagctcttaataagtatattcaaaatttatcaaataaatttccaaacttattaattcctcctgactccactatagattcagaatcgcactgctgattacatagaatgctttatatattccaaatatagatacattatgaattatccattgtctcaattaaaataatcaaagatcttctatagatgatctatatcgagtagggataaatttaccgttctactactcaatgcattttatcctttaaacacttagcttcctataaataatattttagtaaactaatatacttactaaaataagagcacttctatatagttatcatttcacttctatatagttacaaaagctataaattccacatcaatgattagcgctcccactcaattgtactaccatgttcccaagatgtaggtattgggaagattcatttgttcaactttaacgaacaagtcaaagaacacaaataatacagttaagctagaacctaaccatctcaggattaagatctattgacctaagatcaattaagtgatattgacttagaatgatataatggtaagtttatgatatcttttccacttccaaaatcggttcagtctgatgtatactctgtacattcgatactagtatactttaataatggcctagaaaggacataccacttatacaagtgtaagtaaa

SEQ ID NO: 311161 - DNA, 2410 bp, Cannabis indica
atattttattaaaaatatacaaaaaattattattatttttttattatttaaataatggtaatatggaagataaataatttaaaatttagaaaaagtcaataaaatataataattagtggcattatagttgttattcgtatttctgacattaaacacgtggaattcaggtcaacatacaaggtctactagtgggtcagacccattaagacaagaccttttaggaacgtactttaactccgtgattggataactttctgccattgatagctcgtgtctagaagcaggtccagtactgtgacgccagatggataagatagcgtgttcttggaagactggtctggttttcctttttattcatgcgcacaaataagaaaatatatgtttccaagatctcgacaaaggatcacatcaagccaaaaggagaaattttctaaaaacagatatcaagcaattaatttacagtcaattgcctacaatcatggtacacgattttgactaaattcaatcgaattctttctgtctactcagcatattttctcattcatgggttggacttcacaaggtagcccaaatgtataagtcattgtaaactcccaataaagggaaaaagaaaagtaagtgtaattctcaaaatattataaatatccagtgaatgttatggattaagggttgaattctctttcaatacttgctcaagcaaacttgagaacttacattcattgtattccccaaaggcttttcaagctaaagagttacataataatattgaatcgtagactagggctagttgatgtcccaacaacgtaaaaattgtttgtctctttcttactttttctcttttaattatttattccttcagtcctaattatctataattagtttttcaaaaatctcggtaaatattttggtgcttttattgagaactgaaggaagcattgataccatctagagattacgctcaagtaatcatggtactcacccaaacaaaatctggtcttcattttactggtcctagcaataaagcaggagcactgatgacccacacaaggtgaccaatcgccagaaaggtcaacatgataaagatcgaaatcgagactgtaataccctactagattaagtctgtttccgtgatttaaaaactaattatgtaattcattgctaatcaacaaatttattgaaaaacatgtttaattaaaattttacataattaacctttaaactttaaatatataaactttacataatctaggatcctgtcttttaaaagttacaactgcattacaaaatattaactacaaaagttgttgcttagcgactaacaaaatacagcctgttgtcctaaagatcaaacactctagttctagccgcccgatatgtataatcttcattagctcgaatcactactgttcagccttagcattgcccttacctacacatgcaaatgataactgtgagtcaacaaactcagtaagaaaaacataatcataacataatataaaccagattataactagagggcccatacacgttccacgcgtactgagtctagatgttcatacgacaatactattgaccataatatcaacctatacttggtactctagtcgtaccgatgtaaagcatcaatcagtactttgccaaacatatgtttgacggtatttagtgcaactctatgtacactaatatcgccgataccgatatgttatctaacaagcattcatagatatgtacgtcaaacatctaatcatatatgcatatcattatactaattttaccttgattccaaatttaggtgtgtcgatcaacctgagtgaaaactaatgctcgacaatttataggcccctaagtcataacattcgtaaactaataaatgatacgctaaattactttttggggacttaaaattagaattatagttagtgtggaaatacccttaatatcactaaaacacgaaaaactagggttccaatactgctagagccggtgaactggattcccaaaacaaaaaaccggttcttagggttctgcctggggaaatgattatccggttctacaagtatgccagaaccggttagccgattcattgaaggaaaccctaaaaacttcaccaacaattcaattttatcccaaatcatgtcaaactctctagaccacctacttaagccacaacaagcatatttcaagcaacaaaaacaagtataaacctctgaatccaaatctgtcactaaagggcaaagtttaagctcaaaagctcaaaccttgcctaagctccacaataagcaataattctagctaaaaacaacttaattaactcaaaagaataccaggaaacaacctataacgtccccgctttaagcctccattagactcttacacccacgaatgatggctcttatacacgagtacgtca

SEQ ID NO: 311162 - DNA, 1437 bp, Cannabis indica
atttagatgtgatataatatatactaagcatcatgtatacctctgctcttaataaaagtcaattgtatgattaggttatatgtgaggtggtgttatacaaatttatacacattaaataaatatagaaattggttaatgattatgagttatatataccacgttacaaagatattgggtgtatatagactttgcctctaattaatttattaaggaactaaaataagagagaaaaataatgtataagtataataaacaaaattacatatttatttattttgaactaatttttattatacataataattctactaaactaattcatatatataatttaatttgattaatacgtgaataaatactaattgatgatgaaataattacacattaaggatttaaatattaacattgtgttagttatagagagacttaggaatgttatttgcaaaaatattaaataattttttttttattcttttatgagattatgtataaccaattcaatttagtaatttttttttttgctggataattcaatttagtatatttaaaaatataaaatttaattctaaactatttaaagggacggcaaattaaactatttaattaaagatagataaatttattaaattttgtatgatttaaataattttttagttagaaaataaatattacttaattttcaatagccattggttttgattataggtgtattatagttagtttattagatatttcattgagattgagtttttttttcgacttgatatgtttattgttgttgttaattttgcattatcagctatatttcatgtaataaactttgtctaattaataatcaatgaaaattttctaaaaaaaaccagtagttatattttatttttatacaagatagtttatattttctttaattattttattttttattttacatattttaatatttcataatacaaaaagacagacataaaaagttaaagttgtgatatttttatataaattaaaaaataataaaagtctttgtcaatgcaggtgaaagtggattaattaatgcttaattagttagtacttactttacttagctgtaaaagactttgaaagctcatatgttttctacagtaaaccgtgagaaagtccaaatcacaatttttttttctgagatgtaaaatgtaaaaactaaattagtaaatattaaaaaaaacaattaagaaaatagtcatatataataaattattagataataaatactatatatttatacacttattatatattattattttttaaaaatatataataattaaattaagttaaataattttttagtgttacatattattatattgtaataaaaatgaataaatatattaaatcattaaatatatatatcagtatttaatatatcgtattattaaaaattaatatactgtagtaataaaa

SEQ ID NO: 311163 - DNA, 939 bp, Cannabis indica
cctccaagttataagatcccagctggatgttactcgtttcgcaagtaaaaaaagttagatgtgcctacctcggaggaaatcctttacttttttggtgtgaaacctcatcccatgtgcaccaactataaaaaggttagcttttacaagttagagaggtattcagatgctcattgtcccatcagctacacattacgctcccatgatctccgaaagtacttgtttttctccattggtttcccagtgaagagggtgctaccttccaactaatcttacaaatcccaggtaaacatcttgatttctatttttccttctttcgaaatttttctagtctcactgctaattgggccttttcacttttcatttttggcagagcatgtgccttggagctttaaaacttaggaaatgacaagaaaggcagcccattacaagtatttcactgaagcacagttgaaagttgaaagcatggtcatcataaagtttctctatgaacacaggttgttcaccagtttctagagcatcaacaacatgagtggtaggggccaaagtcatacttcaaaagaggctatggaggtaatagccttgactaagccaaaatcatcacagaggctgtcaaggaagataaaatcctgaaagctaactgggcactctgccaccccaatcccttgaaagaggaggaggagatttttgagagatatgttgtagcatacccagatgagggtgccccgggagccgacactttcagaagaggtaataggcccttttgtgtattccgtacccccaccctccatcgcatgtcttggatggaccaggggggattacatagttacattttgaacttagatcatcttaagtaccccatgaaggatttcatagagagaatataggaaatttttaggaatcctagtaacccaaagttctctctattgggttttgtgccct

SEQ ID NO: 311164 - DNA, 2233 bp, Cannabis indica
ataagaaaattatatatgctatcgatattcttttgaatactactagtctacggggccacgactaaaaaataaaatcaattactaaagtctcaaaagttacatttacaattaacttgaacaatgttaggctacctctaaagttttaccgtaattctttttaattcactttgccattctaattttcgaaccacactaaatagtgaactcccttcaagttttgatgtatgcatgttttcttcctcccatagtgagtctttgacaagtcttctcccgaagacctttctcttgttcaatactcttcaacctatctaagaacagtaagagagcataattacaagaaccaaaacctaattgaacactataggttattacacaaggaacactgatcttctcacaaagatgaattgtaaaaaaaaattaagactagaagagatgatcgtatgattgttctctaggttctatttatagatcatagaaatactagacagagccacaacatatttttacaactgttagaaactttccttaaacaaagtttatcaaatcttgatgttatccaaatttccgcatagggtgacgtggcattcttctaggtgacacatggagaatattttacaacttgaacgtaccgtatattccttggtgtgccatccaaagttaattattatccaaaaacaactcatctaaagattagtatggaacatctggctagggtgaatgaaattgtccgagcaacttccaatctttcaattgaatccctattttggtgggatttttacacgttgtaaaagtaaaataggaaacttgctaagtttccctttcgattcctaattttgttgggaaaccaaattcatgtaattttaaatagtggagtcataccattatacttggatccaaaatcatattttctagatagctcttatgctgcaaaagaattgtaaacttttcctgagaattcttaaggaacttgcttggccagctccttgtgatcttattaattcttcaaagcaataccacaaaaaggagagtaggctattaccatgatcacggggtcaaatttttataaatctgtctgttcttattgctaaattacattataattatttctaatcattcttattgctttaattgactcaacatcgttggctaaaagcaatatcaatatttcggtactttcattaagagcaaaagaacattatttttattttgattacttcaaaacatttgaagatggttgtgactaccagaaggggctagcctactaaaagaatggatccaatgtccacagatcctaatctgcaaagtccagggaatcaaagagattcattggggatggatcccgatccaacaactcgtcagcctccatgagtccccccatcaaaaaggctaggagtaacaacccctctggctgggttcactctaggtacaaaagaaaccgggaccaccaatatgcacaatggagaaattgggctgggaaccgaggatccaccaattagaaagccttaattaaatataagcaacgataccaagttgcaaaatctacgagaggccttaggacagtccaagatcataccaacactcttcaacacaaccatgaggacaaacgagcagttgtgaatctggcatttgagcagccaaaatgccagttttaggagtgggtggatcaacagacggagatcataagagcccaacaagtagtaattgataacctccctaggtaaggaactgagctgatctgagatgcttatcatctaactaggcggctaccggtggaagacactcctctcatacgagattcaaacagagggaaagaaccctatatcccaaatggaccatagtatggtctagaggagcatccaaccaactactcccatcaaacccaagataatggactgtctaatccaaggccacagaaccaaatagtgggccacatagtaaatgagaaagtctttcttgcttgtattcttgtaggagatggccagtataactttcgtcctcagacagatataccagactagccaacagttaatgatggccaaacaaggagacccccaagagaataattcttcaacacgttaggacccgtattaatcgcatgagaatagattgggacgaccatgttatccctcctaacactcaaccaataattgtagacaactatgtgtccagtgatgttctaaggggtccataggtggcacaagtcagtcaataggtaggtcaagttgatccagtg

SEQ ID NO: 311165 - DNA, 701 bp, Cannabis indica
ttttaaagtgtaaaaattaataaatccctaacaaaaatattgatacgtttgtaaatgtaatcataaaagaaagaaagaaagttttggaatgatgaatttgtcaaatttataaggcgtcaaagttagaaaagaaagaaagaaagaataaactacttcactctgttttgtggtgatcgatatgatatgatgcgacccaatcaatgattaatgttggagcccattattcaaatatagtcacattcacatatattattattattattatttttcctttcttttttccttttaatttcccgtaggaatgacttttcatcaagttctagcaatgttctatcattgcgagattttgtgctatggcagccgtcacaagttttctgccaattttattttgaatgcatatttttcttttcttgacaaagaggattttaaaatcgtaattttcagcttaatatttgtgtgccattctcattttgtttactaggataaaatttcaattcttgttccattctattcttataagtaactttctttgcattaggtgctcttgacatttttgaacaagaaggaaaatgaataaaaatgagatacattgttaatagggctatttttaaaaatatgggaaaaattattaaggttatgataaatatgaatatagcattatctaaccaatcaaactaaaaatatcgtttttttttttaatt

SEQ ID NO: 311166 - DNA, 1978 bp, Cannabis indica
tattattattattatttgaggagtggacgtgtttctaaaaaaaaaaagctcattcaacttaattatagagacgtggaataagtttgcttataaattactcctaggccctagcacttggtgcccatgctcatgatttcataatttcacataatgataataacaatatgataaaaaaaaaaataagttaatttgttgacttgtcaatttactttttattatagtttaaaagtcacttaaatgagtaccaactcaccttttttttttctatatggttttaacactattgagatgatacgtttttaaccctaggaatcatgtatgggtcaacatttttcaagataaagaaaaatttgttatgattaaggtcgtctcatctagttagtgactatatggtaaagtaatttgagggtaaatcctaccataaactactcaacattattttttattttattttattttttacaaacattattttacttattaaaaagagcattggttttttcaaaaaaagaaaaaaaaaaaaggagcttatatttttttctttttagaaaaataaacatggttaacatcattgtaatgtttataattaataatttctcatattatttataatctaaaatgtgtaaaatctaatatttaaataccctaatagcataatatatcaaaatatggtgcttaactcaatgaatcacctaagctaagaagatcatctctaatggtaatattttttaaagatgctaaaaatttctacatcatctaaaaatataaaattttattttatctctcttccatattatttttggcactcttacttaaaatcactctaatagtatagcactcttcaaaaatactataattatgatctcacacattattatttaattttttaacaataataattttttaatttaattttttattaaaaaaataataataacatcaatactattgtatggcattaacacatatttctagaatagtactcttttccatctaattaatggtataacatctcaacattttgtcacttcatctattcatctaagcaagtatcttttaattttttaccattaaagatgctctaaggctagcttagtagtgagagagagatgaaaaaaagaaagagatcatgaatttgatcccaaaaccttaaactattgagctattaattaattataaaataccattaaactatactaaaaaaaaaaataataactctatgagtcaccttgtaatttagtgatataatactatttataccttttcagttaaaaaggctattatgtaatctgcattaggtgaagtgatttgattttctttttgacaaagtggaaaaatcacatcatcatatagggcagattgcaagatgaaacaccataaagattagctatatatagctaggtagtatgagctatactattattgcaacatatagtgtttttctttaaccttttgagatttaaatttccatttatttaaaagtttatattgatacactatatacttgattataagtttatcattagattatgataatttaactgaaatttctcaagaatttatatacatacatacatatacgtacatatatagatatatatatacattgagaactgccacaattaaaacatatgggtaagtgtatattgcattctcttaaaggtatattttagtagacttttaatttgtgatcattattgtaaagtcatttttggcgagttagttaacaaaatatttttttcttttatggtaagattcttttgcatacatacccgatttcttaccttgtgtgatttcggtttttagttgctcttttccttgttaggaaagttgcacttttcagctggactttcctttgtttataaacttcttgtaagagaagcaattctcttatggaaagttggttttttaaggaaactttgattattgccttttccttattgatttcgattgtatcttgatacaatcagaatatcta

SEQ ID NO: 311167 - DNA, 912 bp, Cannabis indica
gggggccaatcttatcatcaacgactgcgtatttcttcttagtgctacatatagaaaaaataaagaaaaagttagaaagctaacaaaaacacatatatacaaaacacaaaataaaaaactaaaaaactaaaattaccttttcatatttatttatgctataaccattgaatgaacttcaaatactgctcactagtgttattatatccaatctcatttgtaaaaggattaagcccatcaactatcaatttatctccaacaaaaatattcttcaagctatctttgcctgaatcaaatgatccaatatcagttataaaatgagataatacaatagcactctccttctgattactcttcttccaaaactgtgaaaagttgtagttggaatcgtggataaaacatgggataagcccaataatcttcttccaaaactgtgaaaagttgatcaaaatattttgtaactatatcatatataccctccaaaaagagatatttttatcaatggaataaaacaaaaataaaattttatcatcactttcatatttaattagtgtagacgagtgtatatatgaatttattagatataaacgtgatgttatcaaaattcttatttcgctaattagcaattttttctttcgaactttgacatataccaaatcatgccccctgaacttttttggccgttaaaaattcctcatgaactattgagatcgttaggcttaaggacttttgtctaatttcattcaatgttactgtttcactgattgtttatgtactaaaccatgctccctaaactttgatatctactaaatcatgctcctcaaactttgatatgtactaaatcatgccccctgaactttcatccatgttagatttttttactaaaattagacaaaagtctttaaatctaacagt

SEQ ID NO: 311168 - DNA, 2332 bp, Cannabis indica
ataaaatatacatatagtttagtaattaatttttttttgaacaaggggatttttattcaaaaacaaaactatacaaccaaagctggataaaataccagcagcaaccaacaatgcagattcagatcacggcctgcaaaaaacagcagcagccacaacctaccaattccttacaacatgaagtaaataatttgtctttctgccctctttgaaggagcctaaacataaaattctcagctttaccaagtttctcacagctttgctaagcttacaaggggtagcacaagttaggttgtatagacaatcatttctatttaaccaaatctagtacatagtagcagcaatcacatcgtttatcactctgttttggaggcttcgctgagttgtcgaacacctgtggcagagatctttgacagagatcggccaatgtatttgcccgagccattctttaactttgacagccacctgtttggagaagggacaatcaaaaaagacatggttatgagtttcctctgtttgatcacaaacaggacaattaacatttagaattggcacacatcttttaagcatgttacgggtaagaagctggctgttaacaacttgccaataaataaacctatgttttggcaacacaagtttatcccacactgcaccagcataactaactctgttctattgtaatactttgaggcactaaacttctttccaatgacaacaaggctcagactagatttacttgttgacacccttatgttcagcaacttcttgaagtaccaactagtatcctgcttagattggtagctccaaattgattgacctttaagatagatcgagttaatccatttcacccacaaattgtcttgtttactcgatatagcccaaagatactttgctatcaaagccttattccactttttcccttctcgaaacccaattccacctaacttcttgagaagacacaccttctcccaagaagctaggtgcaatttgcttctattctccttcttgccctagagaaactcccgaaaacttttgccatgacatcatcaagtttcgggggattatgaagatggtcatccagtaatttcgaatcccaagcagaactgagtgaattaattgagctctacctgtaaacgaaagatttctgcttgcccaacagttaagattcttatttacttttgacgccttccatttagtagttcgaaggttaacccctaagtatttcagaggaaaagtctcctcttcaatttggactaactccaggatcttcagctttatgtcatctttaactctaccaaagaaaatctgcgatttagctttgttagcagataatcctgtagcattacatattttagtgaaggcttcttgaattattttcactgaattcaagttgcctttgctaaataggacaaggtcatctgcaaagcaaagattagtcaatcgaaggtgtttgcatagagggtgatagccaaagccttctttctccgaatagaaaatcaacagtctagataggtactccattattagaacaaacaaaagtggggacataggatctccttgtcggagaccttttttacctctgaagttaccttggattctaccattcattaagagatggtatttagttcccttcaggcaagtcattatccaattgataaaccgagaagggaaacaaagctggctgagcatggcttccataaactggctgtctacagtgtcgtaggctttacttaggtcaatcttcatgatactactcgctaagacattctttcttgtgtaacccttcagaaggtcttgaaatatcatgatgttgtgggcaagaagatggttcttgatgaaggcaccctgatttccttggagtttagtaattaattcattattgtaaaaaaaataaggaaaagtaaatcattaagtcgagctcggatatgaaaacggactaacttatttaagaaaaatgggccaacacaaacaaagtacgacacaaaagtattagacctataggttgtgcctaggggtgtgcataaatcgatccaatccaatgacaaccgaccgatccaatcacaaccgaccgccaaacattggatatccaattgtgatcggatcggattggatgttatttttgaatatccaattggatcggatcggatgttggatggagtgtctaaaaatccaatacatccaacatccaattaaactaattagtattttcatttagtttagatgagtaattagattttataatgttatacgtaaaatatatatgtatacataaaaattaacattaaaattttactctttttttcttggattggatggatccagtctaatccaatac

SEQ ID NO: 311169 - DNA, 1368 bp, Cannabis indica
taactacaaattaagaatgtatcatcactatcattattttttaaaatatatgtttggacataatatataaaatatattttaaaggccagcgatctaataagatggttcaatcagagaattgacagaagaggccaggatctccttaaagatccactccaaggaagactgcggccaagttcctcgaaaactagggcagatcttcctctgctagagggaggacagatatttcctcaaaggtcaaatggtgagaacagctagatcctagtgaccatcggtagggatctttggctcagcagaaccccccattgtgcaaccactggccggccaaccaccaacaggagtacccatgtccagccaaagtacatcacttcctccccaaggggaacaaggtgcacagaggtcgatcttcgaccgacgaggaccgagagcgagtggaaacacccaaaacagtgattcgagaaataaaattgatcactttacgcatttagatccaccaaactctagcaatatgtgtgatctacctccaatcaacacaaagctaacaccaatcgaccgtggagtcacgggcctggcaagccaaggaagcatcatgggcggccagaccctgcctaatgtaggtctcgccagcaaagcacaacagccaggtataggcctggtcggcctaggccaactcccatatttgggaatggccggccagggtatgcagagtctagctaattttcaccatacactctcccaaggtatggccagtcagcccctatctcttcgaaacctgcagcctccccaaggagggccagtcaaccaggtccccacaacaacagatccttttgtgcaagcacaataagaccaactcagggacatgattaaaggcatagctagcctgaagccttcagaccttaaacttgatcggtcaagggaatcactgttcttggcatacataaatgccttgcccttgccgaagttcaaaatgccagtatgcaagataaataccgagcgagaggacctgttggctcaaatcaaatactgaaagttactggtgatgtgcggtgtcgcatattcccagccacattgttagacacaacccaataatggtactttaaactcaccctagggagattcaactcttaggctgagttctcacgagaattttatacacaatttttcgtcctcgagacttgtaccattacaactagaagaccttgtcaaagtcaaatagcgacaagaggaacctctaaggattacattcagagattcatgaccgaggctaccaaagtcaaaggttttactgaagaaggccgatatgttggaaattattttaccaagatcttagatctactcataagtatgttgattaacacctaatatgaa

SEQ ID NO: 311170 - DNA, 585 bp, Cannabis indica
tctgattacaaagaggcattgcagcttattcaacaaggggagaggagagatgtcatgatgcggatgaaatagtgcagtagatcatacatcttttaaattctagttgttttattggtttgcattttgtatatagaaaagtcacaacaatgtggctcatctttttaatgctttgattaccaaagatagtgctatgcgaattaaggttactcacccttgtgttagtcaagtataacaaataatacagattatgtaatttaaacgctaaaataaaaagaaaagtaaaaaaaaaaaagtaaaagtacttaaatggaaccaactataaaatttagataatttagcatcaattaacccaaactatttactaaaatgcagtagcaagactcacaaagaagaagcctcaatactgaatccacctccccaatattcaaaaaaacatgataatgataattattgtaattaaggttagagtaatttgcagttaaaccccctgaactctcaatttacttacaattaaccctccaacctcaaattttggtgggaaaaccctccaaagtactattatgtttgtatttttaaggtgtcatc

SEQ ID NO: 311171 - DNA, 2982 bp, Cannabis indica
aactgatttgtgggttggtttgaattggcaactttctactaatatagatgatcacagagccaatattgcatttggtcattcagatgagtttgatgctcccttttacaacaacgatcctgaggtatatttgggtggggaaatgaatatgtggctatagaggtacccgcccctgaggataaactaactccaagtaacaaaggagagcgatagagaaaaccctcccgtagtgagaattaccaaacaccaggagctagtagtaattggccatgtcattctattagtactccttcagtttctacaaaattgagacctcttatgtggacaagataagacatataagaaaataatgtgtatacaatatctcttagtggcacgcctttaggggagatatatcttggcaagttggacaaaacagaaagaagaattgaagaatgtagtgggaagatgtactgcaaaagaattttgagtggatgtaagtaagtctggcactgatgtgttttacgttacttgcaaggatgaaaattataaaatggaaattaagggggaagaagaaggcacatgtgaaatgtttgagattactgtgttccacaacgaacacacatgtaacctggatcttagaaattctaatcaccgtcaagtagcaccgtgggttattaggcgcattattaagaacaagtacacatcagatggaactaactataaggaaaaagacatacagagggatatgtttgatgagtatggcatcaagatgagttatgagaaggcttggaggtgtagagagaatgaatttatgtatgtgaggggtactccagtagaatcttatacgaagttatatggttacttctacatgctagaacagaagaatctaggtactattactgacattgtgagagaggatgacaggttcaagtactattttttgtcactcgatgcttgtaggaagggatttaagttttgtcatcctgtgattagtattaacgaaacattcttgaagacaaagtatgggcgcgcaatgttagttgttgttgcatacgattcaaacaaccaattattttcggtaggctttgcaattattaacagtgagaatcacgactcttggaagtatttcttgtggtagttaaagaaagccattggggtggttgaaaaccttatgttcatatcagataggcatcaaagcattgaacatgttgttgaggttgttttcccagaagcatgccactgtgcatgctttaagcatattactatgaatgtcgttcacaagttcaagactgatgtatgcaacaagaaaatatggcttgtagcttacgcatggaataagacaaaatgtgatagacattttgaggtgctcaaacaaatggatcctaccattgctacatacgtcgagcaaatagggtttaaaaatcaagttgaacttcaactaggcttacccatcatgcaaatagaatctgattggggaagagaataacaattattgacccactttctgcaacaatctggtattgttcacaaagtctcttgccctcacacacatgaataaaatggaattgtggagaggaaacataagcacatagttgagagtggattaactcttctttctctggctagtatgcctcttaaattctaggatgagacttacatgtctgttgtatttctcatcaacagaatgccttctccacttatcaataacttaagaagttctatttaatgtcaaacatgattactcttccctcaaggtgtttcgttgcttatgctatccaaatcttagaccatctaacaaggtcaaacttcaatataggtcttgaccatgcacctttcttaggtatagcctagctcacaaaggctataaatatctttcaaatgatggaagagtgtacatttctagagatgtcctatttgatgagcttgtttttccctttgcatcacaaaacacacaaatcctacttccaattcaagctcacaacctgctacttcagttgttcccaataggatacctcatccatttcctcctccttgctttaaccaatccatgcaacttgttcctcaggctcctaatcaacctcttaccaatgttttgaataccggtaacactgctgtcaagacacaaactaatgttaataatgtagatgctcacatagaagtcgcagcaactggtggctcctctaatcaggaactgattgcttctttacctattcagcctcaactttctaccacaaattttgatattgagtctactgcacttgctcctgctcaagttccaactattgtgcctacacaagaacctactgctgcaccaggtgatctcactgttaatcaacctactcaaacttctggtgatcctattgttatcaatcatcctatgaaaataagaggcaagtcaggtatcagaaagccaaagtttctaatggcttctctcactctagcttcagtcaaaagtgctttaaaggattctaaatggtttgctgctatggctgataaaaataatgccttgaagaaaaataaaacatacagtctagttaatctaccccccattagagagcctatatgttgcaaatgggtgtttcgagtaaaagaaaatgctgatggttctgttgataggcttaaggctaggcttgtagccaaaggatatcatcaacaagctggatttgactttcatgaaacattcagccctgtggtaaaacctgtcaccataagaatggttctcaccattgctctatctaaaacttggactatatggcaactagatgcgaataatgccttccttaatggggatcttaatgaagacatttacattgttcaactcccagggtttgttgatcctaaatatgccaacaaagtgtgcaaattacacaaggaaatctatggttgttgcgatattttgtacacgcaagtgtacgtatcgtttcaagtagtaaactcaccaggagtgaggccgatcccacatggagtgcagttaagtacgtgaaaattaaacctttacttcta

SEQ ID NO: 311172 - DNA, 2345 bp, Cannabis indica
gcataaaacccaacagataccacttgtttttttgatttccaggagatgagggacttcccaaggaagatgcagtagccagaaatggaacgacgagtgtcttgacagctgccccaatctgcatcagcaaagaaagaaacctggacattttcacgggagaggcttgtttcagtataggcttgtagatggggtgctgtatcagatgtgaaaaacagcccctgacccggagtttgttttagatattgtaatattctgttggtggcctgcatatgaggaagccgtggacaagagaggaattggctgaggtgatttacgacatatgtaatgtctgtcctagtgatggttaggtagattagtttacctatcaaacttctataaactgaggggtctaggagaattttccctttgtccttgctcaattttaaatttagttccatgggtgtggaggccagtttagctcctagataacccgtgtctttaaggagttgtaaagtaaattgccattgggaaattgagatacctttggaagttctaccaacttcaaggccaagaaagaatcgaagtttgcctaagtgtttgagtttaaacttggtatcaagtttttgagtgaattgagatatggcaatggtattgttgctagctatgatcatgtcatgaacatagattaggatagctatgaatatggaattcgttttcttgatgaacaacgaattatctgataaggattgtttaaagccaccctcgatcaatgtggaacttagtttagcataccattgtcgagatgcttgtttgaggccataaatgctcttgttcaatttacaaactgtattgggaggagcattataaccaggaggaattttcatgtagacctcttcatggaggtcaccatgaaggaaagcattatttatatcaacttgatgaatttcccatttatttatggcagcaagagccaaaaaaactttgagggtgttgaattttgcaacaggtgcataggtttgagagaaatcaataccaggtttttgactataacctttagcgacaagtcgtgctttgaaccttactacttcaccagcttggttatatttgtgtttatacacccatttgcaaccaaacggtttgtgtctaggaggtaatttagtaatgatccaagtgttgtttttgtctaaagcttgagtttcattgtccattgcttctagccaatgtttaaattgggaagcctcagcataattttgaggctcggtttgtgtgtagactgcaagaacaacagctcgaaatgttggatgaagcttaatgtaagacaagaattggtcaataggttatttagtggaagccacatgacaaacataatttttcaaatgaggtggtttgataataagtctaccttttgtggtggtttgtatgtcaagagatggagtagtgccaggtctggttgttgttgattcaacaacaatgtgctgatcttgggatgattgtactgccggtatagctgatgtaggtgcagcagattgtggggaagatgaatctggtgcatgttcgactgctgcaggagcaatatgttgctgaagtgagtttgttgtattgggtactgttgctgatgcaacaggtttttgacatggaaggattgtttgagaaaaataatggtcaatctcagttaatgatatggtagaaaggtatggaaaaatgttctcatgaaatataacatctctagatgtgtatatttgatgagattcaatatcaagtagaagataggttttcatgccggatggatagcgaatgaaaatagaggcacgactcctagatgaaaatttgtgccgtttagaatttaaagtcgaaccataagctaaacatccgaatgatctaagatgatcataaataggtggtttttggtataatatttcaaaggatgtactgctgtttagtaaagcagaaggtgtacagttcattaagtaagtagccgtggcaattaggtgaggccaataaaccaatgggagatgagattggaattctaaggcaagagaaacattgagaatgtgctggtgtttcctctcaacaacggagttttgttggggtctctcaacaaatgaatgataatgtattactcatttggatgcataaaaggacgaaatgtttaattctttggcgttatccgagcggacaaccttgatattgagagcaaatagagtggaaatcattgtaaaaaaatttggaatgattttgtggactttagatttcattttcagcatgtatgtccatgtgtatcgggatttatcatcaacaatagtcaagaagtatctataaccttcagtactaattattggaaaaggaccccaaatatccatatgaactaa

SEQ ID NO: 311173 - DNA, 948 bp, Cannabis indica
ttttaaataatcattttaaattatatgattatttattgaatctttcttaattaaattatagaacacataacataaaactaaatatacgtgccttgcacgtaactttcttctagtatataaatagatgtgaattgtattggaataattacatttgtatgtaaatcaacatttaatttgcataaatgtagattttagatttctcaatccaatcaaatatgcacaagtatagatattcacactttgaggattagattggattggatcctgcagattagattagattaagtattttatgaacatccctactattaagggccgtcatagttttaaaaatgtaaaaatttaacaaacatacaaaaagagtaaaagagataacaaaaatacgtctacacagagtttaaacttttgtatgttattttctgttttatttacaaaaaaaaatatggtattagcttgatcatccctttcctctcttcttttctatcgagaaaaaaagggcagtgatgccattgttattggacaaaggtctctgaaaactacaatcaacaacaacatgatacataatcctaaccaaatatctcaattcgattaggcagattgaatagcacgaaagaattcatcatgaaacgtcaatcgaacaacaagttttttttttttggaaaaaatctgcataaaaacaagtataaacagaaacacaaaattgcaatgaatagggtaagatctatacttcataaactgaaattaccatttcaatgttaaagataataaagaagttgttaaaaaattgttggttggagcttcctactaaattcaaatttagatttcaggtatagtatgggttgtatttgaaaatttacatttcgggtgtcagaaatttttcgacacgaatagtcatggccgcagcgagcaaaccgcggcgagaggccaaatcctgaactgcgatttttt

SEQ ID NO: 311174 - DNA, 615 bp, Cannabis indica
gaggttctactgtatataaataattgtatacaatttctcagaaaatttaatatgtcaaaagcgaaatttaaacagttgcatacacatattttattttattttataagcgtgtgaaataagttatttgaataatattttttgttgtaaattatttaaaaagaaattataattttacagtgtatctttaataattataacatatatgattatgaaaaaaattagactgatttttttgttatgtggaaataggatgcatcgattcaagtgcagcatagaagatcccttatagtgaaacatgcgtgagcagggcactttgacctaacaatttaatttaataatgataattttatatggttctccaacatatgttcacaattttgaataatacatattatactattcacaatttttgaataaaaataatttctaagactatttaattacatattttctttagaagaatgagtaaataattaagtcttaaatggatcgtcttgcaaggtgccctatttggtcatgggccttccacctatattttttaaaggataaattaaaaaatactttttttttttatttccattaataaaaaatatattcatattatattttattaaa

SEQ ID NO: 311175 - DNA, 1138 bp, Cannabis indica
caaaccattgtcttggctctaaatccatttccacacacacacacaaaaaaaaagaaagagataaataaaaaacaagcctacaatgtaggagacttggatggatcttcttctaccactgcctcggcctcttcctcctccttcctggccttttcacaataagccaaaatctccttttcatcctcctccatgaagcttgtgtccatgttgggatttgccatcaagactcgataaatggtacaaaggccaaccttgatgcattgctttttggtttcagcctctttcccttcgagctcagcctctttccctgcgagcaccttcttaagttcattgcattcatcagtcttgatctttgtggccttcttggcttcttcaaggcttttcttcgacctctcagcttcctgcttgagatgggtgatttcctgctgagcgtcgttccattgtttaatcacaaccatacgtttggctagttacttttggatctcgctctccaggtatctgagctgctctaggattcaccgatgggaagaaaaagagaggaaagaagtctggtaaattacaatcaaaggaatataagaaacagagggaaaaacaaagaagaaatacatgaactaacacagtaaacttaccatgagggcatgatgcaagctcctcgaaatcatttcctccagattcccacgattgattagatcccaatcatgggggaggagagccttgagttggcgccagcaggcagtcccaaactcctgggaaaactctaaactagtcttccccgctgcgacagacaatgtttttatggtctggctcgaggaagcagagaaatgggtcgtgttaggaggaggtgctttggtattgggattgaccgaaggagaagtttgttcacgagtctcagtgtcaaagacctcgaggtcgataggctcagatattttcttctttttgtgggtagtggttttctttggccttttagaaggttccacctcggtatctgtaggagcctcttagttggttcccctcttcttctctttccgttcaatgacatcctcgaaatgcatatttgagagacaagataaaatattaaaattatttaaaggcaaatgaaagggaagtgtggattgtaattttccacctaagaaatttacca

SEQ ID NO: 311176 - DNA, 2249 bp, Cannabis indica
aaaaaaaaaaaaacaaatagggcacaaaattggcaacacaggactcgtacaaagaaaactcgattgtagtaagttttatttgcattacatatgggcattattagttattttaaggtttaatattagttgcccacacaacaaatataactgtcatattacagtttcatggcagttatcccatagttgacttacaatgtttaaattttcaaactgttaggaaaaagacgcaactctatttctcatatttatcaatggacagtttgatcaaggaacgaattatgtaaattatgaagctactggccaatacatttcaataaattacaaatatgaagaataataagtcgaaattttgacttataaatatagccaatttatgtattaatattcttaaattgattatttaaattattgattagtgtgattataatttgttaggctattttaaagactaatcatgcatttagagtcatttggagaaatgttagcacattttggttgaaaatagtagaagtcggcgagctcaatttgataaggtggaacttaattacaaattttgacgaccttggaagcagaactggacttagagctccacataaaagttgtagatctcgttctcagctttttggaatatcttgaatcgaccgattctgagttgtattgaagaagttatgaccaaaatactaactaaacacgtgacagaattttttggcagcaagttgtcgttgcggaaagcagaaaatacacgaaacaacaacccggaagtcaacccagatgcccagcgcccaggttgacaaccctgctaggatttcggttttcaagcccgtcttagtgaaaatgagcccaaatttgtacatggacatgaattagacctgttacagacatatttgaggcaatggaatcagaatcaaagcactttaagttttgagcacccggagcactaggtgccatagacacctcgtgcccaagttggcatattgtcaagttaggatacttcaaaccacaatactgaagaattataccgagcattttatttttcttcaaccataaagaggaaataagtgctttggggggagaaatggatcgacctagaggccaaaacacacacccagtgcccaggttgacctaggcattgtgcctgtgccaaggtttacactttgtcaaccttggccaattccatcaatagtccaaatgaagtcatccaagcgtattcttcattttcatcaacaatttcaatacaagtgtttccgagaatcaaacggagtcatctagtggtcaaaaattggacccaacacccaggttgacattttgtcaacccgggctgtttccaatcattttcctgaaaagtattctgagtattttttctatcattagaaataaataagatacaagtgatcttaggaagcaaacaagatatccagggagcctaaacagggccccatcgcccaggttgacatggcactgggccttgtgcccaggttaacatgcaacctggttggcatgtttcagcttcttaaataccaattttgctctgggaattcttcctaaaattgtaaaaaatgtggtaggacaccttgttttcaatcttgaattccattgagcatccaaaacgagccacgggaaacacccaacaccaggttgacacctgacctggtgcgatggtaacgacttattataatttgatttcgtttcgagcagtcaactatttttttgtagtaaacgagagctaaaatttgtgataagtcaaatttgtactttgatatttcaccctttcaacaaggtgggatatcaaaaaattcaaggagttttgagtcttcttgatttcacaaaacagtgacatctccgagaactggtgaacaattttaccagaacaccgaatcttactaaaagatgtcaacacatcacttagtcattaaaaaatataagtttgtgacgttttaacactcacacagtgtccatgttgatgtaagaatgtcatcctgggtgttaggttatcaacctagccgcagggtgctaaacaaccttcagtaaaatgaccataactcactcaatattgatttgatggacgcgattcaacttgagttttgaagttatttcaaagatatatcaagtcatgcatcacacctattgggttttgtgccctaaataaaactcattttaatataatcagatttactaattaataaaagatcagaaatcgcattttatgttgcatggttcacatgatttatttcatgattatgtttaatata

SEQ ID NO: 311177 - DNA, 710 bp, Cannabis indica
atgacaaactaaccaaataaaagggaaaaaaactaacaaaaattgcattcttaatttagggaaaaaaattccactcctaatttcataatttttgtacggttagaaaaagttaattagtattcaccaacttaattgagataatttaataaacaactttataggatcaaaaatgaaaattatacattatatatatttaataattattgagcttttaagcaaaaaaaaaaaaataagtgttatgttttattatcaactacaaataaatcaatctctaatttttaatggagattgttcattgaagtgatcttgtcacatatacaatgtagtctaatttttaagactaattttatgtgaggtgttgtttaatatagacaataactacatgatatttttttattattctttttattaagaacaagttattttttacctaaaaaattattaatttaatataatgtgggaccatgtggacaactttaaaagttgtctaccaaatatatttttattaagaaatgtgataaattttatgtgaatgagagagaaaataaaaaataaataatattttagcatgatgtgtgtaatttcacaactataaatgttgcccttattggatatgattggcaatgggattgctcattgaagtggtcttaccagatctgcaatatgatttaattttcaaaactatttttatgtaaagtgttgctcaatat

SEQ ID NO: 311178 - DNA, 1386 bp, Cannabis indica
tgttcctactgatattgctactgcaggtacacctaatcctacacaaccagcaactgctgcatcaacacatcctatggtcacaagactcaaggcagggattcgaaagcctaaggctcttttagctcactgtgaaccaagatcagtcaaggctgctcttcaaatgccacaatggaatggagccatgacccatgagttcaaagccctcatcagaaacaacacatggatcatggtcagattacctcctaacagaaaaccgatcagatgcaagtggattctaagaatcaagcacagtgctgatggttcacttgataaatttaaagcgagactagtggccaaaggttttcatcaacaagctggatttgattttgaggagactttcagccctgttgtcaagccaatcaccataagagttgtccttacaattgctataacaaagggctggtcaattagacaactcgatgtaaacaatgccttcttgaatggagaccttcaagaagaaatctacatgcaacaaccaccggggtttgtaagccaagagcatcctgactatgtttgcaaacttaacaaagcaatctatggtctcaaacaagctcctagagcttggtttgagaaattatctacagctcttatctccatggggtttcattcttctcaagctcacaactctctattcatccaagccaacaacatgacatgcatctacatcttgatttatgtagatgacattctcataatggggaacaatgatgaagctgtaaataaagtcattactggtttgagcaccaaatttgcactcaaagacttgggttcctcaactatttcttaggaattcaagtcaccaaaactgatcacgggctgctcctcactcaaacaaaatacctacaagatctcctctccaaggctgatatgcaaaatgttaatactcaaaacaccccgatgaacagtggcttgaaattatctaactacggcagtgaacctatggaagatgtcaccctctatcgctccattgttggcgctttacaatacgcaacaatcaccagacctgagttaaccttctcagtcaacaaagtttgccagtttatgcatgctccacttcaacaacattggatggccgtgaaacgcatccttagatacatagctggaactcttgattatgggatgcatttaaaaactgcaactgacttctccattgaagcattctgtgatgcggattgggcagccgatcttgatgatcgaaggtctacaacaggctattgcatatccttgggaggcaacctggttgcttggaaatcacaaaaacaagcaaccatatcaagatcatcaaccgaagctgagtttaggagtctagccagtactgtaacttctaacttcattctttattttggc

SEQ ID NO: 311179 - DNA, 2194 bp, Cannabis indica
gagattttattttaaaaattgttaatgttcagtccaagttgaaagatcgtaatatttctcttcttgactcttaaattctaatcgtgctcttcatgcattttctgcctcttttagccttatcaagacaacctacaacacttataataaaaatagagtgtcagcgacctaatttcttagtgtgtagttgaggatagcaagctgaaaaaggagaagaatgaatcttctcactatatttctcaactcaagcccaacaaaggatggagaaaaattagaaaagaagcaagcacaaccagaggctaatggatctcagcaagctaagtgagagggagtcaaaacttaaagttgacacttatgttgaagttgacgttatctaagttgacacatttattcttgaatgacagtttattgttaagattatcttcaaatttttttatattcctacttttaaaagtaatttagtttcgcttttgcttttagttaaacaatgactttcttttcattttgccaatcatagtgttgacgttatgtttgactccgaataattggaaattatttttactctgatgatcttttcaaattatcattgacttccttagcttcctcttttaatgttgtgaatagtgtaggtaagaggtcttatattaaggtatcatccttattattatggcacaaaagattggatcaaatttttgaagcaaagtttgattgattaattagagctaaaattcttcctcctcttgctatttctagttgggatacttgtgctgattgcaattgtagaaaattgactgaaataagaaagaagactactaactgtagtcaatctttattagaaattatccacactgacatcactatgcaaaaataagtatttcataactttcatagataatttttctggcttcacctacttgatcaaagaaaaatttgatgctcttgataaaatcaaagaaatttcgaaatgtacttgagaaacaattacggtcgttattaagaatctgaacaacacatgcggccttttgctaaatatttacaagaaaattgtgtaatttttcatacactatgccaggttcacttgagccatatggcattgctaaaaggagaaaattcactctaatggacatggttagaaaaatgatgggtagatcaaatctgccagagttcttatagtgtgaaacacttatgactgctaattatattttgaatcatgttctaagtaaatctgttcttgaaattccttttaagttatggattgggagaaagtctagtttgaatcatcttcatgtatggacttgttccactgaagtaaggatttatgatcctaatttgaaaaaattagatccaagaatagttcgttgttgtttcattggttatccaatgcactcaaaaggctattgtttttactgtcctactcatggtacgcaaattgttgaatcttagattgctaaatttttggaatttaatgttgttgaaaacattccttcatcatctcttaaaacgggcgagtcatctaagtgaatttttattcatgtatcattttcaagagatgataataacaacagtcttattcctactccagttattgctcccattactgatgtatatattggtcttgatatcaaatatgacgaggatcctattattggtgaaaggcctattattgaagaaggttttgttgttgatgagggtcctgttattggtaaattctagttgtggaagatgccattcataataatgataaacaaatagaagttattcaagcacctcctttaagaagatctcaaagacaaaagaagttaacgaggtgtgatgataattttatttaccttggagaaggagaatgtcatatattggtcattttgtgaatcttctcacttatagttaagcacttaatagtcctcattcttcaaaatggataagagctatggatgataagatcaagttcatggagaaaaattatgtataggagctagttctattacctgatggttttaaaccaataggttgtaagtagattttaaggactaaaaaggataataagggacacattaaaatgtataaaataagtttagtggcaaagactttactcaaagagaaggtattgattacactaacactttctcgactattttcactaaggattcattcataattattatggctttagttgcacatgttgttgggttttgtgccc

SEQ ID NO: 311180 - DNA, 1716 bp, Cannabis indica
tcttctggcatcacggtactagactggcttccgaaataaacgagctctaaatgggtttgacccactttatctgctttaagaacccactagtgcacgtttgctgctgaatttgaccaaatacgcgtataacaatattgatacataaatataagagaaaattagatggtatatacctcttttaagttgttgtgtttagtttttaccctctctttctatatttttcatttctatcctttttttcaacaactctaccaattgtgtctctatcatttaaagatactctgactttccattcaactctaacttgtgtagctgtgagggtataatcggtaataaagttataaaggtgggtatattttaattgaatttaaaataaaactatttttagttaactgatgaaaaaacaaggatacttcaacttacctcaataaaataaaagtattgatatgaagcatacaattgtatagtgtccaacattatttgtgtggatgtacatagatttaaaagtacttatacatttaataatttgaatattttacttatacaaactaaatgagtcgcaattttaaatttataaccattcataatatagacttcaaatgattgggaaccatatattatatagtaccttttaataattttaataaagaggtaaagttatgtgaccctattattacccgactctatacatacaaagaataaaaaagatatagtactctcttataatttgatgttgccctacagtaaaactctttaataaattatgtatttgaccctcttaatttttatttcggtgtgtattaaattatttaatatttataaaaaacaatatttttttatataattaacaataaaataaataaattattattcaaaaaaaaaattattattatatatgttccttacaataaattaaaataaataaaataataaataacaaattcaaataagaaaaatatatgaataaaaaaatgtttaattttattttaaattgtttgtaaaaaaaaaaatgaggcttttacatttttacacttcaaaacttagttttttttttttttttttttttttacttatttttacggtaattttacacagaaacccctattacaactagcgctgcaacctaaattgtaacaaaaaaatcgtatagaaactcctattgaaactagcgctgcaaccactctagaaactgaaactgtaaatttaagaaaaaaaaataatatataaggtaatttcccaaaaaaaaatatatatatatatatgaaatatacatttaaattttaaaatatatttatattatatgtatcacatttttaattatatggaatatacatttaattgtatatataatttttaaaatcttctataaatatgtcaatcaacatccaatttgcacacgtgtatattttgaattttttaattcaatcaaattcgtataagtacgaatatgcgcacttcacgaattagattagattgaatcattgaatcgtgtagattaagttagattgaatcttaatgaactggtttattacgtagaaatctttagtttatcatatatatatatatactagtaaaaagatacgtgcgaggcacgtatagtacattttatgctaggtataatctactttatttaaaaatgatacaattaataattgaagaaaaatattattaattattaagtgattattattatgtatatctaaataatgtaattta

SEQ ID NO: 311181 - DNA, 1468 bp, Cannabis indica
tttctaaagtgaaacatgctattagcaatttcattttgtattttctttatttattatttgagtaattatatgagtgaagaatattataatttatattagaattaataataatattaattctcaatatttaatttaattgatataatatatttttaaattatgattaacattattttagctaccaattcatttgatttaattgtcaaattatatatcctaattaattgttaaatattctcgcaattaattgtggtcgagaatttagtggaaattctcacatatataaatgagaaaatttacataaactactattttggctaatttttttaaacatttacgttataagattttttttttttttttatgtatatttttgcattgttcatgttgacttcgaaaagtggccaatcgatagtaaggtagtattaatctaatgtttgccatgtgttacacacttagaactcaaaagtaaagaacacaaggatttttatagaggttcgacctccttaattagcgggtaattgtaatgacttcatgttagactttagattagtaaaggcaattagcattaacaacttaaattttaataattatatatgattttatattgttgtgttgtgggtcccatttttagaaatgggcattagagttataatttctcatttccggagattttattaaactctaagagtatcatttatgttaaatatgaattatgcaatttttatgatttttacttagcgacgacgaagaatgcgatggatggtcgttcgtgtcacatgggtaagtttagaacatactcttagcgggataaacttttaggatattacgaataccaggtttaagcggagttatgattttggaccattttacccctaggcttattattgcttaagttacaagtaagaggggtatttttagtattttacgttggagggttaggtggctggcttttattttgacaactgtcactattatatttcagcctatactattatttgatgttggattttatctaattaaggaaaaagacaagaacaattaggaagttctagcttgttcccctctctctttcgaccctagcgtaaactaggagaaatcttggtggttatcaattgttctttgtagattcttcaaggactggggtagttcaagccaaaggtaagtcctagaaacccttaatctttgaattctctaagttgtagttggttgtggcttgctatatgtggttttaggtgttgctaggtttaggtttgattttcagttgaattttgagattgttttaagttgattttggttgtttgatgttggtcttgttggtttgagaagggattgggcaagtttgagtttaaaaactcaaacttgactcattaatggcacttttggttttagagtgtttttcttgctgttattgcttggaaaatattatttgaggttgatactgttggaatttattttaccaggatct

SEQ ID NO: 311182 - DNA, 581 bp, Cannabis indica
ttttattttgatatttagggttgtgaaattgaaaaattcaaaattggatgaaaattccccaaaaaatcagattttggtgcaagcacctaggctgccgaggagacaggctacacgcatcctcccatgcgcgcgcgggagaaggactttgtagggtcctttgtgcgacgtttctcggcgcttgcaggatggtgtctgtgtagctcctatctaaacgtgcatatcatgtctgaagacacgggtttgtccgagggaatgtgcgcatacggggttgcttgtccgagggtctggtgcaattgagcaccctcgacaccccttggactcgatttttcaaaacaccataactttctcaatttttatcggaatcgaattctgtaaaaactaaaattgcataatttttcacaaagaatccaaataaattatttttagaatgaaaaataaattcttttcatggaaaaaatttgtgattcatatacaatcatcaaatcacacataaaccaacatgaacacatccaaatcaaaaaattatcgttttaaatccatatttcatgaaagtaaatcattaccatggctctaaggctagt

SEQ ID NO: 311183 - DNA, 701 bp, Cannabis indica
catactgcaatatactgtgtcaagtttcactggtgttctactggtgttttattagtgttctactgttgttttgagttatattgctttgtgttttactggtgttttataaaaacacagtatttttgaaaaaaattccgtgtgacagtatttttgtaaaagttaacccaaatttcagtatttttgtaaatttctctaattaaaatggtaatgtaattatttgtgtgaggtaattaccaaaaatgaattttgtatttatatatacaagtgaagtaactaaactttagaagaattatattctaaaatataaattgtattatttttataattaccaaaactaaagtttgtattatttatataatatctacatttagaactatgtctaaattagctaaatttagtttttcagattaaaaaattagtatttaatatttaatgccatgatcgtgcaaaaaattaaaaaaaaaaaatacatattaattttaatttatgctattattattattcatttgatttttaaattttttaaaatttcgtttaatttttaaaaatagaaactacattatctataaaatttcactttggtaagacaagcaaattatatttcaagttaaaaatagatattattagagatagaaatttgatccacgagaattgatacacgtgatattttaaaaaatcaataaaaaaatatataatttaaa

SEQ ID NO: 311184 - DNA, 752 bp, Cannabis indica
aaatttaataattttttatcaattttttttatacattttaaattttattccattccattcctattcctattcctattcctattcttattcttattcctatgttttcattcattccaaacaaacgcaacctagttatttattgagttctagtttgcatcttaattagtttagtctataagttcaaatccgtaaagattttgtggtcaagaatcaattgaatcttacatattttaatttaataactactgtcaatgtcaaaagtagttagatactatagtctattgtaattattgggaagtattaatgcctaatatatattagcattgctcaaaatatagtaccttggttgcctgttttaactgcagcatgcagtagagttcctccattaggaacaccagtgtccagtgtcgaccaattcttcaatagttcatcaaccaatttcaagcaccagtagcttctttgtatggctaagtaaagcggagtctcacccgcttcattagccgaataccggaaaccagggtcttctccggtcaatattcttacaacctcatcatgtccgaacctcacagcctcatgcaacgcagtgtccttttctatattcttcatcctcaacatctgtaatttcatcacttggttgttttcacattgttcgataagaaacttgaccataaacacacgaccataccttgctgccataagtaagggagtctcctctcttgcatcaccttgcatcaacaatgctggacacatct

SEQ ID NO: 311185 - DNA, 564 bp, Cannabis indica
ctagaaccattgcccttattgctgtgatttctttgtttatttcctcttgaattgttgctcttgtgtcctctattttttattagacctacctcgagccatcaaaccttcccaatttgatccactcttatcatcaaacttcttctgagtctctttggaattcaatgcaactttaacctcaaacattgtcaaagtctcctttccagacaacatagtatcaacgaaatattcatgacaccttggcaatgaactcaataagacaattccttgatcctcttcttcaatcttgacacaaatattgttgaatttaagaatgatcttgttgaacttatcaaggtgcttcctgagctcagcagattcatccattctcaaggtgtacaaccttttctttagatacaagttattagccaaagtctttttcaaatagattgaggacagtttgttccacaatccaattgtaggggcctcaccagaaacctctcaaagaacttcatctcgtgagacttcttttgaatctccttaaacttcttcttatcctccttgatatcttcaagaccttctggttca

SEQ ID NO: 311186 - DNA, 714 bp, Cannabis indica
catggtccaaaaaatatggcaccttgtatccaatcttcattaaaaatttgaaatgaccttttacactactgattacctaaattgtttcttggcacatacaactctactatattccccatattttttaatctccaatttacttctttatatctaattctttttttagaagcctatatgacataaatatcttcatgtacctacattaatttttttaagttcggcaaaccttattttatttaatttaatttttgtatgattaagcgtattatattaaaaaaagaacaatagaggtccatacacatacaagcactagagagacccaggggtcattacatcaaataagcagctggaattgagtttacctagttttatatatacgaggcaatggatttcttagatgctatttaggggtagctactttctacatacattttttttaagggaaagaagcccagaacaacaaatcacgaccttcacagagagaaaggcaagtcctgaatagtttaaggagtagccacactagggagcacccatgtccaacaagcatgaaaaattaagtttttgtaaatgttaataattattacagaaatatactaaatataatactgtatacgtctacagcagcagaatgtaattctgaaattgtacaaaccagttttgcagagacaaactaaaacaggcagaatataaaaataattgcagaaaattaaatca

SEQ ID NO: 311187 - DNA, 1463 bp, Cannabis indica
acttcttggatgtatagggttcaacttggtgttgttgatactctgtccaaagcccatccagccccatctactatgggaactactgtcgctgaatttgttgtaaccgttgctcagcatacaactgaactcaaatctctgcccaagcatagagtgatggcgcgaacaacgtaaacaatgagaaaagcttcaaagagtgacccctatttggctagactatttgtgggggctggtgtggagcaagccagacctttgattgaggaaggagagattgttgaaggggactttgaagtccaggaagttgaggactagggcgaggtccatcatgctactcatcttgaggccaaaggagaagaggaagaggaggaggaggcaatttgggtactgccttttggtggcttcaccgaggagggagtacctatctctaaaactggagaagtcctagaagctggccaagattatgttgaggaggagtgtacagaggcccatcctataaataataaggatccaaggggtgcccggtgggtctctccaccatccatcctgacatttaagagattgtctaatctctatgaagagggttttggaaaggttaaggctttcctcccttctcttggggagctagccacagatcctagtgaaggcttctgtgcatggtggggacctcacgctaaatagggtgcaatgttgtcgttgtatttgtattttaaggggattgcaaactactatcttattagtctgatccaacttacttcgaagggcataaaatacttgtctgccctttttcgtgttgtacgcttcccaaggatggggtcagccatccgcccacgacaacaactagctgttcgaatttaagttagccccaaacagaacaggtctcggtatttcgtaggggtgtgcataaatcgatccaatccaatgagaaccgaccgatccaattacaaccgaccgccaaacattggatatccaattgtgatcggatcggattggatgttatttttaaatatccaattggatcggatcggatggtggatggggtgtctaaaaatccaatacatccaacatccaatcgaactaattagtattttcatttagtttggatgagtaattagattttatattgttatacgtcaaatttatatgtatatatgaaaattaacattaaagttttactctttttttcttggattggatggatccagtctgatccaatacatactggatctaaaatattggatggatccaatccgatccaaaaaatattaggtttaaaatattggataaacccaaattaaataaataaatatatatgaaatacatccaatggatagaaccgatccaatccaacatccaatggatgttggatcgattggatgatgaaattaattggatcggatcggatggtaaaatctaacatccaatatatgattggatcggatctggataggcctaaaaacattggatgt

SEQ ID NO: 311188 - DNA, 1225 bp, Cannabis indica
ggcgatgtgggattgcacaacgtacatggtatttctcttaatggatcattagactactgattctaagactgtaagcatgggattacacatttgaagaaggcttaaatggatcgataggttctacctatatcaagaagatgcatcttattttcgattgcctgtcacttgagaactccaaagttaagcctgtttgacttgaagtaatcttgagatgggtgacctcctgggaggaagcatgcaagtgaggataaagcctgctaaaaataatcatgttagtttgcagggtcagtcgtcattctaggaagcaaccaaagtgacgtacccatgtataagagccataagtccatgggatgatgcccaataaaggcttgaagtagagatgttattgttatattttgatataatattttgattgattaaataaatattacaaagttacaagtttgttactaatgagattgttaaactcgcttttagtcaacgacgatgagtaaattacagtgattggaataatagaatttgaataataaatgagcaaaataagaacatggatttgttatagaggttcgaccctgtgatggtggtaatagcctacttcctatttacttgtattaacttgtgagaaaagaagcaagaggttcttgatatcttttaaaagcttttacaaagattttagcagagtaagtctttaaaataagatttttgatccctaaataataaaatggttccactatttataggaaataattacattcatttggtttcctataagaaattaagaataaaaaagaaaactaaatactttcctaaattatattattcacgcgtggaaatcccataaaaatatgaatttaattaataaataaaggaggaaagtatatttaaggctttctctgtggcatttaccttgggcgatatatgcatagtggtcatgaaatcggcgttggtcggatggtacgtttaacctacacgacacttttaccttattcttcaaataagtaatatctgatggataatccattctggattgtacattgatgatggttctctctatccatgaaaaatgatccacgtgtcacctagagaagcgtcgtgtcaccgtgtgtagatttcaggataacattttgttagaaatattttactagaatctagatttacaaacatgtatgttggattataattctataatctaacatcctaaatatgaatttcttaaaataatgaa

SEQ ID NO: 311189 - DNA, 827 bp, Cannabis indica
tctctctctctctctctcatacgtactatgctatatactgctactgtggtccaaagaggcgataactgtctttgccaatttggtcaatttcaaattattcgcactcagagtaaattttacgtaacatataagtatagtaatatatcataaattaattttcaataaaaaaataattaattaatagtaagaaagaggtattgttaatttggtaatatatattagtagaagcaatgtcattaatattaattataataataatattaatactaatctaggtgcatgcttttgtttctcattcattcgttttcggtttgacacttatatatagaaccttttttttattccaggttggtacgtttcaagcaaatacaaatgtttatcacacttttcatttagaacacgttagagtgtgttaaatgaaacccggcaacaccaaaaaataacaatcagtgtattggctagctacaaaagcaatttaaaatatattatcaagaaattaatgatcttcttgaacaaatttagcttataattaaatgttcgtcaccaccctcaaggcatctttcaacaattaaataattaatatattttgtaatagcatatgtagtgccaatcttttgtgacaaactttgtattaaaatactagacacacactttttccccataatataatataactaattttagtcatgaatagtttaagtaagaattatatcatttttttattgtatagtttaagattaattatgtatacatcattgtgttttaaaaaaacttattaggtataaaagtacttattgaattatatgagactcgatattttttttttt

SEQ ID NO: 311190 - DNA, 1423 bp, Cannabis indica
tgtcatcattcttgttgatttttcacacccataggcattaaagttgtatctgataactctatagatctagttgttttgagaagtttgttagggatcactttgtttatgtttgcattttttgttcagttgtgggtctttatttttgttctcatgttaattctaatcatttccattttgtttgtgtggtacatatgagtttgggtcttggttgtcttgtgtttgtcttatttcttagtttttgatagttgttgtactcagctaatttagttgaatgaaacggcaaattgtaatttttcccaagtatcatttttttatatagctctagtgccattatcatttcaaaaatttggtacaacactcttgtactaaacacattgatatacggtatcatttcataagacaaatggtagaatctaaacttttgactatttttcatgtgtatacaggtactcaacttgttgacttgcttacaaacgctttatatggccacacatttcttcatcttagaaattgtactggtttgtgcaccatctattctggtcgtagttgtatatggtattcaacacagttttatttctatgatttattttggctagtatttcatttgttgttggcttttgttacatgtctaattacatatgagcttcacatggtttttctagttgtgtttttaacatttagtcatccagttgcaaaggctacctcccatagaaataatgggaagagcttccttttgatcaatgtatggcttggggagtttggtccttctcttcttattcattgaaaagaataaataaggcactggctacatctctatggggtgtgaaagccataacttattgaaaaaactcattgagtgttgttgcaaaagagatcacgtgttttcaaaattgtgaaaaatagaaatattactttgagaagagtgagctgccttgattcacctcttagtggctcacgcgaggattctttcacacactaatgacgacttaagtgttcagatctcctgttaatcttttttttgagcttgtatatgattttgacttgtttttgggcaaactacaattggcattctagtaatttgttctaatcttgcctgtgttgattactaaatttcttagttcagatctagttgagctttagtgtttgttgtctaatgttgtttgtaaatttttcttgtgaaaattgctcatcttgtgcattgtgtgtgtttttacatgattaaactctgttatttgtgctatttttgtaccgtgtgtctttgttatgatctggaagagcattgttgtacttggtttttgtttatgttaatggacttgggttatttctaaatgggcgcccaagggttattttgttttttttttcaatataggggagtttcactgtaacgccctaatgctaaggcacgctacagtgctttttcaat

SEQ ID NO: 311191 - DNA, 655 bp, Cannabis indica
aatacttctttacctagaaagacatgaacatgaggaaaaggcattggcttgagctggtaaaggattatgactgtgaaatcctttatcatcctgggaaggccaatgttgtagctgatgccctaagtaggaaaggtcagaaccagatgaatacaatgaaatagatatccaagcaaatggcagatacaatgacccgagctaacatcgagtttgttgtgggatggttagctaacatcaccttgcaatctactcttctggaaagaattaaagaagcaaaatatcaagatccatatttcgtgaagtcttgggacaagatttcagctggaaagactaatgactttacggtggatagtaacgagatgttacgatttatgaactgtgtttgtgttcctgtggatgatgatatcaagagagaaattcttaataagtctcatgcaactccttattctattcattcggggacaataaaaatgtatcaagacattaagtccatgtattggttgcctaaaatgaagaacgatatagcaaagtacattgtaaagtgtttaacctattaacaagtgaaagctgaacattagaggcctgcaggtttgctacaaccattgaaccatccggaatggatgtggtaagacattaccatggactttgtagttggatt

SEQ ID NO: 311192 - DNA, 2885 bp, Cannabis indica
ttgaaaatttatttttttaatttttattatacacataataaactatatatacataaatgtatataagttttctaaggaaacctaatttattatttttttctacaagtctaactttaataatagtaaaacgggtcaaagtgggtcaacacaaacacgacacgattttttatgggtcgggttagggttgagaaaattagacacgagtcaaaaaatgggttgacacgtctgacacaaaatttaaaaacaagtcacataaaatatggcacgaacactgcacgatgacacgttttgccacccctaccattaccagaatgcaaagattgttctccattatttcgatgagatttcttgttgatggaacttattgggcattatccatctcctcatcttgtagttcttgagatcttttggtaagcaccattttttctggtgaaaaacttcaagattttagcttaagctctgttgtgattaacaatcacacaatggaggatcaagaatataaaacatcaagtataaacaatacaacagtagcaagaatcaatttgaatctaaaccagaaaaataaaacaagaaaaacagatgaggagaaagagttgcagaaaaatggctcagcaatggacaataatggcagtaaacagtaatggacaatactcaaaattataccaactgtctaagactctaagctaaagaaaaattgaacaatggatgggagagttgttttaatacaattgctcaggttggacatttatagactaaccaataaaaaccaacttaactaactaaatctatctaacaaatgaagtgatgccaagtgcacaagactaggtgactagaccataacactaacaaatccatcttgaagtagccaccaagactttaacacttgaaagagagagagtgagaggcagagccatatgagaactaatgagaaatttatccaatggcactcatgttcaccaagttcaggcagtaactaaatttttcatgagtgacacatttgataaacttgtcagctaggtaatgatcaatgttcaccttcttaacttgtatcttcttcttggcaatgatgtctctaatgaagtgcttcttcaatatgtttcgatctttcatggaacaaagggtttttcattaagtgcagggcagtttgattgtgacaatgcactgtcatgtcttcagatttgaaccctagttccttggtgagaccctttagccatatagcttctattattgcttctgtagtagccatatactcagcctcagtagatgacagagctaccgccttttggagatttgatttccatcttatgcatccacctagagatgtgaaaacataacctgtgagagacctccttgtgtcagtacagccagcatagtttgaatccacaaagccttcaacttcacagtcttcttgctggctttgtagattaaaccagcgcttagggatcctttcacatatctcatcacccacttgactgcatcccaatgcttgcttccaggataagcaataaacctactgattatgctcatggcataggcaaaatctggtcttgtgcacaccatggcatacatcaggtagccaacacaactggcatatggtatgcagtccatatgcttcctctcaatttcagtctggggtgattgatcttttgagagcttaaactgttgagccataggtgtaataactggcttggcctcattcatcatgaatttcttcaacactttctacaggtatttctcttgtgacaacatgattacaccaggcctctttcttttgattccaattcccagtatcttcttggtttctcccatatctttcatctaaaattcaccttttagttgatccttcaatttgttgatcttgtgcctgtcctttcctactattagtatgtcatcaacatacaagagtagttaaaggtttccattaaaatagacacaaggatcatagcaactcatgttgaatttgatcctatccatgaattcatcaaacctaaaattccactgccttggagcttgcttcaacccatacaatggtttgtgtagcaaacacacctggtttggatccccattgtcaaacccttcaggttacttcaagtagatcttttcatcaaggtttccatggagaaaagctgttcttacatccatttgatctatttctagatcttgatctgtagccttagccataatgcttctgatggatgcttattttaccactggtgcaaatatctcattgaaatccacaccttctttttgagtgtacccctttgccactagcctggctttgtatctcacttcttcagtacctggtaagccttctttctgtctaaaaaaccatttactgtcaattaatctctgtccataaggtttagtaacaacaaaccaggtcttattctttatgatggatgccttttcttcattagtggctttcagtcatttctccttgttgttactttaaatggcttctttatattaggtgagttctgagttttctaactcatttgcagttgcaagagcaaatgcagagtagtctgtaacaccatatctgacagggggtctgatgcttcttctgcttctatctctggccaagagataatcatcaagctcttcttgagcttcttgggtgacaacattgtcatcttgagttggcatttcatctggattgctgggtggatccacctcaatgtttagtttggaggagttgatgtctgatgagtgtagggactggtaaaggtttcattgctatttcttcttctctaaatatcacatctctgctgattatgcatcttttgaaacctagttcaaggcacaatagtttgtagcctttaacaccatcagggtacccaaggaacatgcacttcaaggctttaggtttcaatttgtcttgcttc

SEQ ID NO: 311193 - DNA, 878 bp, Cannabis indica
agtacatgtcaaagtttgatggagaaattgctaattagccatatatattaatgttttataagttacattttaaaaaatatgggactgggtgatttatatatagaaatgaaatatgaatggtgatttaaggtattaaagactttatttaatactaccaatatttatttataatttctttaaagaaaaaatatatatccactagtattaatttatgaatattttaatttttgaactcttaataataaattaagatatgttaaattaacttatatattaaataagtagagtataatataattgtacatttaatatttattttaatttatttctgtgatgttgcttcttaaaggacttaagttgttctcaacctcatctggtttactgccaaatgaacagaaaacagccatttattgtgcaggaatgcctgaatttgaagtccctaggatccttgaagtatctaattttacaaggagctcattaccatttagatatcctggtatccatgtttgttcaaagaagatatctcggactgaatgccaaagtctgttggaaaagatgacaaatagaatacgaatgtggagtacaaggaacctatcttatatggggtagagtaaccttgatcaattcagttttgctagctatacatacttactgggcacatatttttattctaccaaagaggctcttgaaagatatagaagtaacatgtcgatcatttctttcgaaaggcactcaagaaggggttggccctggtttagtggcctgggattcagtatgcagacctaaagcagcaggaggcttagtgtaacgccctaatgctaaggcacgctacagtgctttttaaattattgtgcaatctttgctaatcaaagaaattt

SEQ ID NO: 311194 - DNA, 3271 bp, Cannabis indica
gtcatcagattatttgcaagaacacagaagttttttaattcattttatttgttcacgtttatttattatttcattttaatccaagtctaataatctttttgttcttatttgcagttgacagtgtactccattttatgtccgcgagctcatgaggccgagttttttagcaacgtcactggaggtgaggcgcctctatttatagatatggaggaattggttattggcagtgatggagagcccactcaggatagtttgcgtggccaggcttcgaagcttgcacagaagctagaataacgagcagaggaagctagaatcctcagagctgatacaccaccacactctccaccatcaggggcccattctgttccaccgcctgcatcaatgccccattctgcatctatgcctaagtcaacatctattcccggtacttcacagcctacggatcaattatcttctaccatattggcaagattagagcgtgtcgcgaaggaacagcttgctttgaagcaaggacagactcatattctaaaagggcagatagagataatgcgttacttgaagaccctattggtactcatgggagatccgagaaggcccaatgtagaggcagagccacagccagaccccgtctctccaggagatgacttcattcttcctaatgactacagacctgatgaagtggaagatgtactccatactcctcagaacatgtcaattacgtccattggagatacgcaagactcagaggtacaggttttagagaccgttccaacaccggtggagaagagatcgaagaaaagagcaaggtggtttgacgagtacaccgaaatgaagaagaagatgaagccatcgatagccaatgcgaatgttgacccacttcggcccgttgatcagaagctactacatagttttcaaaattggttggtgggaaccatcagaaacaagtatctgaggcacgtcttcatcggtgttcatggcgtggcttggttccagaagctactgacgaacaaagaatggctttctgatgatgtaactttattaactaagtattatgatttgttatttactgttatttactgttgttatttgttttatttttttaatgttctaatgtggttgtgctgacttatttgtatgtgttgtgcagcatttggatgaggctttccatatgatgaggaggcggcaacacttcttcccagagttgtacccacgtaagtgtactgtcatgccatcttggtttgcttcatcgttgaagggtcggtgggacgcttggaagaccaatactgaccatgctggctttgtctgggatgagtccctcttggaactcgttcgtggggatccaaaccaattcatgccgtcttggaaggatatggagtgcatatacatggccatcttcttggaccgacagaaacattggatcgctatggaggcgaatcttgagttgtggaagctattcgtcttcgattcgagtattggaactctaacggaaggtgaactaaagacgctgatggatgcttggtaccttttattatccaaattggtggaccagtgtggtgtatgtgacacccattacatggtgatggtcactcaaatgacagcctccgaaacccaggtcagaaaattcgactgggatatcatggacaataaagttgtacttaaaaaaaaacgaggtaatttaaatacaaaaaactaattgaatttaaaaaaattattattattctctatggtttattaaattttgcgtttaactactattgcagtggtgattgcggaatgtacatcatagagcatattgagcataagttattggatcgaccattcaatggagtagatgatgaccatatgccgctcttccgccagagatggagaatagatttatcctaccaaaacttgtcatgaactttggatattttatttattatatttgttgaacaatctttacttttacgcttttctatttgaacaatctacttataacccgatccacttctgtttgttttgaaatttgtaaaaaattgttttttttagatagtcaagcacttccttccatgcaaattgaacgaataactacaataatagactcaaaaaaactaaaagtccatgtttaacacataacagtacaagcagttcatggaatacataatgggaatagtacaacacataataatattaaattcaacatttattttaaacctcagtaggtgcaagtgcttctgttgtgccccgtggcaccccacttgccacattttcgtggtatgataaccctttcaccattacaagcagtttggtttgacttaattcttccaattgtttgcttcttgggttgccctactggttgcttctcaacaggcactcaaactgtcatgttctttatatcatcaggcacttcccaatcatcctcgtcaccaaatggcataattgtaccttcatatgtgctcctccaatattctgttgtgtaatatggcgggcatggtgcgtaaacgctaatacttctttgctcagttgcagcacatgcatgaggacaaggaaacttcatgcactggaacaagccacaagtgcaagtctgttcttgcaagtccattaaaccaccggtctcaacttttcgtccagggtgaacctgcaacgtgtaagatccacatgtgtcaacgttcaaataccgagatttttcaaattgcgaggccaagtcctcttccatttcaggtgctagggtcttcgtccacttgtcagctttttcttctcgtgtagcaaaccactgtttaactttggacctcaggaatgttacagcagcagtgatcaggttgcctcttgcgtccttagttgtgttgttgaagctttcagcccggttccaacgtacccctaaaaagtacaactgaacccatttttcaaatccaatttcctcaagatattgtgcaaccgcaacattcattgcccgaatgttctcaaattctctgtgaaactctgattttgaatacgtgtgggtacacgtgtaaatgtgattcgtgaagatgtcagtcttgaacttgtggttgacgttcataatggtagcatacaccgtggtgtgcatcaaagaacacgatcttcaaagcacgaacaatgctttgatgcctatctgaaacaaaggctaagttctcaacatcaccaatcgtttctttcaattttctcataaaataggtccaagaattgtggttttcactgtcaactataacaaatgctatcgaaaagatatggctccctgcatctagtgccactgcacacaacatttgcccaccat

SEQ ID NO: 311195 - DNA, 2052 bp, Cannabis indica
gataggaccagtagaggctggtatagtggcaggcacgggtatagcagctggtgtagagtctgtcacaggttgagctgaagcttcagttgctgcacctgtaggaaaattatctgtagaaaccacattagtaggataaaaaccaaaattttgagcattgggcagaccggtggtggcacaaggagttgcagcaacagagtttgtgggttgagaggggtgagagaagccaggaggagggccaagagagctaagtcttggagggacaccagaggcagacacatgaggaaaaccagaggtagtggttcgagaggtctgattggtgttggcttcaagagcaaaggggaacacaagttcatcaaaaagcacatccctagaaatatagacccttccttccttagacaaacacttataccctttatgagctagactatagcctaaaaaagtacaaggttgtaatctaaattgaagtttgactttgttatagggtcttaagtttgggtagcataaacaaccaaacactttgagggaggtgtaggctggtttgacttgaaataggatctcaattggtgaaagatggtttaactggggtgaaggcattctattgattaagaaaacagcagctcgatatgcttcatcccagtattttaaaggcatactagcttgagctaataaggtcaaaccactctcaactatgtgtctatgtttgcgctcaacaactccattttgttcatgggtgtgaggacatgaaaccttgtgaacaataccagattgtcgtaggaagtgagtaaaggcttggtactcacctccccaatctgattgaatttgcttgattggtaaaccaagctggagttcaacttgtgttttgaaagtgatgaaggtggagagagcctcatcttttgttcgcaacatgtaaatccaagtgtgtcttgaaaaggcatcgacaaagctaatgtaatatcgattagaagaggtgattgggacaggaccccacagatcagaatgcaagagttgaagaggggcagtatagacagtggtggattggggaaaaggaagtttgtgatgctttccaagacaacaagcagaacataattgagtggaaaaattaatgtttttattgcttgtttgaatattacatgagttgagtacatgttgaactattttatggtgaggatgacccaaccttttgtgccataaagcaaaagtattacaagaatttgacagtgtattagaattacattgtgttgacagaggactcaaggtacattgattggcaacagtggaaacatcagggatattggaagaggatgatggttcctgcttgcttagggacagaatgttgagttgatttggagcaaatttgtaaagaccattgtcaagcttcccaacaagtaaaatcttcgaagcaacctggtccttaacaacacaatgagaagggtgaaactcaaaaaagacaccattatctttagagaattgagatacactgagaagattcttagtaattttaggcacatgcaaaagattattcaaaacaagagtttgattataaaaaggagacacaaaggaggaatgaccaatgttttgaatgttcaaacctgtgccattgcccatatgaacctgctgctcacccgtgtaactgctgttattggtcaagttctgttcatttggtgtgagatggtttgtagcaccagagtcgggataccagttcggatcattaatcacttcagatgttgcataataggcttgcatttcggctatattagcattaacatgacctgggaagttttggaatgattcgggtcctgtgaaggacttatcaaatctatagaaacactgctgaaccgtgtgccccagcttgtggcatagctgacattgaggtttttgtccccaaatggtggaaatacctcgaccacgagaaactcctcctttgaagttgccaaagtgaccacgagttgaaggacctgaacctctggaaacagacaagaaagatccagattgtaatgaattttgttgagaaaacgaggaaggattacctcgatacatgttgcctgatccata

SEQ ID NO: 311196 - DNA, 2852 bp, Cannabis indica
aacacatacaaacaactagcagaagtgattttgacaaacaaagaatgatcagatttagccgaactgaacccaagattaaggagaacagaggaaagtttgtcaaaccaagcacgtggtgcttgcttaagaccataaatggctttttgaagtttgcaaactttgtgtggtgctgtagggtcaacaaaacctggtggttgaaccatgtagatttcttcttgaagatccccattaagaaatgcattgttgacatcaagttgtcgtataggccaaccctttgtgagagcaatagttaggacaatccgaatggtaacaggtttgataactggactaaaagtctcattgaaatcataactagcctgttggtgatagccttttgcaacaagtcttgctttaaattgaataacattcccatcctcatcttctttgatccgatatacccatttgcagcctatgggttcccttccttcgggaagattgacaagaatccaagtcttatttttgacaagagcaagatgttcaacatccatggctttgagccatttttcattttgcatagcagccttgacagtagtaggatataaggaagcaatgagaacccgaggctttcttatacctgacttggacctggtacacatggggtgttgatttgtgacagaggaggtgctgaggtggtagtttgtggcactggttcagtgtttggttgagttgtggatgtagaagtaggttgtgttacatgtagatgctcatgctcaggttgagatgcaggaatttgagtagatggaagatgacactcaggttgggactgagagtttatagtggtaggaatgagaggagacacaggtaagggagggagagtagtgacaggtgcaggtggatgagttggttgagtggctcggacagatggagttgtaggcactagagagtccattgaaaatagcctcaatgtgatcctgtgcagacattggatgaccgatcgaagcaagtaaatcaacaagactcttgatctttaacaagaaatcgcttaaagaaccttgcattctggagtttcttaactgagtcttgtattttccaatgtttgcacgattcaatgctgtgtaatactcacgaagagttccccagatctgagctgctgtgtcacatcccaccattctggtgagaatcttttcagacatagaggacaagagccaagatacaagaatgctatcttactgatcccagtgttcatactcaggtgaagtttgattgagcaatcgatcctcattggtaagaaacatgggaggagtgagattcggatcgaggtgatgctgaagcctacttcctttgattgctgcaaagacctggtggtgccagggaaggtaattgaattcatctaaacgcactgaaagtgaatgagaaaatgttgcaggagcagacttgggaagattaagagaaccattattcggagtagctgcttgagacgaaccatgatttgcagccatgaacgaaagctctgagtaacagagaaagatcaagaaagaaagagacaagctctgataccatgtaaagattgtagaagaagacaggagaaagaatttctgttgtattgagataagccaccagtgaaggtttatatacagagcaataagcaacaaaccagctaaagcaataagaggaaattagttacaagacagttacaaaccaaataacagaaccataacagaaagattactaatctttaactaacttctcttaacacctgcaacattggaaagggcacaaatggctgttgagatatgtcaagactacttcatagattggtttaaagttcaccaagcatggaactaagatacaatcggaaggttttgttgatgttgattatgcatcaaacacagacaccagaaaattcataactagctattattttcaattaaatagcttgtacagcaactggaaatcttagctacagtctgtggtagcattatccacaatagatgcagagtttatagcaaccacggaagctttcaaaagaagaagtttggatcaagggaatcctaagtgagctacagatgatcaaaggaaaaattattattttcttagatagccaatcaaccatttatatctgcaagaatccaatctatcatgagagatcaaaatacattaggttgttttggatccgagagaagattgaagatggaaatgtaaaactcaagaaggtaccaagtgaagagaatcatgcagttgcaagaaccaaaattctttctctcagcaagttctaatattttttgaaattgctaaacattggctccatctgaagatagctggatcactcccctgatgtttttcttgtgttgattctatgaactaaggtaaaaaaaattgtatggtaattcgcagaataaacaaaactaaagttaacagttttaactcataaactgtcaagttagttgaatgttgtagcattctattttaattggttatagtacactcgatagaagttgagtctagtccttgcttatttaaaaggctttagtcattcttgtaataaaaaaggaacaattcatactaaattgagagagaataagtgaaattgggtgggaggaagattatgtaaaagagaaaatcagagagaatagagttgggaaactggaccaatactagagttcttagagctgaactcgagctgagtttcaagtgtgttaatctgtaattttctctagggtgcacacaactattgaagccttgtattcatcaaattaatggagtagaaagaaaactcaggggagtaacctcaagtaggtcctttgtttggccaaatctgtataaacatattttgtctcttttactatatttttctgcatttaatctctgttttt

SEQ ID NO: 311197 - DNA, 1245 bp, Cannabis indica
aaataaatctcatttgaagcatcattcgtaatatcatggtgatattgattgttttacttggtcaatctctcttatttgtttatacctaatatctatatctatgttgcatttactgtcgccattcagggagagctatttgttaaacttttaattttctcaggggaagcatttggtttagaaccatggtatttttggcatggattatgttcaatgaatggggagaaatacttatcttttgtgtaaagtgttgtgtttgttgcttggttgtttgacaactttatttttatgtttgtttagactctgtcatatttttatggttgatttgttaatattttgttttacactagtattttttgtagtgacaaattaggtccagttgcatctggagttcgtggtgttatgtctagagtttagattgttagtgatagtccacattagcaagatattatttgggtgtttaattttccagctgtctacttcgagtttctttattttattttattttggtaagtttgagtttctttatttagttggatataaataccttttattgttactgttttgactaacctttttcatcgaagattagggatttgtttctttctttcttgttttgtctgtgtgttttattgcaagtactagcaagaaactccattgttgtgggttgaagttacagagcaagtcttgtagtcaagtaatgagagttgaagggattacaattaagacttggcattacagatttaaaggtgttcaaatctagagcttcgttgaagagatttcaatgaacaagaagcaaggggatcttgcatttataaccaagggatttggttatttagggtaaaagtttactactgtaaagatgagtttgtttttgtgttataatttggattggttattgtacaaacattctttgatgtagtgaaggttattaccctaggaacccaagcactagtcggctggaatgagtttccagtgtagatgaaacttataattttgagtattgactgttatattttagatctcaactttcatgtttaaatcaagataaaatcaacctgaatagagaaagataggttattgaaaacttgggatatacaatatcgttctaactttactttcaaattattttgtgtataaacaatgttattgtaatgttaaattgttaaattatttagagtaatttacggcaaaaccctcaactattaatttacttgtaaaaaaccacccaacctcatattttggtgg

SEQ ID NO: 311198 - DNA, 747 bp, Cannabis indica
aaaaattaactatgaaagtgggtcgatcaacattgggttgccaattcgggccaggaacccaggttcggttattgcatttgggctaaaggttggggtcctggttcaggggtcggggtctaaggttagggttaaaggttagggtgtggatctaagtaggttcgagttcgggtccaaattcaagtttgggagctggggtcggagtttgggggccgagggcttaggtgagagtgtaagttctggtcaaagtcaaagccaaaatcaagatccgagccaaaattggtgtttgaggtcccgagatagggttgagttcaaaaatatttatgaaagagaatatgttaaataaattttaaaagtaattttctttttgcaaaatttttattctcattttaaaaactaaacatattcttattttaaaagtacttttactttttttaattaaaaaaataaaaaattgttcataatataaatttctctcttaaactatatatatatatatatatatatattttttttgtaaaatttctactattattataaatcagatgtcatatatatatatgagagttatattttcatctcatgaaattataaatacactttattattaaaaaaatatatataaacttaaataattttaaaattactcttattattttttaaaatttttcttcatattattttaagttaatttcaatacttattttgatttaattttcattaatttttctaactcatgtatatattttt

SEQ ID NO: 311199 - DNA, 2185 bp, Cannabis indica
agagcaaataattccttcaagatcactaaattaaaaaaacatcttaccatcttgactagtttttgagtatcaccaacgaaagtattacacctgcaatatgcagacaccaaaaaaaaaaatattaaataaacagataattatatatcatatacctttagaataaacctaaccaataaaatgctcacgacattccaacatttagtcattagatgaaaatagcaacatatctactacaccattgtaaaaatcataaatttacacatcaattactcagtaaagaaacatatattcaattaaataaactcactttagctacaaaataaagagctccaaaatatatggtcaccacatcaaataataaagtaaaattctatatgtcaagagccaagatcagactaccaagaaagcaaaagcaaaatggttaaactttgattagatccatgaacaaacacgcacaaaaatagtatcacaaacacacattataatataattcgaagtgatgaagatataaaacagaaaagagtttatgagaaacgaaaaggagaagaaaacctgagaaggaaggctcaaaagagagagaaagagtaagcttctctgttatgcgttctgagccaccagctaaggattatggggattatggggatttgagaagataacgtgaaagtaattggtgtaaaaaatatatgggtaaattgtggcataaatacttaaaaaagtttacatttttatacacttgaataactaatgtttattttttgtggcaaaaaaatacttaatgttacaattttcttacactgttactaccacttccgttattaactcataaatatagacacgtggagttttttaatttaaattatattcttaatataaaaaactaaatattacctgtattttaaaacaaataagagagatgcaatactaaattaccataactgagtaataggtaaagtgagaattttataattatgggtctttatgtaaaaagcaaaaaagagttatttaagattagtattttaattgttctaggaaaacatggagttggtcttaagctatttaaggcctaaaccaaaatagattctcgatttatttcataaatactcaaaaaataatcaaaaatttacatttttatagaattctgagttttattatattttttatggtttttttttttcttaaagaccattgtctacacgttattttaaaaaaattattgtttttcacattgcgaaaatatggtataatattgcgaaacatgacaataatatttttttgaacaaacacaaaaacaacacaaaaccgtaaaaatgtaaataaaaaataaattcataaaaatgtaaaaaagaaattcatttttaggtgtaatttgtaaatttcccataattcatggacgagcaaagtgtcgagaagagaaatgctaaaaggcatcactgatgcctagcaccctcctcgatatcctaccgttattggtgtaattatgtatcaggtcccatataacttaaaaaaaaaattaaggaatattgctaaccaattgtaaggcgtcacctatagaaggtgttgagcaccactagtacccaatatgctcgtgctgagaaataccagagtgtagtaaataagcatgccccgtcgactaggcaccttgactttggtcttatcgggccctatatcgaactcattgtgtcacaataaaacttaaaattatgaggaccatcagacccactatcgggccctatatcggacctattggactatcttcttcaaccttcaactccttcaacattaacctaccattgagtcctatattgggcctacatcgaacctgcatcgggccaaacaaaaatcacaaattctcccccaaaatatagatccgagcctaaaaacttcaaaaatcgtatattctccactaaaaactactaaaaatatagacctaaccctaaattcaattgctttaaccctaaatcatgataaaataaaacaattacaattaaaattcataaaaatttaggaattacctttaatgaagatattgtcagcgttgggtggtgtggtcacaatggtccgtgggtggcatgggtggtgtggttgcgaggccgaggtggtccgtgaatcgtgggttgtgtgctcctccatgtgcgtgtttacacacacacacacacagagagagagagagagagagagagagaga

SEQ ID NO: 311200 - DNA, 1960 bp, Cannabis indica
ttatgtaagcttgtagattcaatatatataagttgcacagcaacaaacaccaattaatgaataaaaacaatgtttatgttcgaattattgtgtctaaaccacttgataacaagattaccttcttaaagttattttttagttccacatgcacacaataggtatcacccaaagaaaattcccatgtaagatctatgaaactagatgaattgtaagtgaccaagcgaccataagtctgggtgctcacttgggggacacccacacagtataatgcattgaactagcacagagaatttatgtagagaaattttaatgcttaaattaagctactaaacctgcctctaagtcaggtgtaggcatactttgacttggcataaagaaaagtaaatctggatatttacatgtcaatgccataagaagatagccaggatttaagaccgcctggttggtcacccaatccatgataaaaagtaacagggctaaacaatagtaatgttcaaaaacagagtgcctataggccaagagtacaaacttgaaagtcttgaggttgaaaataagtagtgttcaaaaagtaaaaggcccttaggccatacagaacatgaaaacactatctatactataaaaccataatgctaaaaaactaataagctgaatctacgtgtgtgcaggtgcaaatggggctgaataaaaagctgcaaagtttggatcgatggagtgtgggccggccatagcctccataggctggccgaccacctccttagcaggtgggctagccatcttctcattgaagtgctcggaggatgacccctctggctggacagtggtctggtcgcttctaacttgctctcgaacaacgctcatccttgggccagtgtgctcttcaagaaagaagtattgcccatgtataaaagatcaacattggggttgcgtagcttgaacttgtaaatgagttccgaagataagccaatgtactcatccttgatggattgctggccatcgagggctgtccttagcttctcttaacacctagtgaggttagtctccaacatggagatgtcagcagcttgcatggtgttctcctagtttttgctgctgagcatggtctccaaacatgaaatcatgttcatgttctgtaggccaaaagcctccatgtcagccaaagccttgccctttgctaggaggtcagtctccaaggtatttatctgctcccgaagagcacttgaagaccctatggggtttccatgcgagaaactcagcttcataatggcttgaaaacaaaatagggtaaaaattagtgtcaggaaacaatattggccgaccaccccttccatcaagttgccaaggccgagcagcccctcaaagacacaacttggctggccaacttcatgcaatggcaactatggccgaaaagcctataataatgccaaaaaactgagcaaagttaagtgtgcaactcatcatagctaaatctcaaatatgggtaaaagagagcctttctagcttagtgtcatcaacctcttgaagctcatcatccacataaggaaaggctctgtcatgccacctacgagcatttgccacgactctctactgttaggctaattttagtctaagtttcgggtcgtgttttcgggtagtttttgctttttgtttctagttttaaggctattttatgcttgattcttttgttttaggttcccaaatttttaaagaaagtatttacaagaatcatggacaagagatgaaagaattgaaaagaaaatgcacaatgaacttttatgcctaatcccgccgcgacgggcaaaatccttcactgcgatggaattggtagaatgttatgccattttgttgaaaatccttcgctgcgatgagcatattccttcgccgcgggaaagccttaatgacgagatttttgggcaattttgtaatttcacaaattttaaagagaaggcttggtttaattaga

SEQ ID NO: 311201 - DNA, 793 bp, Cannabis indica
ccccttattgggattttgtcaatcttaggagtgcaaaagacatgcttttgaggagcttggactgtcacttcatggtaggttggctttgttattataattatattattctttttatacctctttcatattaatctgtttgcaattctccaggcttcttttgcttccaatcgtttactctctgagcggttgaatacttggagggcgaggttaacaagttattatcccaatataaggttgtgagtaagcatcgggacaatgcccaacaggataatacccaccttaagcaagaagctgagcaagcgaaggaggaagccaagaaggcaaagaaggaagccgagaaggcaaaagaggaagccgagaaggcaaaagaggaggccaagaaggcaaaagaggaggttgagaagaccgtcaaagcccaagccgatgagttttagaagaatcttgctgaaaaaggaaatagagaccataaatggtgcgataaagtttgtttttgaactatatatcgggcctagatttggaaccctaacatggacaccagcttcttaatggaaaaggaagaggaaaatttagctctttgcgagaagaccaggatggaggaagaagatggcaaggtcgaggaagaagaagaagaagaagatctatccaagtctcccagcatgtagacttggtttttatttatctcccttttctcttttagaaaatggccctttggccgacacaatggtttgcccctggtggtaccttttttttgtaaagacagatttgtaaggttggatggccaacattgcttttt

SEQ ID NO: 311202 - DNA, 2042 bp, Cannabis indica
gctctagaaggccttccaactcacactctaaacggaccgcccgctccaggaggacccaacctgagggtggccccagtacttggaccactcattccaggaagatccaacccgaggctggtcccagtacacgaaagacatgttcgaggaggacttagcataggaatggccaaaatcccagagtcagagatgaagggcccaatcgtggaggtgctcagcccatgggtgaaggtacttatgacgtggaaaactgccaccctaggcgccgtctagaggaggcaaaccggcgaaacgctaaattagagcatgatgtagccgcagccagggcggcacaggggaataacactcaaaatcaacctgaccctggagtgagaagatcacgaggcaggtctcgtggatcacgaaccaggagacgcgaaactgctcaggaagaacaacctagagaaaatgaggttccccttgaaaatccaaatgatcatcgagaaccctctcatagaaatgagaatgggagacaaccagaaaaaaacgaacaagaaattcctcatggaaatgaggaagacctagggacacaacctggggaacgtaggtcatcgacaaggaatcaccagcgttcttcccgaacccatagagagagggctcgtacaaatcccagtgggggaaatacgacaaaccacgctcagggggaagaacagagcgtgaagaagcaagtgtgacctcaaggcgttcaaggacccacagtcgatcaactcgaggaagagagagtgctcaacgagctaatgatcgagaaagcacgggaaccagtaaacccgcaagtcactcgaggatgaggtccatgagtaaaacgagatctgtatgtagggcacaatctgtgagtagaacgaagtctcctagtaattactcccaaccgaatctgcaagaacacttaaattgaaaaaaaaaacccgatctttgccaataactcggtccaaagcaataggatcctatccaactgcgaatagacgagttaaaggataagttcaggagatatcaagtaggggaattagggagacaatctagatacgacttagacaaggaactcgagccataccatccagatatcatgaatactccttttccctcgggatttaaaagccctcatgtctcttcaaatgatggaaccaccgattcggtctcacatttgaataacttcaacacaataatgcgcgctagtaatgtgatgttgtattttgtttcccaccttgctagttggagcagcaagtagctagttcaacaagtttactcaccattccataacttcctgggaacagctgtctaaggacttcaaaaaatagttccaggttgtaagggatagacgacccgaggcgttctcgctaactaatataaagcaacagcctggcaaggcgcttaaggcctacttaagtcattttaacacgactactgcgagggttagaaatctgggtgatagtacacaacttactgcttttcaggcggggatcactactgatctatcaaccgctaggggcgaattgtgggacgacttacaaggtcgtcaagtgaagaacatcactgagttcaacgaaaaggctgaggtattcgtccgaaaagaggacgctaaaaaagagatgaacttgttaaaaacaggctcgagaggcaaactcaacaatgtttcaacaagtactatctcaaccagagtttataactcaggggcctctgactcgaagagaaaaaacaattctaaggagtcatcaaaagacaaaaagaaacataagaagcacgataagtacgtgccggtttatactatttataccaagcttaatgaaattcgggaaaatatttacctcgcagatgagcacaaggttgccttcagcaagcccgagcccatgaggcatgcgaggtacaaaagagatcctaccaggtattgcaaataccataaggacattgggcacacaacagatgagtgccgtcagttgaaagatgagatcgaaagtctcatcgctcggggccacttcaagcagtatgtgaaaagatagggcaatggacataac

SEQ ID NO: 311203 - DNA, 1105 bp, Cannabis indica
tttcccatagatccccaccagaactgggccatgagttgctcaattttcttacaaatagagacgagaagtttgaaacaagacataacataggagggaatagcctgaataacagcttttaggagaacttccttaccagccttggaaaaaagtttattactccaaacattcagatgagaactgactctatcaaggataaagttgaaactggtttttttagaacgaccaaagcactgagggacacctaagtatttgctcacaaaaggcttattatctaaacctagattagagtgaaaataatcaaaaatctgagaagaagtattaggagaaaataaaatcgaagatttagcaaaattaactttttgaccagtagctagatggtacaaatggagagcctcttttaaagcatcacaagaatcaaaggaggcatcagtgaataaaagggtatcatcagcaaaaagcaaatgtgaaattgatggagctgatctagcaatggagatgcccctgaaaaagccatttctttcttggatctttaaggctgaggacagaccttcagcacaaagaaggaaaagatatggtgagagagggtccccgtatcttatacctctagaaggaaaaatttctttagatacattgccatttatattaaaccgtatgcaaacagaggaaagacagttgctaataagtctaataaaagaacgaggaaagttgagtttatgaaggatcactaggacaaaagtctactccacacgatcaaaggctttttccatatcctgtttaaggccaacccatccaagtttcccttgcttcctatgagtgatagcatggatcatctcattggcaatgaatatgttgtctaaaataagcctatcagacaagaacgcactttgggtcggggaaatgatatcactcaaaacagtctttagcctattaacaataattttggccacaatcttatacaaagtcgaacacaaactaataggtctaaagtctttaagagagacaacattagttttttttgggaatgaggacaaccaaaatactgttaatgtaacgccctaatgctaaggcacactacagtactttttcaattattgtgcaatctttg

SEQ ID NO: 311204 - DNA, 1387 bp, Cannabis indica
taattaacatgaaagtatcactagaaaagatagtagtaggggtgacaaaagttgcccctaaaaacttttataatcgtccttaaaatgtattagggacgacaagtcgccactaacttgtcgctcttaatatttcgtccctaatgctcctttttagaggcgacaaaatgaatcgcccctaaaaatgattattaggggcaactttttattgcccctaaaagtattaaaatcgcccctattttaggcaaactaggagcaaaaaaaattatccctaaaagtgtaattaatgtcgtccctattcgcatgcaagtatgccaacatttagtagcattaatcaaccctatattatttaacatcaacaattaaatataatatatcaaatgaatcttgtaaataattttgaatttcaattacaaagaaaaagtttatatcaaatgaatttcaatttataaacattcataaaacttttttcatgattcaaattatctaaaacaaaaaaatattctaaatgtctaataaactcatgtctagtaaatctcattagatcattatatgagtgagtttataaagtcttgaaacttaagtccaagcacagtgaagcttgatttgacattttgcaaatatctaacggttttctacaataatcactaaattaaaatatgtgatacttaattacactaattataatataatattacactactagttttgatttataacattgtataggtaggaataatgttgtaacgactttgctatttttgttgcttcatagaatgcggttgaccttatgtaaatcaacacacgagtctttttattttaacgtgtattgtcttcactcgcacgctttttgagaataacgactagccctacaaactaacacaagtaattttaatattttatcctcactcgcactttttaaaaataatgactggccttgcacatgctcgttgactcaagccaattaaaggcctcgggccattaaaattaattggatcttttttatataattattaattttttatgtctttttatatatagtggtaacaggctaaaatatagtatcttaaaaatataattgggtctttaaccttaataaaatattaaatacagtatctcaaaaataaaggataattacataaaatactattttttgtaaaattttaatatttttaagttcaatttttttttttacctttttacggtgctctataaaaataacatgaaaataacaaacaaaaaaattacataaaagtaacagaaaaataagaataaaataatatcaaaacaacaacaaattaacaagagtacaacataaaaatacaatctaaacactgtattttctgtaaataaattataaaaaatcgtaaaaaatatttaaaattactgt

SEQ ID NO: 311205 - DNA, 948 bp, Cannabis indica
tattattcttgaataaccaaatcacctttcatcacaatcttccatgccaatctaagtattaccttaaattgtgtggtaattctcaaacactaaagccacgaatttgagagtgtaaaagagagattcgaaaatagctaaggaaaggaaagaccttttatctaatttaattttctacatttttggctgacaaaagttctctcttgaatcaaagccttcatattccttttataagctctctttaggtttagtttaaagtagaatgggctttagaaaaatatagtgagccaaaactaaaactcttagctgaaattgcttatatggcccatggttttgatttgtgtcactttatttcatttaaatgaaattatctttatcttttctaaaataccatctttcttctttaattatttaaatgctaattttatttatttaataattaaataagtattgaacaaaattaccatttaaatatatttattaattagactctctaaagtctcttaattaacaaataaaccctctttttacttttcttatcaaataagctcttactttgtgaaattcataaataacataaagtcctctttagaattctaattggtttaataaaccaattaattgagtctacaagataatattatcccatatagtgtggggatcatgagcctatgtaaccaagctcccaataagtagttctagtatttaacaagtaaattctctatcttattaatttctcttgactccactataaatttagaattgtactgttgattacacagaacgctctatacaccctagtatagatacgcggtgaattatccatttcaatctaaacaatcaatgatcctctatggatggtttacatcatgtagggagaaatttatcgttttatccctcaatgtattttatccttaaaacgcttagctacttgtaaatgatatctagtaa

SEQ ID NO: 311206 - DNA, 1036 bp, Cannabis indica
atgtgaaaaaaaaaatattttttcataaatattaaataatttaatattaaaaagtaaccaatctaaagtaaccgatccaatccgcacttttgcggattgaattggattggatttgagctattgtgcggattggattggatccaaaaaataaaatccgcacttagtgcgaattggatgttgtttgaccaaaaaaagtacgaattagattggatgaacaccctagtttagagattggcaagaatccaaagtttaataagtaataaaacctttctattattattattgttatatttcaaaatatacttttaatatgtgtaaattagctgttcctgtcttatgatgtaatcttctaaaatttttattgttatttttcttttccacctgtacttggaaaagaaaaagttgtgaaaattgaaaacatgtatattatttttttttttttcatgaattattgcaataatgttagacattatatgatttgtacggaaaacaaaaaaatataaagaatagatagaaagacatcacttctggcgagaatgatgcttctatatatgtgttacagtgttagttaggtgccagttcaacatctaattgagggccattacattatacggctgactcctttccaatctatagtagtcccataaaattttgattatgtgtaatatcatatttggtatgtgaaaatatgtgatttaagtatttctcaattttgatttttttttttctttctttctttggattctgtatcacatttgatcattgattttggcctcggcaactaaaaacgctaatccagcaattaaaaaagaaaagtttttgttaaaaaaatgttatagtaaatgtggtattgttaagaacttgatctgttgttcgatgggctcatacggagcccaagaacctaactacaactatcgatcttaggcccaccttgtacgatatgggatcattgcaaaaggaagaaattatactctataccctttttatattgtcctttttatttttaccttcttttttaaaatctatcatttttacc

SEQ ID NO: 311207 - DNA, 817 bp, Cannabis indica
attttagcattctcaatactcacttttcagattttgtattgagatcataaagcatgcctaaggtgatgaatctcaaacatggaatttagcacaaacatgaataaatacacaatcaagaaaaaaggaatagcaattaacattaactcatggcataaaatcaatcaacattcatcatctccccaaataggagtttagttcataaaatccataatcaaatctaaaacataaattaatatagaaattaagagtttaagaaagaactagttggtgattgtgctcttgattgccacaattgcttcctctgcctccttctttcacttttgggtcaaatttctacctccctcactcctaaaacacgagccccttcattagaaattagggtatctaactatgaatggtgaaagtttaaaattgcccaaaatttccatgttttgcccatactcgcgactacataaagcctagtcgcgaccataggaaaaatacaaaaatcaagttctctgcctgctccattgtcgcgatcatagtcgcgagcatgaaaagggtcacgaccatggaagatggtggtcgtgactactgaagtaaatttgacaacttcagcatcgttcagtaaaatatgcataactttcacatacaaacaccaaatcacttgattcaagatgcgttggaaagaagaaaaagaaatctaaaacttctatgtttttactttttccgaaatatgatcagaacatagtcaaatttaggattgaagttttagctttattttcttgcagaattttctctattttatagattgttgttttccgaaatttgatcaatt

SEQ ID NO: 311208 - DNA, 1392 bp, Cannabis indica
ccaggaaatttttctttagaggccttgttcaatttgtagtctaagctgcaatttttattcttatgcaggtttaaggaataggaggcacttggttctcgatccttcatcactgaaattatcgcttcaatttcagaatggaagatacatacttagtctctcaaggtttggtttttgtgttgtattttcgaacttaccatggcaatggatttttatatatatatctatatatatgaatttgtataaacaacaagattgtattaataagcaatgatcattgtctttaatatatatgcaatcacattattaggagtagagaaacatgtgtaattcaataaacgaaagaatggtcattgctgcacattataaaccaacttggttgtgagttgaaaactctcaatttctgaatttgataaactacattcttattgtattagattctcattgtacttataattaattatagttacaataattgtctttgtgcatattttttaatttttgaaatgctcgatttagttttatctgtatgattattagaatttgggaagaactataaatacatatatctttgggttcacaaagttatattctcattctaatgttgtaggctttagctttgattactatcaactcttctcagcaagcttctgtttgaaggtaattttaacattgtgctttgttttggaattctttttatttactgtttgttttgtaagctttacttgctttcaaagctttcatcttatatataaaaatcttgtacattaaggacgagactgcagattaaataacactacatttaatacacaatacacattcattcattcaatctttgataatttgaaatgagcattacatttcttattataatttttgtataatggtagtttgctgtaaagtttggaaaagataatttttttttactagtttgatgaagtattacattttctgtaattctcattttagactttcaattgttattcaatttgttgtttgcagaaagttttggagaataatgacagtgtccattagcagggtaatattatggcaagttaccaagacgatgcttttccagagatgattgatcaatggggcggaagagaggatgtcttgccctgaagcgaccttcttaattacttttgaaattaataatatatggatgtatagatataggaagaacatgaaaggaaaagaaagaataaatgaaaaaaaaaacaaattatttttatgattctgaaaaatattgtaaatataataatttgaatttatgtttttgattcttattttattaatttttatgtatattattattttgttgaaatttatttatattattattgtaattataattatttttttttaatctacgtaatacttttaccaacagttata

SEQ ID NO: 311209 - DNA, 1043 bp, Cannabis indica
gggaggatatttctctgagaaataaaggtgttactaccaaaatcagattaatggatatgagttccttattatggaacaagagaactcaaaatgtattatttttgttcttcatttttactctattattttttttacattgaataatgcactttatatacatatactgatgtgaatgcaatgttttttatatatatatatatataaataaatatgtatatatatgtagagtttactattttgaaggatatgtcacatgtgttacaattacgaattaagtttctactactatgatttctcatctaaaaagcaattggtttcttgataagatttgcaaggtaactaaaatggcggagcttataacgacagccatgatttcattttttggagaagaagactcaagaaattaaatacagagataataaaagaagtttgtgagtgattacaatatatttttcttactctctttcttatttttgagaccaaacatatatgtatgtatcaatatttttgaaagatagacatgattttgctttagtttctctttaagattcttttttattatttttatattaaattatttttggagacactaataaatccatccaagacccaaaattatttcattgtttgtttttaaataatataaaatgagtgttaaattattgtcttggtttttggtggaagttggaattttttttgggttgagatttggaaagtaaaaaatttgtttttttcccttttctttttgttttaaataatataaaatgggtgtttaattgttgtgttgtttggtaaaatgtggattttttttggattgagatttaaaaagtaggtttttcgtggatttagattggttaaggagagttgatttcatatttatttttgctaaaagtttgatttattgtttttttttttcaaattctatttttagaagcattgaatgagataatggatttgattctctcaaagatgctggaattagaggtatttatttgtatttactttatcacgcttattcgttgttttcccttttatttttaatt

SEQ ID NO: 311210 - DNA, 676 bp, Cannabis indica
gcataaaacccaacaggtactgctaagaaagaatgttgttactggtgtagtcttattttagtcatttattttttctttaaaaattgatgattttttatttaaacttgaatggacggtctggatctgaattaactttgtactggttaagaatgaggaatgatggatgttagattttattttggcatttaataacttatttaatctacatatttggtgactacatgcatagttgtggagatattattattttcttttacttgagtggtcctcattttagttactaatattttctgtataattataggagtcattctattaattttaaatatgtattttgtaatataaattaaagggttacttgttagcattatttttctacaaaggtgaaagtgtaacttttaatttcaattatatattacatatttgtcggaacgagacatgaacatgtttcaatctccaaatgtttttattaaattttaatagtacgatctatatcttgcgtttatatccaaataatgaaatataaaatatataggtggcctttggtaaatttttttaatccattttctattttaaaattgaaaaagtgaaaatattctttaaaaatatgttctattaagctgattttacttttcaattttttaattgagaatcaaaattttaaaaacgaaaaaaa

SEQ ID NO: 311211 - DNA, 1420 bp, Cannabis indica
aagtaataaaaataggatccctcttttttattttgacgaaattaaagatccctttatatctttcaatagtaacaaaattagcgaaataattctttccaattatatctttcattatattcttccatctacaattacacaataccttaatagcaatagtaataattatcagataaaatggtattaatgaatattataattaccaaattcccttatttttcacagcaaaaaataaaaaataatattaagtaagtttctaacgtgaagtactaataatatattaaattatcttccaaaattaaatagcaaaattttaatcaattcactttatttctattttggttgtttacaaatcaaattagtcaagcgagtaatttacaatcattcttaatttctaatttatattaattggtcatcattatagtacagtaatattttagtgatatttaatatttaataataaaagtcaataagtctatataagaaaaaataataataccaacatggaagaaatttaataaccatatatacacataaaaaagaaactatatttatatacatacttatctattttatataaaatatggcgtaatagaattttaagtttcctacattaactttaacagaatattctttattaattttataatattattatatatatttaaaaataaaaattatgtagataaaaattatataaatatttatataaaataatttagtttaaatttaaaatgcttaaaatattgtagatattctatataagaaaattttaataaatattttatattagtcttctagtcatatttagtgtgtttatattatttatttttttttctttcttttcgatcaatatataaatggagtgaaacctaatgatttttataattttatggatcgatgcatttcacataatttttgaagatacatgatcttgaaatataatttatataaattattttttaatatcaaaatcaaaaatattttaagtcaaactatatttgtaaggtaagtcaaacttgatatatcatgattatatgaagtactaattattgatacgaggtatatatactaatgttgctacaatagttaaaaaaaaggctatttagaatttttgcccctgaactttgacatgtacctaatcatgcctctgaacttttaaggtcgttaaaatgccccctgaactattaaaattgttggatttaaggactttttcccaattttaataaaaaaatactaacatggatgaaagttcagaggctataatttaaaacaatgtcaaagttcgaggggtatgattgataaatatcaaagtctaggaagtatggtttagtacttaaacaatcactgaaatagtaaaattgaatgaaattagacaaaagtccttaaatccaacaatttcaatagttcagggggcattttt

SEQ ID NO: 311212 - DNA, 3528 bp, Cannabis indica
cttgatcattgctcttgggtggtgttacacgtgtgagcactctctactaatccaagaattcatggggtggtcgtattgaactcattaatgaaataaccagagttaactcaacaccaaccctacaagctttactcagtgcttgagagtaccgttaggtttgtgagctgtaattgattaattttaataaattaacaaaaaaaaaaaactttgttcaacatttttactccttatattaaatataattacattactgtgagctaagctgaaagaaaaaagaacagttaaagtaatagttgcatacttctttcttcatccaagcttagcttaagtgatcatcgctatactaatgtcatgtttaactttttagtataggagccataccttagtgatggacctcttaacttagagacaattttattgcttcccttcagtttaagaggcgattgatttacttgcacaaggtaaagtgaatctcactatgaagtgagctgttttgaggacaattgcttttattggtagtaccgctgtagatgcaccccattccaataccttggtactggtactagattcaagttatagtcatagcgtgccaacttgtatgtcccaggttcaagtgcttcagtgacgacatattgtcctttccaatttggccaaagtacccctgctgatgcgtcttttgtgtttaggaatactcatcgtaacaccatatctctaagcttaaattttctatctttaaccttggagttgtggtgttttacaactccttactgatacgcctcctttctaagctcagacctttctttaatctctttaattccatttaaagactaggctagcgattgatggttagcttgttggtcgtatgtcagtctttgatgtgatggtggtgtgagctctacgagtatcatggcttcctacccgtagtttagagcgaagggagtatgacctatagctattttgttgttgtgtgataagcccatagtatacttcgagtagttcttcaggccaattcttgttagattgctccaggcatttctttaacatatgtttaagagtttgtttgactgctttcacttgtctgtttgcttgtggataagcaactgctaaaaaaatcttgatgattccatgtttgttgaaaaaattagtaaagagatctttgttaaactatgttccattgtttgacattatcttctgtgggagtcaatagcagcaaatgatattcttgaccacgaaatcaagaactttatttgacatgatagtggctaagggctctgccccggcccatttggtgaagtaatctaccgccactactgcatatcgaactccacctttccccttaggtattgaacccatgaggtcaattccccagatagcaaatggctagggtgtttgcatattcttgagtttgtttggggaaaccctaggtattttagagaacctctggcactagtcacattttttgatatagtccattgagtttgctgtcattattggctaaaagtacccttgtctcaatatcttctttcaggctttggcccccagcatggttgtcacaaaatcctcatgtacttcgaccatgaggattttggcttcttcttttgtgacacacctcagaagtggcattggaaagtttcttttgtacattactctgtccatgatgatgaaggaagttgcttttctcatcaaactcttagcttcgttctcgtcagttggaagaataccttgttctacatactgtgcaattagggtcatctatgatggagtgttgtcaataagctccaagtctttattaatgttccctttgcctaggtatttaatgggaactacattaagagtatcagaatctattgtactagctagtttagctagtgagtttgcatttgcattttgttcacgcggtacttgttggatggagttgtgcttgagctgggttcataagtctttagctttgcttaagtatgaaatcatgtgtcacccttaggcattaacaactaattgtgaatcattgtagatctcaagtgattcagctttgattgttagtgctaatcgtagtcctactaggagtgcctcatactctgctttgctgtttgttgcagtgaactcagattacaatgcattgtgagttcaaaatccctctggagtaatcatgatgagtccaacactagaactttgctcattggaggatccatctacaaagagtttatagggatgtccagtgtcctcctgagctacagtctcaagtgtgtggacttgatcttcacaaatcatgggattgtcttcttcaaggccaatacattcgggaatgaagtctactagtgcttgccctttagttattgttcgagggtggtagggaatttcaaactgacccaattcaactacctaattgagtaggtgccctgatgcttctgacttcatcagaacttgcctaagtggttgtcaattaacacattgattatgtgagcttagaagtaaggccttaattttcagaggccaataccaagtagtagactaggttctaaatgaggggatacctcaactcagccctaatgagacgcttattgatgtagtagactgggtgttgtatcccttcttcctcatgcaccagagcatcactgactacatgctcggtgatggccacgtacatgaatagttcttcaccatctattggtttggataggatggatggcctagctagatgatgtttgagatcttagaaggcttgctcacatttattagtccattcaaaccccttgttgcttcctttaagtaaattaaagaaggaacacacttgtcggttgacttggagaggaacttgctaagtgcagcaatttgtctggttagactttgcacgtcttttatatgtgacggtgacttgatttcttgtaaggccttgatcttttctagatttgcttcaatcactcttaagttgactataaatctaagaaacttctttgattggacgccgaaggcacattttagaaggttgagcttcattcgatattcctgcaggatgtcgaagcactcttctagatctttgatgtggtcttcaaattttatcgacttaaccatcatatcattgacatagacctccatattatttttgatttggctgtggaacatatggttgactagtctttgataagtaatacatgcattcttgagtccgaagcgcattactttgtagcaatagtgtaatatccatattcttagggacgccacgtgtgtgcatttataaactagcagtttagataaattgtgatttataaaaattttaacaactaatttaaattatgaaatcatggcatagcccttttttacgattggggatctcttatttaaaatattacaagacatgccattatagtattattataaaatacatttaaaagttacgaacatttgaaatacagttcttgacaacttagcactacttgcaagataagctgatatgtacatttgccggagaaaattcctaactcatggttgtccaaatatctctacctattacctgcaccacatagcacccgt

SEQ ID NO: 311213 - DNA, 900 bp, Cannabis indica
ttgagataagttgattttaaaaatgtaggggtattttggggtactcagggttgaacaaatatcttaagattaaagatttcttagttgttaagaagtagtaaattaactattattaataataaaattttattattgttaataataatattattcatattagtttaatatatatatatatatatattatatacattatgttttcaaaaacataagttgtacgaaatcttctcttttggtgcgacgaaactctctttccttttaatctattttcttcaattttcaacttgaaacctaataattcaagcttcggtagtagcaggataataaatcattgaagatggagagcttaaggaaatgactgattttgttttaaggttaatacgattgattttatatggtggttttgtgatttagagtggttatggagattctgactttatagaatttttcttgggtagctatgggactagtttcgatgtttgcttgttgaatttgaggtaattttgagttagaaattgagtttggaactttttaaagcttaaatctgaacgttaattgcgttttacattcaagggcttgattttaatttctgttatgtaagggtttttgtatttatggtatatatgtgctttgtgaagttggaaatgatttggataggtttcggtagtacttcggtgagtgtaaaaattgaaattttcgacctatgttattgccaaaccgatccaccaattggtgcaatcagttaactagttcgtggtgaaacagttaaccgtttcccactcagtttatcatttcagggaattttggggaaattgagaatcatatttttgtcataacttttcactcgagtgtccattttagacgttctatataccattttgaagggtgtgacgagctcta

SEQ ID NO: 311214 - DNA, 869 bp, Cannabis indica
ttttgtaattttttttaaaaattattagtcaattatgtaattttttttttaattaaggtggtatttggttagaggtaataaaatagaaatgaaataacttttattctatttctttgtttagttacattttaaagtattgaaatgtcattccaccattttatttgtgttacatgtaatggaatggaatgatttttgcaccattttgttagaataactattttattttgtaatgaaaaaaagatcgttcttgtaatgccctaatagtttagacacgctactgtgatttttttaattattgtgctgacctttgctaatcaaggttagctgcatataaaatcatgtttaattaaaactttataagaattaaatactttcatagataaaattgtaaatgtaaaatgtttacaaaatttgagatcctaaaatctattttttgaatgtgaacataaaaaaaatgtcgcctaacgactaacaattttgaacccttattgtcctgaagatctgaacactccaggtctgaccatctagatatgtacaatctttaccgaactccaatactcactgttgttcagtcctagcatttacctacacatgaaagtatatatgtgagtcgacaaacttagtaagaaaaacataaaatatatgttggacatttatatagactaaaacatacatgattatgaataaagtgcggaattaataaatcatatatgcactataatttaaggatcgaaatatctccagccattgattcttgagcttcaaacccacataagctttgatctgcaagggaaactggttgatgtgggtaatcgggcttccttgctctctcaactctctttagatggattttgctgttatgaacagaa

SEQ ID NO: 311215 - DNA, 1299 bp, Cannabis indica
gttcaggggcattttcaatggccttaaaagttcaggggcatgatttggtacatgttaaagttcagggggcaaaaatcctaattagccttttatttaatttagatgagtaattaaattttatattgttatacttaaaatatctgaatatatgaaaattaagattaaattttcactttgttttggattggattgatccaatcaaatccaataaatactagatttaaaaaattagatggattcaatccgagctaacaaatacttggtctaaaaatataataaatatacatgaaatacattcaatcaataaaatcgatctaatctaaacaatcgatcaaatgactgaaattaatttgatgagattgaatacaaaattgaatatctaatatataattgaataatcgagtatgtaataaacttaaaaaagattcgacaaaaaatacccctaagtatttatcctcgttttttcttttgttcttttttcctaataatagtaattattctcgtattataatttatcacatatcaaaaaataaataaaggaaaaactcattcatacataaagatacctcgttggcagaaatatatccatcttgattcctgtcaaatactttgaaggcctctttaagctcgtccgcaaaattttcctgtgatatataatcaaatcatattattatattttgctttaggtaattttattgtaggatccttagtttgctcatggtatgagataattgttttggccaataaaattaaagtcaatcccaaaagagattacatagtatggtagtgtgtacatacacatgtgatttttttttttttttgttaaaaagaaaatttaaaaaaaaaagctacaaagagggttgctttatatatatggtgtacgtatgtatataatggatatattttttttttgttattttaatgagctttgttattttaagttttttattttatttaaaaaagaaataaatatgttaaaaaatacataaaaatgatatatattagaatgtaatgtgtcataaaaattatattatgttcataagaatgtgttaacagaacaatttatggcatttggcttaactaaaatttgtgtatgaatccgagttttatagatagtagagtagacaaacttgtacaaaaaagaaagttgtctaatatagataaaattgttcttaaaaatgtaaaagaattgtgagtttctattttgaaagagaatctcattttggatttaattgactcggtttgattaatagaaattattatttttcttgataaaaaaatatataaaaaaaaacttat

SEQ ID NO: 311216 - DNA, 2043 bp, Cannabis indica
tgcatgggacttctcctttcaccatggaagtgcaacaagctcggttgcctaagggattctgattagccaagtcatttaaatataaaggtaccactaatcccatagattatttagagaaatttaaaacgattatggaagtggaccaggtaccccagcctgcaaaatgtcgtaatcttgcggaaaccctggaagataatgctcacggttggtttagccaattgcccgaagcatctatatcaacatggtaaacctttttcgacctcttcctcatacattttaaggccacgatgacttataggccaccctatactactctggctaacattaagcaagaagtcggtgagtcactacaagattactttaaacgttttaatgctgatgtaactaaagtagagaaggcccccgagtcttttttagtttgtacgttgataaaaaatgtcttgccaggaaccgatttttggaagtagttgcaggctcgaaggccgaatcgttagtcgagttcttcgctatggctgagccgcataaaagaattgaaaattctctggccaaactagagaaaggaaaggataaacgcgagtcaccaacaccgcgatcacgatcctgcagttccagagggaaaaattccagaggaagaagcccaggaagacgcagccctcaaagacagcggagtccaaagctagccaaatcccctccgaagaaagaatcatctctaaagaggaagggaggtccgcgttttgtgaactgtacagaattagcagtcccacgagatcatacctacgcgattgagtaaaataatggagtcattagaaagcctcccccaatcatgagaaattgtgacaaaagagacccgaagaaattctgtaagtatcacaaagatattggtcatacaaccctagaaggttggtttttacaggatgagatcaaggaattgatcagacgagggaagtttggtgagtataagaagaatgaggaaggtcatccccgagcggatgaaaaggaagaaaataatgatgtgagtggtttgagaactcctcgcagtatattgacaattatttgagggcctcacatcgcaggagtctccagaaaatcgcaagaaagatatgccaaggaggcaagggagaggccacttactaatgtaaataatttgagtgagcggctagagaaattattcatgaagcagtgcgatgacataacattcatggagagcgacgctaggcgggttcaccacccacatgccgatgcactagtcattgtcgttaatattagaggagataatgtccaccgtatattagtggacaatggaagttctgtgaatctccttaactttcaagcttttaaacaaatacggttgcaggagaaggatttgtgaccagtagtttcgagtatcaacggttttactagagacactattgctttaaagggaatgatcaagcttccaatcactttagaaactgtacctactgtttccaagtggatggctgacttcgtagttattgatcagtactcagcctataatgcgatgattggtcatcctatcttaaaagagatgaagattgtgacatctatcaaccatcttaccatgaaatttcctactcctgctggagtaggatctgtgcgaggagtctagtcggactcgcgagagtgctacaacgcagcattaaaactcacagagaagaaatcagtcaacatgatatacatgttagaagcaccacctcctcgaggaaataccacatgaagaaaaaccagactttagtccaagaatccttgactataccaccactgcccaagctgcggaagatacaattgaggtacgaatcgatccttcagataataataaatttttgaaaatatgttctatattaacttttcaacagcaagaaaaacttgttacttttctcaaacaaaatcttgatatttttgcatggaaacattcggatatggtcgggatatcaccgcaggtcatgtgtcatcgattgaacattgaccccgaagtgtgaggtgtctgacaaaagtgccacaaaatggaccccgcacggtaccaac

SEQ ID NO: 311217 - DNA, 635 bp, Cannabis indica
aaaattaattaaaaaaaatgtatatttataatttttttttcatttggttcctaataagagtgtaccgtagacgcgagcctagtttgccttaacttagaaccagccctgagagtaactaattagttacagaaaatacaccaaaaataacaaactaacaactctcagtctaacagaactaactagactaaattaaatagaaagaatatatattatcatccaccaataaagttatcaaagtagaattagagttattggtttttttttactttataagtgatatgatggtaatcgggtttaccacaaaaactttttatgcgatagcagtaaccatttataatacagaagaaaaagagtacaacaaaaaataataaaaatgttaaaaaaaaaaatcttggcactaatataagtttttttgtctacttattaaaactaagattaaatgtgttataattttgttaatttccttatcaaaattgcattttagtagttagagatcatgtttggtattgttttctgttttttgttttcaaaaaattgtttttaaaaatgagaacaaaaaatagtttttgaagtttttaaaaacaagtcatgtttggttagtgttttctaaaaacaatattgaccaaaagtgaatt

SEQ ID NO: 311218 - DNA, 874 bp, Cannabis indica
ttaggtttaacattgtaggtttttcctggcttataaatcaaactttggagcaataaaatctttgaacgtcacaaattttttggtagtgtacttcaaactcgtggcattattgataatcgcttacctattgataataattttttgaacatttgtttcttcattgtcatattacctaccacttttgtcgagcctccccttaatcagggcttaattcctatcaataattttgggactcacataggtgaaattcttatgaggtggtaaatattaataaagttttcctgtatgcatctattattatggacactattgttgtggatattggtcggtccctaccactattggactagatgaagattaattttgatgtggcatgacaatagttgcggtggagataactcgatgacaatagttgttgtagcgaaaaacaaactaggagcaattttgtgggctggaacgagaatgttgccttttgtgggggaagccgcaacttgtcagtttgccttggaagtggttgttgctaagatgctattctttattatcattgagagtagttctaagaaagtgattcaagttctcaaggatgacactctcctaagtgagaaattaataattatattttcaagtgtaaaaatttagctaattctatgcttgtttgtaatttttgtaagaattttcggaaactttaattatattgctcatagtatagctaagtggatgttagctataactcaggttcaattgagccatgctcaatatcagaaaaattgttcaatgaccttcagtcttatatttttgattaagagcagcgagcactacctataagtggtgtaatataaatagttagtgatattcataataattattaaattaa

SEQ ID NO: 311219 - DNA, 1020 bp, Cannabis indica
tgatgaaaagtgctacacatttctacacttttcttctctagaaaattctagtattaactacacaaaactaagaaaattagagaaaactagaattacctagaaactatatttgtaagctaagaaacttagaaaattctagaatattttagaaagttaaattgtaaatcaaaataagaaaaatctagaaagttgtagtatcatccttagctccctataaataccaagcttgggttgaggagctagtgtaacaaaacaaccaacaccaaaaaaccaaagttccaaactatcaataaaactttactactttctcaaacaaccctctcttctaagccaaactcatttcttatactaaatcaacaaactcatcaacatcactacttcactacattaccacaacaaaccattaaccacatatccacctattccaaatctaaactaatacaaatttattatcaaaccatcatatttataaggctgaggggatgtgtggaccgactcgatcgatcgctccctattggaacacgagtttgcttattgaataaataaacaaggatttaattgtgtggaaggacggtttaattttttttctttctctctttaattactttttttttcaaaaaaaataaaataataaataataaaaaaataatgttggattattttattaatatttgacttttaatcttccactgccttctctctttactgcgtttgtactatgtagtatgtacgctgccgactacgatatacagtatactttgctcatacgtactcaaatccttggggatatatttctaatccaacattgctagttgttacgtgcagtctatgatggcacgttacaagctaagtgatgcccacaagttggccaagtggtggcgcatgttgtggtgcatgcaggtggcatgctgatgcgtagtttgtatgcagtggcattttcgtaaatatcttcaatattgtccggaatgggacgggacttggtattcaccatttatttgggtctacaaatagaatggtgca

SEQ ID NO: 311220 - DNA, 678 bp, Cannabis indica
taatttttattttagttgaaactgaaaaaaaaaccctcttaattcggtttgggcgggtgaacccgaccaaaccgtccaaaccgtcggtcgggttaagattttttctttaaattgggcaggttgcatgtagaattttacaacccgatcttttcgttgggttagaaaatatatagtataaaccgactaaatcaaccaatgtacaaccctagttataagttgagtttaattgaatatagaaaactgattgtatttccacattaaaatattatgctaataatattaaataaaatttgtaaaaataaaacagggcacaattgtaattatataagactctaatatttaattattagtattttaaatagaatagtttgtatttctacacttgtgttttgtatcaaacacaaatgtgttctattaattaacatgtgacaatgttctcccaaaaaaaagtaatatgtgacaataaaagaaattagctacttaaataaaatcactaaatattattaataaaaataaaataaaataaaatcactaaattatttattaataattcttctatttaaccaaattaatatatataaataatacaattacacagcacattaactcaatgtttagaaattaaattttagtaaaaaaatttaacttttttaagtatatacaaaaaaaaaaaaacaa

SEQ ID NO: 311221 - DNA, 982 bp, Cannabis indica
aaatatcacaaatcattgctaaacattgcaaatatacgctaaatttcatccctaatcttaaatttagttctatcattgcaaatacatcgcaaaataattgcaaaaaactaggtaaaccagaaggcagatatgcaaaaaacgaagagaggtcgtgagagaagatgatgtcgaggccttgcgatttgggttttgggtctgtgtgttcgtcggtagggattctaggttggcgttaacgccagagagagagagtaagttttttttaaaatgtaagggtattttgagaggaaaaaatattaaaagtatatatatactatttctaatttggtgatatattaaaacaatatattttacatttaagcatactaaatcaaatttcccttatcagtttcttcacattaggtgtttgttccttcacattagtatgaaagaggtcacgataaatttgtgacaactagccaatttttttatatgcaaggtccattgcaaaatttaaataaataaaaaaaggtgatgacattcatgtttgtctaggtcctgtataggggtgtgcagaaagtcatccaatccaattctaaccgaccgatccaattccaaccgatccaatagaatcggatatccaatcataattggatcggatcggatgcaaattttaaaaatccaattggatcggatcggatattggatgagacatccgatccaatggataaccgatccaatccaatccaatatcatccaatgtccatccaatcatatttaatatttataattttatatatttaattattttatttaatattttgtatattattttattatttattaggttttaaattatgttttttcatatatattttttcttaatgaaattagcctaaatagtggttaaaatggattggattcatccataggattcattggatggatccaatccaatctaataaaaaaccagttaaagcatccaatggatggaaccgatccaatc

SEQ ID NO: 311222 - DNA, 629 bp, Cannabis indica
gacgacactataatcatgaacaaatacatatgttctggacttagtataatttatgcattaaacataatcatgaaataaatcatgtgaaccatgcaacataaaatgtaatttttgatctttattaattagtaaatctgattatattgaaatgagttttatttagggcacaaaacctaacacactatgtcttgtggcgcctcccttcgcttaattaagacaagggatgttccttttgtcctaacaacttttttctcgacaacttttatctttttctctatttaattaatttgaaaaaaaaataaattatttattacaaaaataaataattactatttgctaattaaaaatagatttttttaaactttcatatacaacatttatcccacccttgactgtgttttatggtggcaattcgagaaacattgacctataattctaacctccaataaattggatttatttattgaatctcatcaatccatataatcactaaaggaacatgatactctcactcatccaactaatgtcaacctgactattcaaccaaacctagatgagagctccttctatagagatttcacctccttcattgttcttcaccatatttgaaagccttgagtgaatgagtg

SEQ ID NO: 311223 - DNA, 1886 bp, Cannabis indica
tgaatttcatgcatatttgtggtgataaatgtgtgataattataaggtattttatgtgaataatatgtaaattcaaagattgcatattatataacataatttattgtcaatgtttgatcgctacaacaagaatactgcttacagttactattattgtccaaagacttaatattgatgatgtgcttggtatcttaagatggaattaactattatttggatttattgttttattttgttttatatatgagcatgttaatttatgtaatgatatttgttctttttccagttgttactagtgtatttgctaaccttaattcggtaccggtccttaatggtaataactttcaggactggaaggagaatatttcattgttcttggctgcatggatcttgaccttctattaaggatggatcgtcctgctcctcttacagataccagtaactccgagcaaaagaggatttatgagaagtgggactgatcaaaccgcatgaatcttatgatcatgaagcgcatcatacatgaggcttttaggggtgcagtgtccgcggaggtcaacgatgccacaactttccttgctgaaatttagaaacgctttgcaaaaagcgataaggcacaaacaagtactcttttgaagaaatttatttccatgaagattgagggaaggaaaacataagagtgtacattatgaaaatgtttcaccttgcttcaaagttgaaggcactaaagcttgagctttcgaatgacttgcttgtgcatttagtgcttatctctcttcctccacaatttagctaaatcaaggtcaattacgactgccaaaatgagaaatggattattaatgagctcatttcattttgtgctcaagaggaagaaagactgaagcaagagaagactgaaagtgctcatctggaaaccacctctaaggataaggtcaagaaaaggaagaatgaggctgctaaggataaaagtcctgcacataagaaacaaactcaagtcaacaatgataatggttcattcttttgaaacatgaaaggacacatgaagaaggaatgtgctgagtacattacatggcgagcaaagaaaggtacatttcttacgttggtctgttctgaggtaaatttatctttgaaactaagaaacacttggtggttagattctagtgctactactaacatcggtgtttcaatgcaggattgcctgattaacagaaagctaagtgatgttgaaagaagcatttatgtgggagacagcaagtcagtgaatgtggaagcaatagggaattttaggttgttgttaagtattggttactattttgacttaatagatacttttgttgtaccgtcatttagacagaatttagttttcgttttttgtttggacaaattgggttattattgttcaattggaaacaactgttttagtttatctattaattcaactattgttggaactagttctcttatggtttataacaacttatattttcttgatgttgttgcttcttataatgaaaccttgaatgtggaatcacgtggtactaagcgtaaaatagataatgaaaaatcaagttccttatggcgcaaacagttaggtcacatctctataaaaagagttgagtgagttgtgtctcatggaattttagattcaattgattttttatacttggatgtttgcattgaatgcatcaaaggaaaacagaccaaaataaagaaatttggtgtaaaaagagctatagatgtcttagagttgatacatacggatatttgtgggccatttcctacaccttcttagaatggtcaacaatattttgtatcattcatagatgattactcaagatatgatacctatttctacttcatgaaaagtctcaagtcttggacgtgttcaa

SEQ ID NO: 311224 - DNA, 882 bp, Cannabis indica
gtggactgtcacagaggagtgagctttttatgtttgaaattttgattgtagttgtgtacaatattaatagcagtaaaagcattgaattgcatagacgcttgcaaattggtcttatcaagaaggcttaatgcccctccccttgtatatcttgttgtgaccccggagggcgccacgcacaaaaacttgatatgagaacgtagagcagtgaggaaatagaatgcaattatagatgaattgtttatatattttgccgactgatattttactctgtttgcgggaagaaaagtgaaaaatggttatgaataccattaaccaataatttcaaagtggtgggtgcaagtgtagctaagtcgcttctttcaaagaggtcaataattttttttacctaactagtttttttgggtaaaatttttaattagttgtgcatgtcatttgttaaaaactcccttgtggtatgtctttgactagtttctgtgccttaatttatcatttagttgctttatgtgtcttatgtttctattcatttcttagttagttgtataaccgattttttgcatttaattgttagttttgttaggttccaagttttagtatttgaaatgattatttcacataactggttttcgtgttactttttcatttgttgtgttttatgtaactattttttatgtgtcaaatttttcactagctgataatcataactggtttctcaatatcagatttctttgtattaattttaattcgttcacattaggtaactggtttttatgttttgctataatggggtttctccattctttgtagtgttttatctattttttattttaattttgtcttattatttttttatatggtcgaaaatggttttacaggttttgttat

SEQ ID NO: 311225 - DNA, 1560 bp, Cannabis indica
ttagggcataaaacccagcactaggttcaagttcaggttcgggtttggatcttgagtttttgtctgagtctaggtcctagtacgggttcaggtttatgtttgggttcgggccccaatttgagtccaggtccttgttcgggtccggatcggggtcccgatctgtgtcccactcaaggtctaggtctcagaccagattctcatctgtgtttgggtctaagttcaggtcctgagtctgggtctaggttggggtcttgatatgggtctgggtctggatcctgggttccgatctcgataagggtatgggtctgagcccgtgtctaggtcatattttaggatttagggtcttgggtttagtgtttggggatttagggtttagagtttagggcttagggtttagggtttagggctaagggcttacggtttaggggtaactataaagagtttaggatttattgtttaaggtttagggtttaaggtttaagggtctgcttctaattctggttccaattttgggtcacagggtatgatttagggtagaggtgtgggtcaaggtccaagtcctggtctaggactaggtctgtgttagggttcaagtcagagtctttgtcccaaatccaaacaccaaccacatgtcgagtctagattgagttctagtatgggttcgggttcatgtccaggtctcggtccaggtcaaggtctaattccctgatttagacactgactatgggtcgggtccaagcctcgggtcttgggtcctgggtgtcgggtccaaatccaaatcctggtctagttctagttcatgtcttaggtcttggttcgggtctcagggtttgggtctacatttgggtcttgggtcctgagtcatgggtccggtccccgattcaagttagggtcctatgtccagatctgggttaaggttgaagtccgagtgcaggtcccggttcgtgttgggtacttgtccttgtctcatgtcttggcctagtctagtcttgatctcactccatgcccgagtcttcagtttgagtctgagttttggtatgagtccgagtttggatctgggtctgggtcttagttcgggtataggtctgggtctgggtgtaggtccgggttctagtatgggtctgggttcttgtctaggtcatgggtcacgggtcttgggtttcgggttctgggtcgtaggtcctcgcacaagtctaggtccaggtatcgatctcggtcagggtccaagtccgtgttcagttctgcgtctagatccggttttgggtccaatccaattcctattcgagggtcctgatttcggtccttatttcgattttaggtctcgggtctgagtctaggtttgggtcctggtctggaaattgttctaggttcgggtcttggtacgattccaagatctagacactaactacgggttcaggccaggatccagatcccaattttgcactactacaaaattgagctttagaggcaatttttaagggctttcagcgtcggtacttgcaaaattcactaccaacgctgttccgggtgatgctaaagggttaaaaataaccaacgcca

SEQ ID NO: 311226 - DNA, 1403 bp, Cannabis indica
ggaattactacgaaaaacaccacgtagagatacacttccatctttggtaaggacaggaacagaatgcgaacgatgaataggtattcgtgtccctctttacagtacagagaaaatatgaaagactaagcataatctacagaatttaaaatccaaatacatagaaaatatgcaaaccatagaactatacataaaataacacaactgcagcataatgtcccaaattgacttttaaattgatttaatttattattgtagtaattaaataatcaatcccaagctaaaaacaggaagttaatactcacaaccagatatagcaactcagtcatgtttcctccatgcatagactccggattcgaatgagcaataggtgttactggcaatgatgaagtatttttcgatctgggagtgaaaagctttgtcaaggacaaagttcttgagaatgttctcttctcttgtctctcttctggtgagctttccagagctagaagaacagctttttgaatctcagagctagagtttcgattcttaaaacttagttttggaagaaggtttttcatatttgatttagttttagatgaagaggggcctggggacctagtatgtctgccaaaactaggactaggtaatggggaaaagttcactcttctgggaggtggacttggagtttgtgtgttcatgtttattcttacaaactcttctctagcatcctcaatatccctagatggtatctgtaaaacaagatgttgacctgaattgtctaaacttgactgagtttcttcacttatttcaggtgaatttccaatctgttacaagagaaaaccaaaacagaagtattcaaattcaacacctaaaatcatgggagaacaatcacttcaggcaatctaatctaacttggaccaatgaatttaccgaacgagaattaattctcaaatgcccaccaaacaatatcaaataaaataaataccctattgaagaaatgtcaaaagaaacactacagaagagttaggagttatagcaatctcttctgacttggtgaaatgaattcactgaacaagaaaaaaaaaattcaaatagccaccaaacaatatcaaatcaaaatcatacccaattcaaaaaaattggtaagaacagccaagaaatgccaaaagaagcactaaagaagagttgagagttatagttaagaagtgaaccaaaaaaaagtacctttgggagtggagaatcggctgtgatggtaaaaatgcattctttattttctttaacagctagttctctttcagtagccatggaaattgtgacaaacccagaattgcatatactgtaaagaaaaaagaatttggagaaagaaaacaaaacccacagttgagggagcagaaaaattgaaaatgagggagtatgggttatta

SEQ ID NO: 311227 - DNA, 1537 bp, Cannabis indica
aaaaatttaacagcaaataaaataggaaaattttgtaattcctctaaaaaaatagttgtattgatacacttttattatattttcagcattcagatagttataattctattattgtttttataatagtattcattatatattcataacatcttgcaaaattttgagatatttaaaatgatttatagtagcaaaatcaaacaatttgttggatgtgtatggtgtatgatgtgtgaaataaattgtttaaacttcttcgttttttttttttatgtaaattatttaaaaaaatttcaaaaaaaaaaattgcaataaaaacttagaattataactatttagacacaaaagaaaagaatgcatttacacaccccttttcgaggttgcactcaactaataaaatatttttattagagtgcctttaaccatactaaacacactaaaaaaatgagctctaacatagaatagctctctcaaatagatggatagagagcccccatttttttccaaaacatttttaatactatttataaaaaaggaatattactttttttgttttatcatttcattaaatcaatctatatttaataaatttaaatttttaaaatattattaaactaatcaattctaactaaagtaaggagcctgagattaaaaaaagtcaattatcaaaaaacaagtgaattttcacattttatggtttttatacaatttgtgtaaaaatatggatttttttttaaaaaataaattattttcgaaaaattcaaaaaaaaaaaaagaaaagatactagttaccctctgattaccttaagggtaattgattatcctaacctattttctctaaatttttaacttttttctttaatttttcccactgaataattgttcgaaaaaaaaaccctaaaataaaaattcccttaaaaatctgttttaacattttgactaaaaaaatatcttggagataatcttagagatatttttggcaaagcgtggccaattattacgtttgcagttacttaagttattttcctagctacacattttaatttgtttatagcactatagtataatacttaattttttttgtttagttgtctaagtacataaattattacatatgtagcatttaagtacccatgctattattttatttattttttttaaacaaaaataccaagtgtataagtagattttaaaccatatagacagacttaaatactagaaaaaaaaaaccttaggcagttaagtgttacaaatctaataatttaggttgtattctataaaaccttttaaattatataaaaattgaaatacattttttatttttataaaagaataattagtatttttcctttacgaacttatggcactaccaaataccccctaaaatatacaaaccgtttaattcttaataaatttggttttatttatttttggatgtttaaaaactgtcctgttttgtcccttgaaatttgactactacaaaattgtatccttttaaaaaaaatattttaaaaattattttacatattaatatatatat

SEQ ID NO: 311228 - DNA, 930 bp, Cannabis indica
taataatttattattattaattactatatgtgtgctacgtacacaagttgtaataatcaccatgcatattggattggtaaacagagaacggttcaattatattatatatattgaaacatatatacgtatatgtatttttatatattaaaatatgtatatgttaggttgcacttgtgcacaagtggtacagtagtgacagccacagatgagggtttcaataaaaatttgtaaagattatatatttgtatatataatacgaaatgattgactgtgtatatataccacttgctatagtattaattcaatatatattttttgtaaataatatatatttattgactttattaaaaaactagggttttgactatgtgccagtctagctataagttggcccaagtggtagttagcagaaaatgagagaccatcaatccttataaattagtaaatattatatagtaagggtgtcattttgttcatataggtaggggtgttatctatattttagtatttagagaaattaacctatttttttttaatttgacattttagattaattatagttataacaggtattatttcgtctatttcaaaaaaattataataatttacgatattgaaaataaaatttaaaataaataattacatgtccataaaaaaactaagcacaagtataatttaatatttatctctatttttggcgctgtaatttattctcatttttttaaatagctacgtgaaatatgtgctatgtatagttaatctacaaaatctcataaaaaaaattgatttataatttctataaaggggtgtgccttctataaaacatatgaaaaatcgtgtttttgcaaatgtcagttgtatataagaaaatataaaaactgtaatcgtttgcagcagcagaaagtaattctgctacaacaaaacagaaca

SEQ ID NO: 311229 - DNA, 1343 bp, Cannabis indica
gtaaccataattttcgtaacacctaaaacatatcatttgtaattttggtgagagacacgctaaaacacttctcggggcttaaaatcaaactagaaataaccttatcgatgaaagataagaccatactctaaatatcaacaatttggggaaaactagggtttctgaaaaaaccccgaccaaaaaaccgatttcccaaccacttaactagtttactgggtttcctgaggacaaaacgggtttaccgatttctcaggttcccagaaaaccggttaatcgattttgtgcagggaaacccaaaattgacccccacaccacaattcaacctaaaactttctaaaaacttccagtatacctgtttataccccaaccaacttatttcaagcatcaaactacaacaaacaactcaaattatgaaaacaccattaaagcttcaacttgagctcataagctccaatttgattcaaataacatgataatcatccaatttagcttaaaacaatctaaataatcactacacaacttcagaaaatgacatcaagctaaacccatgcacacaacccctatttcctagccaaacatgcatcaaccctaacttgagctaaagggaaaaaccaagaaagcaaagtgaagtgttataccttagattcaagcttccaatcctcctaaaactcactaaattgagctgacaaaaacccaatccccagctggcctcttggtggttcgaaagaaaagagagaaagagagagcttgatggtgaaagaaatagagttttctaggctttttctatatttctctctaatattaaaacttattttaattactaaaaatcaaccctcatattcagcatataacttcaataaagaacaaaagaaaaggggttccaacaaaagacccttttacccataaacaatttaattatttaaagctttccaaggacaatttagtcatttaccacttcaaacaaatccctactaacttaaacgcctatacatggtaccccactattaacattctaaatcatatacgtgactctctaatggcccaacgtcgctttccactgctaccaaacacaatcacaggtaaatgagaaattcccatatagcacatttaacatatattgtaattaaataaatcttcacccatgcaatattataattaataatcaattttataattaaaccttaattatttgataacccatcatatcaaattaggcggtcattacacaatctccattccattcctttatttggctgcatatgaaaggttggaatgtcattccaatagaatggcctttccactattttggtggaataacaatttcattttgaagtagaaggaaa

SEQ ID NO: 311230 - DNA, 1242 bp, Cannabis indica
tttgtgtttttttaaaattatccctaaaaaaatcatatcaaaaaactcaattaatttttttagtcagcccccaaatggcctgagacgtgcctagttgtctagaacaatgatgattattgtacgttgtttgattctcttgccttgccatcaagagggacctagatacttatcatcgtgcttctggccaagtgctaaatttggacaaatcagtgttatctttctcaccaaacacaatttgagtcgctcaaattttctttcatcggcatctctccatgcctatttgtgaatgccatgaaaaatatcttaggtcgcaatcttattctagaagagataaaaaggaattgtttaacaacattaaagagaaaatttagttgttgagggtaaaaatgtgacgagaccgccaacagccgtgagtaaccttttcccttcgactgtggagacaataaacggtggtttgggtggtgagtgagtgagtgaggattttgggattgagcttgagtttagggtgtattctctgtagagttcatgatcccctctcaagttgcctacgtacccttatataacggatcaaatgccatcgtagttcagtaggagggtagaatagtcattccattccattattcaaatgtattcacctatcattatgggttgtacactcactttcccgtggataccgatctatgacctaggatagtggaaatagttgtaaccgcctgagagtagtgtagtccatgaatcgtgggcataaccgttatgaggctagacttgcttttaatgggttgtgtagcctactttcgtggattgaccacgtaatttaaataagccctcatgtatttggacttaccactcctttctcagtacgtctaaagaattgttatgtgttgtgcaacccataatcaagtgggcttatatggttggttgtacataccatatacattgcaatttaactaaggcctactctataatttgggcccttgggttttcttgtgcagcccatgaagggagtgacttgtacaaacaacctagtgggcattagctatgggcttattcaattgagccaagatctaattataaattttacccttacacttatgcacacttggaatgagaaatttttttcaacagggggtcgtgaagtccttctcaaagcagtggtccaatcaattcctacatatgccatgagttattttcgtctactagattatttttgtaaacaacataagtcaatgatgactaactttt

SEQ ID NO: 311231 - DNA, 1593 bp, Cannabis indica
atgttgatggctctatatttgaattggaaaatcgttttggctttggctttcttgctcgagactcggaaggaagactaattgaaaggcatctccaaaagttgtccaggccgagtgtcacctgaaattgctgagacctttggcattaaggtggcgctcagttggatcaagttcaacggatggcaagaggttaccttggagactgactgtctggttgctgttcaggcgattagcagtggtattcatatgccttcatactttggccaactggttgaagattgcagaaactttttaagtgatttgaattttgttaatgttaagtttgtaaaacgttctgctaacaaggcggcacatttccttgcgcgtagtgcttgttccttgacagatcgtgttttttatttgaacaactgcccttcggagttgttaagtattgtattggctgattccttaagttaataaagttgccaatcttccattcaaaaaataataataataataataataaataataatttattttaaaaaaaacaactcataaaaatagcaacataactctcattatttgagttaatacgataataatacttttaaaacaataataataaaagttaaatactttaaaagaatattaaaagtaaataactgctcaaaaaactgattgcagtttatttaaaagtaataaaaataattaaaaagaattaagaaccaatgtcactaaccacctctttaacaaataaaaataaaattaaataataatgaaaaagtagtatataactgtcaccaaatttactgaaggcgtcaataagcggccatccgactgaccccgcactacctcctcctccgaccagtccaccccacgccgtcgttgctcaactgggtcgtacaggcgagaagaagaaagagacaagttttcgtacaatagttgcgacttcgctggatcaacaaacaagagatgtcgaagaccacaaatctttagttcgtctattaatatttttattgtgtaattttttaaaatcatttatatatgcttagtttactactattggatttaacttaatttttttaatacattcataattagtatcattgatattttttttattaaaagagaaatttaattaatcaaaacagaaaaaagctacacaaaccagaattacagtacaacaaaagaccgacttacttacatattacaaacaaaattaaaaatttactgatctcttttagatattttcctcctatcaataagaaataatctcgctttaagcgctactttaatcaaattgttcacataaaaaatcttaaacattttttgctcagaaatgcaagtatttcgattccactagatgaagtaaactgttgtcgcacaagtagccgcaacaatcttgttaagcaggctacgatcacgtttagtattgttgtgataatttcaacacgcaaatgtacgtatcgtgacaagtagtaaactcactaagagtgaagtcgatcccacgaaaattgtagctaaatatgttaaaattaaactttgggtgattctacaatgcacccccttaaaagggatgtactgatacaccttaacttgtttcggcctcgagaaaa

SEQ ID NO: 311232 - DNA, 2257 bp, Cannabis indica
aatctctaaactttaagttatttagttatttgttaacattaattcactactatataatagtggttgttttgtttgcttttacttatttattttatacttttcaatttatttaatgttaaattcaaatattttatgtttgtattttaattttaatatttttttttaaaataaaatgtatttcttttcgaataatattcatacatatatacgttaatttttatgtatattttttaaaataaaaaaaaaaaacataaatattagcagagtcacataatgtctaaagggacacccctttcattcttttaataaaaaattatttaattatgttagcccatataatataaattctccaaactaattttatttaatttataaaaattatttatattttatattttatttatttatctgtagctttatagtgctaatagtttctatatatcttatttattaattatttaaaatttacaactccagctgacaaaaaaaacatatagatttgttactgagtataagttaaaataaatactaaaactataattctaaggtagttcaataagaaaaagttgataaaaaatcttttagctgtatgcatttttttctatttatttttcttatgttgacatattttacaaaataggtatgaatgaaaatatttttatatttgacgatatatattgagtaaatattattgtggactcaatattttgcaagtatgtcagctagccaagtggctataccaatcaaaaaaatgcattaaggagaacctagagaagaagccaatcacaaaaaacatcatggctcttgcaagaaaaggaaagacaactcagttttgggtagacgatgacctcctgtgaaccaagagtggacgtttgtttgttctgaaggtaggcaatctaaggaggacgctgctgagtgagtgtcatgacacgttgtaggcgggtcatcaagggtggaataggacacatgcccttttaaagcatgggtactattggccacaaatgcaggaggatgtggtgggctacacaaggacctgtcttgtttgccagcaagacaaagtggagaggcacaagacaccaaggttgttagagcctttgttggtcccaagcaggccatgggagagtatctcgcttgatttcattactagtctgtcgaagacaagagacttgaatgcgatcttggtgatcgtggacagatttttaaagtatgcaacctttatcccagtgtcgaagcagtattcgacataagagacaactaacagaagagacaactcaacttttctttaaacatatagtaaggtattggggagtatccaagaatatagtgagtgaccaagatcgaatattcactgggaccttttagtccgaactattcaagcttcttgggtcacaatgaacatctccttgagctaccatccacagatagatgggcagacagaaagatttaacgggatgttggaggagtatttacgacactttgtcaatgccaactagaagaattggccgcaagtactagatgtagctcaatttttttatttcaactcttaaaagagttcttcattgaacaagatcccttttgaggttgtgaatgggcagtaaccactgttgctccaatcgattgatgagtaccatggatgaaatccgcgagccttcaattttacaaaagtctggaagaagaatacagagatttcccaagcatacttagaaaaagtctcgtgaggaatgaataattgggtagatcaaaaacactgatcgttggagttcaaagaacgtgacttagtgttgatcaaactacagtcaaaacaattaagattctaaggggacaaggatattagactcgtgtgcaaattagagggccctgttccagtcatctccaaagttggcctagcctcctacaaagttgaactaccttcttggatgaagatacacccggtccttcacgtcagcagcctcaagccgtatcgtgaagatctagaagatccagtgcacaactagtctaccagggatgacaccagcattcaatgacgcagtagtaaagaactagaagaaatcattgctaaaagaactgttcgtgtgaagagaaagaagagaaaagagtacttggtcaaatggaagggcctcactgatgactagattagttgggagaaggtggaagacttacagtagtttttggagaagacttaagaccatacagcaagttcgtcgaggacgccgaacaattacgtgggggagaatgtggcgtgctgccccatggcaca

SEQ ID NO: 311233 - DNA, 784 bp, Cannabis indica
aaatgtcgttagataggcacttttaatatataaagatattagcacgtaatcttcgtgaaagggcgtatcatggccggggataaattcttaattatttatatatatattatctctttttgataaacgagatcaacaaaatgttcctcattcttatcttataaactttgattccatccgcagatgtcttccggtataaatccatattccatgtattgaacaggactatatattaaactattattaattgagatttgagaaatgaattaaattatattaactatacatttaagtttttatttagaattggtgcaaatttcttattaataaatcaaactctctctctctctccattatgctaatccaaactaaatccataataaaattttaatatttaaataaatactactttaatgtgattaaatttatattaaaaaattaatgataataatagttattttttttttatattggaggagaagatttaaatacatctataaccaaaattataacattgttattattattaaaaattatgtattttttatttaagagatatttagttccatatattgttgaaattttgcatacagagaaaccaaccaaaacaaggaattaatatgagagcaatgttagacttttatttgggcttacattaaattttattggttttattaaaacttgggttgattggatagttctttgctgtgttagcccatgttgttggtgatcaattgttaatgggcttagcatctgtgagtaaagtctaggtgaagcagaagtgtgg

SEQ ID NO: 311234 - DNA, 1260 bp, Cannabis indica
attatgttgtgatgctcatttacgcgtataaaatattatttttaaatataataaatgggattagtctccaaattggacaacgtttgtcttccttgctcacttcatttcacattataataatcttaaaaaaattgtaagtactatgaatgtgcacgaagagcagaaaattagtgaggagtgctcttcattcctatttccgttaaggattttaatctttatctctgcttattttttatcaaggataagacgaaaaatcccctaatagaaacggggacgggacgaaaaactctctaataaaaatttaaatatataaaaatattaaattacataaaaattaaaatataatacaataattattatttaataaactaattattaccaaaccacaacttcaaaagtcataaaaatatactaatatactataaaaatgaaacataaattagaaattataaaatattactagaaatataaaataaaatactaaacgggtccccgtcggagcgagaaatgtgatccctatccctgtcccgtttaacattcgatgataaaaaataatctccgttcccgccctgtttctcatttagacgggaaattgctgccccattaggagcagatccctactaggcccatcctatgagagaaatgtacatccctaataaatactatacttctcattatataatatttttatgtgaatttttttttttgttaatttatctaaaaacaataattcataaatgtgtaagaaaggaaatttaggaataaaaggagttaatatgccaaataaatattagtataataatcaaatgtgaagttttatttttatttttttccttaaaataataatttatttaacatttgagctaatttgcaaaaatatcatattgttatttcattttcaacacattggcacgcgtttcagaccatgttgtgaaatcaatttcattgtaagaaaaataagtgctttgaattttaatgttaattattgaaatagttattattattttttatttggtgtcattttctatttcaagcacacgcttatgtttttgacactttcttcctcctttgaacactaaattacatttttgtccctttactttctttacaatatgtttgttactctatagttggagaataaaagtgatagtaaaatttggagattattcttcaatagagtatttttaaatagaggttctactattttaaatgcaaccaaacaaaagaatagaataaaaattattttatttccattccatt

SEQ ID NO: 311235 - DNA, 1693 bp, Cannabis indica
ataactttttgattaaaaaacctgtctgacaagaaaggaaattcaaaagttatatatgagatataactcataattcacatgtgaagctgaatactaacgactcatattgtataggaaagtattaaacgagacatcaaagtgtcttgaaaaaagtacttaagcctagtgtatgaatagacgatctaattattcatataagcaatcaaaaatatacaaagtgataaatcattaaaattatattcaagtttgcttgaaatagattataactattattgtgaggcaaaattgataactgctcgcaaattaaaagcatggaagataataaactgctcgcgcatatagtagactactaactacttacatattattagagaaaaatatgagcaatggaaatgcctaaagtattttgcattttatcaaaatataattatttaaattgagaataaaacgcaagtaaacaaatatatattaaaatttaagcataaacgtacgaagcattaaataaagataaaagccaagttggccatccaacctggaatatttgtcaaaaaaaaaaaaaaaaaagaagtgccacaaggggcaaaccattgtcttggccctagggccattttcctaaacataatgaaaatagataaaaaccaagcctacatagtaggagacttggacggattttcttcttatgctgcctcagcctcttcctcctccttcttggtattctcccagtaagcaagaatttccccttcagactcttccaagaaacttgtatccatgtttggatttgccatccaagctctataacgggtacggaggccaatgttattgcatcttgtgtcaccttggcagcattaagttcctctttaagcttcttacattccttggtcttgtcccttgcctccttttcggcagcttcaagcttggcctcgaggttctttttaaccttctcagcatccttggtgaggcgggtgttatccaacttgggatcgtgccattgtttggacacaacctcgtgcaaacctatcaatttttgatcctcgccttccaggtacttcagcttgtccatgccacggtgttgggcgacaaatgcgaggaaagtttgctaaaggacaaatagtgaatgtgttagaaaatttgaaaataattaaaaggaaaaataagacgagaaaggaaacagagtttaccaagaggccatgagcaacactcttctcgagcatgttctgcaaatgcccattacagatcagatcccattcatggggaaggaaggatttgaagtgacgctattaggaaacaccaaatttcgtagtgaattttgagctaggactgttggcatcgataggaagagtctcgagggcttggctcgaagaggcaaaagctgggttcacatttggagcaggctcgttggtacttgcagagaccgggggaggaattggattctgagtttcaatctcaaggacctcaaggttagctgtaatgccctaacaattaggcacgttacccaagctaattaagaaaccctaatcccctaatctgggattactagagaaataaacgtgagaaatttaaactttaatctaaacagaatgaaaattaaacttgtaataatttcaagctttaaaatcaaaagttacatatttcgggatcccaaaatcttttacaaaatattacaagtcttttcactagccgacctaagcggcaa

SEQ ID NO: 311236 - DNA, 1402 bp, Cannabis indica
gggcgtaaaatcccaacaaaaactacttcgttagggaagatttctacccagtttgggtatccaaccttgttctggtgcctaagccaaatcaaaagtggaggacttgcgttgacttcaccgacctcaataaagcatgccgtaaagattgtttcacactaccaagaattaatcaactggtggacgcgacagccgaccatgaacttctcagattcatggatgcctattccatctataacaagatcaacatgaatgcactagataaggagcatgctatattttgaactaacatcgacttttattgctacaaagtaaagccttttagactcaagaatacaggtgcaacttatcaaagagtagtcaacagtaagttccacaaccaaattagaaacaatatgtaagtctatattgatgatatactggttaagtcaaaaagatctaaagaccacatcaaagatctagaggagtgcttcaacatcctacgagaatattgaatgaagctcaaccctctaaaatgtgcttcagtatccaattaggaaagtttctcgaattcattatcaactgaagaggtatcaaagcaaatattgagcagatcaaggccttggaagacatgaagtcaccgtcgcggataaaagacatgtaaagcctaatggagaaaattgttgcacttacaagattcatctccaagtcgaacgataagtgtgttcccttcactaatttacttaaaggaagcaaaaagggatttgactggactgatgaacgcgagcaagccttccaagttctcaaacgtcatctagccaagcctcccatcctatccaagccaatagatggggaagaattatacatctacttagaaatcaccgagcatgcagccagtactgctctggtgcatgaggtagaaggaacacaacaccatatctactacatcagtaagggtctcattagggtcgagtcaaggtatcccccaattgagaagctagcctactacttggtcctagcctaaataatgataaggcaatacttccaagctcccacatcaaggtactaactgaccaacaaactaggcaagttctgatgaggccaaaagcatcagggtgcctactcaagtgggcaactgaactaggtcaatttaagatcacctactagcctcaaagagcaattaaaggataggcattagcagacttcattgctaaatgcattggcctcaaacaagactatcccatgatttgtaaggatcaggtccacatctttgagactgtagctcaaggggactctaaaccttcctggaaattgtatgtagatggatcctccaacaagcgcagttctagtgttggactcatcttagttactctcgagggattttgaactcacattccttgcagtttgagttcactacaaccaataa

SEQ ID NO: 311237 - DNA, 2652 bp, Cannabis indica
aaaaaaaaaaaaaaaacccaagtacaagttgtgaggacttttttctcaaactcttgttacccccacagacattaccaattttgatgttgtggaatgtggaaattcctaacgtttgaatgtgcatactgtgctaattgttttccacgacctgcatagcttacttgcggaatcgagcatttttcattatagtcgaccttttttgtagcttttaaagtagcagacatttatagcgatcgagtatgatctatctcaaaaaatcaatatttgcttaacaggaggttatgtaacgcctaatttttttatttatttacaattggcaagattctctttgtctgcaaccatccctcaactcaacaccagaccactttctcacccgagacaattacttcaaggagaatcatctacccaaaatcaagttaaccaactcccttcaccaaccatatctaccacgcaacttcctacaacttctgttggagttaaccccgctttttctgtcactactgctatatctcctgatcttactttaggaaaaaattatgaccataatgacaatcatgtggcaaacttgtctgatgtttttaccccatatattggcaactttaaatgctctcagactttcgccacttatcctctatgtcctgccctctccaagcattcactttgccaatcaattaacatggatttgtctcctaagtatgttgaaaattctgctgcagcaaccatatactcatccagctgatatgctattgaagaccaagaaaattgtcatcccaatcgtacattcaaacgacaatttgataacctctctttaaggaaaactctcaagagatgtcgtggctcaagtgttcatagtccttctccttcctcggttgaagtgactacaaacctgcaagtttcagatgtcaacaatgattcttctggttctgaggatgcttcagcggtgattgctcagcaatcctgctcttcatcatgaaaattgttagttggaatgcacggggcttggggagtctgagtgcattctgtcgcctgtgtttgcttatttgtgagcaaactccccaacttttgtttcttatggaaacaaaattaatttatagttgtattactcgttttaagcaatgtttaaagtttagtaatggtcttgaagtacctcgttcgggcctaaagggtggattaatgttattgtggcatgatgatgtaaatgtaacccttttatcaatgaattccaattactttgactgctacatttcttttgatggtggactccgatgacatttttctactgtatatggttttgctgaagctaaaattaaaaaacatatttggactcttttggaaagactagttgatgtatcacctttgggtccatagttgctcgtggatgatttaaatgagatattctctcattctcataaagactcaggccctctaaggtcagacaatcaaatgatggcatttagaacaacaattgatctatgctctttacttgaacttccatacacgggttcggattacacttggacaaaaaataagagaaatcctcatgctttacaagaacgtttagattggtgcttcatcaataaagtatggaatgacaggttgaatttgcctcaagtctctcacttggattactacggatcgtaccacagagcaattcttattgtgattaattttcaagaaatcaacaatgaagtaaggtatcgctctcgtttcagatttgagaaaatgtggcttaaagagaatgaatgttcgaacatcatcattgcttgctggcaacattcccatggaaatcctattgatgttttaactctgaatctctctgcgtgtgcggctggtttacagtcttggcaccatgccgaattcggttacctcaagaaaaaaatatccactactcaagctaatgttactgctctcatgaacacctctaatcctacgaaacttcatgcacaacaagttcaaaaggttgaatcaattttagatgaacttcttgctaatgaagagcaatattggtagcaacgttcgcgtatcgactggctacaatctggtgatagaaatacccaattttttcatgcaaaaacttcagcacgacattccaacaataagatccgatccttagctgatgaaaatgggaatgtgctcacttcaaatgaagatactgctacacaggtttcctcctactttgaacatctttttcaagctgaagaggaagactattgggccctgcaacatgttctgcaagtaattcttacaactgttactgatgtgcataataatttcctactgcaagaatttactatagatgatgtttttgaagcttgaaaacaatgtggaaatggtagtcctggtattgatgggatttcagctttgttctaccaacacaattgggatattgttggtagtttggttacaaaggcagtactgcatattctgaatgagggggggcagtttagaagcttttaacaaaactctaatccccaagatcaaaaaacaaaagactatgaaagacttctgtcctattagtttgtgtaatgtgatttacaaactaatttctaagtcattggtgattcgtctaaagtcaattcttcctcatgttatatcggacacacaaagtgcatttgtaatatctcaataagcctaatggtaaataattagggt

SEQ ID NO: 311238 - DNA, 1868 bp, Cannabis indica
tgcacacttcgggcagagccgcgaaacgtcttaaagagagcgacattgtccgcgactcagccagattattctatcggtaattcgttccaattttactgtatttaatttcggcataacagtatcattcaaattaaaaaaaataaaattaaaactaacaattggtcacctttttacatttaacaatataatcataaatataagtctttaaaattaataattaattatgtcacatacatacattgatggaattatataagaaattatgtatcactatactaaacttcatgcttaggtttatgaagaggaaacattacttttcttttttaagaaaaatgtttctttattaactgaaatcatctccaactaacgatcaataacaagatatattttgtgtttggtgattgtttttgagtatttccaaagcttcttcattattatataagatgaataaactgtgatataagatcattataatcatatcttataatatttttttcttcattttattttttaaagtgattttgtcaaattttagtggttaatttttctatttcttttttaaataattttaaatgatattttaaaatataaaataaataatttccaatatctgaccaagtacctgatttaattttcattttttttaagaaaaagggactaaaatactgaatattttcaaaaaaaattatagttttatataattttttttctgttttggttttctgcggtcaaatatattaaaattataaaatgtctacttttatacctaatactttttttttattattacttttttggtagtaaatatatacaatgttattaaaatatgctcttttatacctaatttttaacatgttagacgttaagtattgacacagaataatacataattttgaaacaatttactaacaaagaaaaagtaaaaatagatgtataaatattaaatacttatactagagaaatgtgttaatttcatgggtaatattaaagctttactcaagtatttttgtttcaaaagctcagccaagcaagggatatttatttatttatttatttacctagcttcgacaactgacaaagttaagtcgtttaagctacaattgtcagtaattttttgtgaaccaacttctaaatcttccataagtaaataattaatgaaaaagagtggctgttttggggaaggtaatagagtagtatcactatatatcatggaaacaacatcaggcatagttggtctgtcttctgggcgctcttgtacacacaacaacccaatatgaatgccaatcaatacttcactcagcttatattttgctagtgatgaatctactaactcaacacctctaccttcactccacaactgccacgcctgaaaaaataacaactccacccaaagtatcatatatagtgttaagtgttacatgttaattattactacaataaattttaatataatataaattaggactgacaattttgagcgagtttgacccgaacccgaacaacccgtccgaacccaaaccggtaaacccgaaatttttaaaaaaatatatatatgttcggacgggtcgggtttaacccggtacccttcgggtgggttcgcaagttgagtttttaagagtactgaatttcgggttgaacccgaacccacccgccaacccacatatttaatacattatatttatatttttattacattttataaatatatattaattaaaaaataaaaagaattaaaaataaaaactctaaaattattatattatatatgtttaatttaataaataaaaaaataaaagaaataattattaaaataaaaaattattttttttaaagaattgaccgggtcaacccaccaacccaccaacccg

SEQ ID NO: 311239 - DNA, 977 bp, Cannabis indica
atggtgaaacgacagaaatagataaaggagaaaacatatctattgcatgaataaaacgacacaaaaaataataaacgacataaattaagtgtttaaataggacaagccaacatgtgtagacaatgatggtgatgacgtcatatcatgtcatggccatggatgttgatattccttactgtgggttgaggtttaggggtttgactttgactcgttgtccacggattagccccctactaagaaagacaagatctttttcagtcaaactcaaaaaccaaaatttgggtactcgtagtcgtactggtagtgtggatactcagtctaccatttttgagtcgaagaagaagagagaaatgggttggagtgagacagtgagaaacgcagagaagttggtggagaaagccatgaatgggaacgacgcttcccacgacgctgcccacgtttggagggtcagagatcttgctctctcgctcgcccaagatgaaggcctctcctcaaatcctcactccatgcaaattgtaaagattgaatttttatttcttccccatttgtttataccatttctggtttgtttgatgaaaattaagagccactttcacctgtgatgggcttggcttaattttgggtcctcaattttcatgaataatttcgtaaattttctttgtcaggttgagcttgctgcacttctccatgatataggtttgtactcaattttaagatatatataagcaacattgctggttattgtttaatttttttatcatgaccatttagcaatggaattatctatcttaaattacattaatttggttagttctgttctgtgctgtattattacatggcaaaacaaattgtgagtttccaataccaaccattaccttaaagtttacacttttaacatgtttaaaatgaagcattttattcttcatggtaatggaattttactaacattttctgttcttacttgatttttgcaggtg

SEQ ID NO: 311240 - DNA, 1501 bp, Cannabis indica
gatgtaccctattcaaatgcagtagggtttgtcatgtatcttatggtaagcacaagaccttatctaggttatgctatgagtgcgcttagtaaatacatgaaaaatctaggaaaatttcactagtagatacttacttgggacaactaaagtaggcttggtctataagagacagaatgtaggtactataatagaagggtacattgattcagattatgctaggtggctttgcctctacaagactagaactcgaagttagttacaactgtttgtgtaactaacttccagcctgatcaactacttacactactctataaataagctacagaattaaaaggaaaatataatacaaaaaaaaagagaaagaaagaaaacctttggttcaaaacttcagctccaagatccaaagagaaaaggtctcaggcaaagagtaaaactctcgcggtgattaggttttgaagaaaggaagtacatgcacaaagagaaaaatagagttagatctaatagttgaaaagagaagaaaagaaaactataaaagtgaagcaatcgagtcttacctgatcaaatcttgtgacaggaagcttcacaagttgtaaatcgtcattgttgaaagtggatatcaagctaaatctctgagatgagcttgacagagatgttgccttgatttttggggtgaaatctgaaataatttctggtctctccttttctcactttattttgtgtgtctctgtaaagatcctaggattctaacatatgatcgagcaagttcttctcaaacaacttgctctgctagggtttcgagggcttggtttcagtgttgtgtgagttgcgtttgatgatttagggcctcgagactcttcttgaaaggtctcagtgtcttagtagcaaacgacacttgttttgtggtcatattgttgctattgttgccgttttagtctaaagttcttttacacaaaggaactctccttcattgacaaactctccttcatgcatacatataccattaaattaaataatttcaatttttatggaaaaaatgaattatttttttttaattttaaataaaaaacaaataatttagaggaggtgacatatatataacagaaaatattattaccctaaaatatttagattttatatgtaagaataataatcactatccaacatattgaatcaaattaattatgagtagcagcattggtgtcccttctaagatgagaaacaaactgacctgtaaaaataaataaataaataaaatcaacaattaaatctagaaatgaaaaattgtttacgagtggttcattcaaagaagggaaacttacaaaaatactgaaatttgagttaactttttgaaaaatactatcacacggaaatgttttcaaaaatactgtgtttttatgaaacaccagtagaacacagaacaaaacaactcaaaacaacaatagaacaactataaaacactagtagaacactagtgaaaacttaacacagtatactacagtat

SEQ ID NO: 311241 - DNA, 3176 bp, Cannabis indica
accttccctgattacattaacacgcaacaatagcgctgttcaaaatctttcagctgtttagaggcataggcaatgaccttccctgattacattaacacacaacccaagccttgccttgaggcatcacattatatcgcaaacttttcatcactaattggcatgctcagaactggtgtggtaatcaatcttttctttagctcctgtaagttgttttcacatttatcagcccaacaaacttacaattctttcgacttagctcggtcataggagtagcgatcttagcaaaaccttccgcaaatctcctatagcacccaaccaagcctaagaaaattctaactttagtttttgtcttaggtcatgactaatcccaaacaagttcaatctttactggatctactagaatcccattcttacttaccatatgtcctaagaaacttacttgagacaaccgaaactcacacttcttgaactctacataaagcttatgttctcggagacgctgtaataccatacagaggtgttgctcacaagcttcttccgattcagaataaactagaatttcatcaatgaacacagttataaagttatcaagaaagtcattaaacacctaattcattaagtccatgaatgttgctagtgcattagtcaagccaaatgacattactaaaaactcgtagtgcccatatcaagtacgaaataatatcagttttaggaatatcctcttctcgaatcctcaactggtgataaccattcggagacgctgtaataccatacagaggtgtttctcacaagcttcttccgattcagaataaactagaatgtcatcaataaacataattataaagttatcaagaaagtccttaaacacctaattcattaagtccatgaatgttgctggtgcattagtcaagccaaatgacattactagaaactcgtagtgcccatatcaagtacgaaataatatcagttttaggaatatcctcttctcgaatcctcaactggtgataacctgatcaaaggtcaatcttaaagaagatggtctttccctgtaactgatcaaataaattatctatcctaggcaagtgatatttattctttactgtcaacttgttcaattcttgataatcaatgcacatacatagtgaccgtccttcttcttgacaaacaaaactagtgcaccccaaggagaggtactcaatctcgtaaaccgcaaatcaaataggtttctgtaattggacttttagttcctttaattctgccggagccattctatacagggccttagaaattggctcaacccctggtgctaattcaatctcaaagtcaatctctctctttggtggtagtcccagtagttcttctggaaacacatccaaaaattcacatactacccgaaccttctcggtccctcaagtgtatcttttgtggtatctaatacactagccaggtatcccatacatccttctcataaaaattccctggtcctaagtgtcgatatcattggaattcaagatccctgaatctttctcgtaaaatcaaacgatgtttcaccctttgttcaaaattcaccatcttcttcttacaatctatggtagcattgtacttagtcaaccaatccattcccatgattgcattaaaatcttctaaatctaattcaatcagatccactgacaattctttccattttactaacactggaagagatcttactcacctcttcgagattaccatttcctcagtaggtaacaaggtaccaaatccactagacattatatcacatggtctactcaatttctcaatgattctactagaaatataaaaaatgtgtggcacccgaataaatcaaaatattaaacataataccactaataaaaatctcacctgtaacagtcgaatgaccagcctttgtgtctgcttgggtcaaagcaaataccctagcaggaactgtgtggctctctttctcggtcttgggcttctgtaactacagacaggtgtttctgaaatggcctactactccacattggaagcaggccttagattgacattcgcccaagtggcatttcttgcactttgtacattcaggttaagactgtcaggctttgttttcgcctcgatagaaatcctcattaccttaaaaccttttggttggacccataacttgtggcccatttggtttcctttttcgatcattaggattagaacccttgctcattccagtaccagatgatgtcttccacacatccttcctctgattactctttttacgaatcaagatttcagccccctcaatagtgagagctaaatccacaatctaaagataggtcttcacaacccctgattgtttggtcgccataacaacatctctggcaatatactcttttagacctctaataaaattgacctttcgtgcagcttcagtggccacttcatcaaaagcaaacttagctagcttatcaaacttggtagcatattcagtcacagtcatgctacccaaaactaaccgtgcaaactcttcagcttgagcgacacgaatagaatcattataatgcttctcataaaatattgtctggaatgtgacccaagtcatggtattcggattatgaccttgagaaacaatctccctccatatatgggcatcatccgtaacatgtaaataacacatcgtaccctgtcattatcctcgaccagcataaagtcaaagatagaagtaatcatactcatccattgttctgcctttagagggtctggaacaccctcaaacacaggcgggattcgtttcctgaaccgctcataaattggttccatacgatcctccatatttagtggcactacctgaggtaccaatataggtgtaggacgagcatgttgctctctcaggtctcgaatctgctccccttgctatctaattgtctcttgcatagcagcaaacatttgttcccaattctgaggaggtggaggatgctctccctcaccaacttccctgagccctagctcgtggttcaaacggccagattgccgctgcatgatctaatgcacctgcgatctagaaccttcaaccattcagaatttaaatagatatcaacatcaatatgcatatgccatatgcatattcttatcataaccatcactatgctacattttctaacatactttataatagtctaggcaggtaatcc

SEQ ID NO: 311242 - DNA, 589 bp, Cannabis indica
aaaattctacattattgatgtcaagatcttaataactaataaagtcataatcaaacccaataaaatttatacatatttacgaacaaatatttcaacaaaagattaattaattagttatactaaatatgttactacttagtattagctagtaagtacctataatatatatgtatttgctatcttgagtcacatctactagtactacttatacttgaagttttagtattacttctagtagtagaagaagttgatgatggtggtaacaaaatgtttgaattaactgcagtgacagctattaagaccacacacaccaagactgagagtgccgataaaactaccattaatgcgtgtgctatccctccctttacttcttctgcatacttaattgcagctaatgccagcaaactcaacggaaacgagtaggcccaccatgtcacgtggaacttcttcatcgatttcctgaacaattctggccttgcaacctgcaaaatttcaatattaattaatatcaataacatataatctatacaaatttatgtacgagatcgatataaccatgctatatattattagttattattcgatccta

SEQ ID NO: 311243 - DNA, 1771 bp, Cannabis indica
cttctaaacatctcatttaataatatttattttatataaaatttatatatttaattataattaacttttttaaaacttttcttctaatttatattcttaaaaaaatatatttatcaaataaaaatgaattatattttaaatattatgacaaataaattaaaatacaaaatttataaattttcaaagaaacaaaaaatatacatacatgatttaaaagaaaaaaaattaaaataaatattgaaattaacatcaaataatgtgaaaaaaaattaaaaaaaatattaagattaattttttaaaaattatttaagtttattttttttaataataaaatgtatttataattttacggagtacaacaacttgcattttttcctcttcacttacaaaaagaattacgctccatcactttaatttaaatattgggtcctccattgggggggatgtattgtctacatgaaaaaaagtagaaaaattctcagggaccacaccattaaattttgtagggtcttgtaatcttccacgttattaaatttctacatacaaaatttcaaccttttttatgttttattttattttttttattgtgaatttgaagtcattggtggcttttatgatagtaaaaaagaaactttttcgatcgttttgtctttgttctttttgaagtaacaaaatttaatgactttcatgtgtttcaggtcttagtgaaaacattcctatcctatcctatcttatctacaagtgcaactgcaattctgcaaacttagtacgttttaaagccaatctgtttggaacaatctatagccatagccaagtgaggcaacaattcaaagagacaattgtccactttaaaaccactattaggaatacaacacgatgctcgagcaagccaataaataatagtgttagtatatcgtttaaatttgtccctatcactttaagatacttaactcttttatgtcagagtattttaagtacaatacgtacgtttcaattaaatataaaattaaacgtaaatttaattaattgattaataaaatgagtatttttcaacttattcctaaaaaataattattgtccttacttcgttccccatttaaactagaaaactccaccccattaggggcgagcccccacagaccatcccataaaaaacaatgtgcatcccaacttttaagttttaacctttctcctttgtaatagcaattagcaagtaaatgtcaatttcgaggttagtaagtattagtgtggtggtgaacacgtgtcagcaatggcagccgcacgagaagcaagcaatgaggtggacacgtgtccttatgtgggtcttagagaaaggggagagagagagagagaactagcaatgttttattgtgattttcttttttttttggtgaaagttttcttgtggttcttgttgggatgtgaatgtgagtagtctcatcaaccacacaacataacaaaagagtcctccttacaaataataaagaaatcgatgtgtttggaactttcaataataccactattacattacacacactaaaccaatatcaagaatcacatattatttcatactccaaattttctcaaagctcacatgtgcatcaaaatattacatctaatgatacataattaacatttgagaaaaataacgcaataaaacttccatttaagaatatatttaggatgcataaatgagctaaatttgtgcattgggcccaaaatacaatttacttcttttaaatttgaaaaaattacacttactataaaattt

SEQ ID NO: 311244 - DNA, 896 bp, Cannabis indica
aataatttccaacactatgtcactaggaaataatagagcttgtgaagttaagggaataggctcagttgaaatgcaaatgcatgaatcatgatggtatttcaatagttgtgcaacatgtgagatatgtgccagaattaaagagaaatatgttgtctattggaatgtttgacaagaatggatgtacaattaagattgaagattgaatgctcataagttttagaggttcaaaagttgtgattaagggactatcgaacaatggactctactacctagatggtaagacagtgattagaaatgcttcacctgtagtgagtcaaaattctgagatccatataaagatatggcacttgaggttaggtcatgttagtcaaagaggactggacgaactcaacagacaaggtataatcaagggtggcttgaagagtaaacttgaattctgtgaagagtttcagaatcatatttggaaaaggggaacatcgtacaacagggaaactggcctatgtacactcaaatttatggggtccttctaaggtggagacaattggtgggactagttacttcataagcatcatagatgattatagtagaaaggtatgggtgtacccactcaaaagtaaaaatcaagcatttgctcttcgagtctttcctcatgaagtctgtcaaactcaagattttgttcctaaatacttgccttagcatgaatcttagttgttgaccgaggttttcggcaaccaataaaataatagtagattaaagagctgtaagaaattaagagaaggatttttacgtggttggggcgttaatgagccttagtccacgagtctgtgtatttatgagtgtatttagtacagagaatgttcttggtgagtatttactcttcttgcacttatgcaacc

SEQ ID NO: 311245 - DNA, 3155 bp, Cannabis indica
cctttctttgacgaccaggatgtcacttttgggatcgtaacggagtgtttgagcatagtgctcccttaatttgctggtctctcccgcaatgtggggtctatcaataatgacccctaagtacctgccattggaggtggcataggttctccattcttggcactttgtgcctgagtctggtcattctatacaaaacgatgcaggtggggattattcttctttattaggaatttgatctccctcttcaaattttgacactcgttggtgtcatggttgaagttgttgtgaaactagcagaattttgacatgtccctcttactcaactcccttttgatgggagggggcttcttatatggaaccgttccctgggtggccatgaagatggccccaggtttcttcgtcaggagggtgaagcatgtgaacttctcctccttatctttttggtttaatggcgtggtagaagtattgtacttcccctttttgccactatttcttctagagctattgttgttgcgcttgcccctagtgttgttgccactagagttttgggcagagttactggtgttggcttgcgcacctagcagatcgtggagctgcaaaatgccttacaactgcctattgtcgacttgccttgtctgggcttgtcaaatagcttcctccagcttgataaagttgtccactctgtcgaggaactccttcatgttgttggtcaagatcctccagatatctttctagaagtcactcagtggaaggatgccccccagtatggtcctatattggccttcttttataaggcctttgaccttggtggcctcgaccatgaacctttgatgtaatcctttaaaggctctccttgtcgttgtttgactttgacaaggtcttgtagctgcaatggtataagccttgaggatgagaactatgcgtagaattcttagaaaaactcattccatgaattgaatcttcctggagccaacttgaagtaccatttctgagttaaatctgacaaagtttccaagaatattcgacattacacatcactagtaatttttttagaaatgtagtgcatctcaaaatacttgatgtgtgtcagtaggtcttcttgcctgatatacatcttccataccggtatcttgaacttggacaagggcaaggtatttatgtatgtcgagaatggtgatccccttaacctatctagttcaaggtctaaaggtttaagaccaactaggcccttgatcatgtcctttatttggtccaactgtgctcccacaaaaggatctactgatgtaggaacttggctgactggcccttcttgaatgggctgtagccttaaatgtggtaacgtttaaccagccatactttgtgagagcgtatggtggaggatgaccatccttgtcttctgttgctggccttggtcagccactcctagatagggtaactggccttggccggctaaccctatgctaggtagtgtctggccactcattatcccctatttgactggtacagccggtgtattgacagggggtagatcacacttgttgctagagttaggtagatctagatatctaaagttaatagactcacttctcaagttgttattttgggtgtttccacccgttctcagacctagccaattgaagattagcctctagattacttgctcttagaggccccgggacgggatttcaccctgctggccagttaggggtgcacttgcaggattttggtcggccaaaggctatccaagtgggggtgttgtagagcttgagatccctgcctgacccccagaccactagttgccaggatctggctattctcaccaactgacctttgtggcaaggccagttcttcttcgggtaagggaaggtctgtcctggttcctgaagaacctaggttgacagtctgtaggtagacgagaccaatttgtcaattattcttccttggagaggatctctgatgagatcctagcctttgccaatagttttttcattgaaccgccttattaggttgctagcttctctgttgcggcagtccagctctacctggtgaaatcagaggatgtactcttggtcatttatctatctcagaaatttgcaactctattgtgcgaatacatcgcaatcaatagcgtgtggttcttcagtttggctgacttggtagacggcctctcttagtctagctaactcgaggtcttttcctaagtctacatggggtttgccaatggatggcttgcgaattcccggccccatctctcctatgtaattctggggacgaggtccggttgttgtgcctaggggtagttccacgcaagtccttccttcagtgggaggcaccagtggaaggtctttccttagaggcaatggccaattatttaggtccaccgagatggatgtgttgacctggccagctgcggtggctagattcatggtgtctgtcgagatggcaagattggccacatctgtagggtccatggaaatcccagtaattactagaacacaaacatcaaggtctacagtcatatggttttgagggagacctgatggggtagaggctgtagctagagttctcctcgtgttaaccattatatttgatcagataaattatcaacttgctctcaatgaaagcaccaaactattgacctcatgatagtagagtcgtatttaatggtgatgcttgccacgtgttaacaacaagaacaataaagtaaatagacacaggattttatataggttcaacccccttagttagtgggtaatgacctactctactttttagttgtattgataccgacatataatactactcgaatcactatagtgataggatctgaagtagctctctaaggattacattgtaaaaatcaaagttggaaaatcttaagcaagagaagagtagtgggcgtgtgtgagagagagagagagatgagttatcagacttagagcttagggtttgagccttaatgacttagaactttggatttgagggtttgactaaggctttttatataggagaggttatacccttcaaatcccttagaaataggtaaaataagttgctatttacatattaaattaataaaatataaatgactaaaatgcccctcaaaaatagatattttccctctatttttgtggtttgttaaggcccaattcgtggtc

SEQ ID NO: 311246 - DNA, 1452 bp, Cannabis indica
agtttagtctttgcagtaattagattagagtaatttgtcctttgcaaatgctattataactaatgattttgaaacatattttgtgccctgtttatttcaatgaattgaaaatcctattactacttcaacttgcacagtactatctaaaggcagcttttggcttcgacaaaaatcagttctcggaaattttgatgatggttggtataggttctattgcttctcaggtatgtttccttatggagcttattatctcaaattgtttattctacaaaagttcatacatatgtcatggtttggattgatatttctctcacctcactgcatttaatattttttctcacaagatggtcatataaaaatttatgcaaaagttgaaaaaccagttctcatagtcttacccttgactaagaaagtagtatgaagttcacaatatcatttttttaacggtcttctaatctcttaggtgaattattaatgtgtcataagcatttaaactcatctatataacctttcaagatcatgcttagtccaattattatgcattttttgaatgaaagatttgggtttttgatgtgcctcccagatggtgctgcttccactaatgaatccattggttggagagaaagtaatattgtgcatggccttactttcttctatagcttatgtaagccaccctattaaattattctcatttctccactaaaaggaaaaaagaaataatctaatgatgctttcttacatgcaggcattactctatggtttggcttgggcaacttgggtaagcactgtgaacaacttgataaaaatattaaacaagatctattttgaaaagtagagatttaaaagaccaatcaataaagaggcttagtcaaaaggaactatttattttcttcagcaaatcatgcttgacttaaattcttccatgaaaagatccttggaaatttgcagccttataacatagttgataaaaaatttctgttaataaaataattgtctgggaataattgaagtaattatcatattgcaggtgccttacttaagtgcctcatttggagttatctatgttcttgtgaaacctgctgtaagtgattttttgttttttcttatatttatgttggtgaactatgaatatgattgttcaataattttgctgtcaaattctcaatatgcagacttacgcaattatttcaaaagcatcgagctcaagcaatcaggtttgttcccaaattgcatgaaaaatcatgaactgacactcattatagaagagatgcaagtcttttacttccattctctaaatttactctattcttctctttcaggggaaagcacagggatttgttgctggtgtacaatccatagcgagcttgctatcgccactcgctatgagtccactgacttgtgagattttttaatcttttttctcttttcattattaatgtttcactttcaaaa

SEQ ID NO: 311247 - DNA, 1737 bp, Cannabis indica
attataagtatgttcatattgtcttactgcaggtgaattctgacaagatggtacggtatagtcacaattgggtattctggttcgcactaaattttgggtctaaaatgattttattatgtgattatgttataacataaaatatatgtggaattatgaattatacgcgtgagtgttaaatgactggattgcccttaattgagaattatgtaaagttttatccctaggcaaaatggtcttttgaccattctttactacaaattgaaaatgcattattagataagtgttaaatgaaaagaaaattttattttttgtatttcaaatccctagctgactctatctctctctctctaaacctgtcttcaagttcttttcaatcttgagaagaaagctactttgggggttgattttttgtggaatttgttagaaacaagcttgaagatggttaaggtagcatttaatcttcttttctactaaatttaattcttgaaattttaagatatttgtaattttgcatgaaatttttggaaataatttatgttaatgaaatcttgttggtgattttgaatagaaagcttgtatgtgagttttatggtggaaggcatgttgtgtgtgagtatgtgggtcaattcctagttagattattttgttgtgtcaggggtgatttgagcatgaaaattttagctttgtgtgttcttgagttttaaaagcatgaaattggtaatttttgagtttaatattgtgtaaattaagaatgatttatgtggatatttttactatgttttgggttttgaaaccacctctttgcatcaaaagtttgtatggaaagtatggttaggtgtggtggtgtttggatgcatttttggggtcaaaattttggttttttctaggttctgaaccaagagccgcaacctggttcatgtgagtcgtgacccttaactttgggcatttttgctacctgtaagggctcaagagccgcgaccttcggtccaaggtcgcggacctctcagttcagtagagccaaaatattttataaattatttttgccataattttaattctgaactctgtttgggacgttctttacatcattggaaagctcgtaaggagctatatcatttgatccagtatgtgagtcctgattttgtataaatattttatgaaattggggattgaacttattatatttaaacctgagaattgtgactaggaatatcgatacttagctaggatcacttgtggattgggatttctcctcatacgttggaaattaggtaaaacagtgaattatacacatagagtaacgcggtggcacggttcataatatgtgattaatttgattaagtgtgagttagggttattaccctaactttatatggtatgaactagggttattagtaccttacatatttatattgagaattggggttattaccctaagtaaatatactgtgaattatggttattaccttaaatacatttattgtagaatagggtcattaccctaaatatgcatagttttgagcatgcgataatgtgatgtaaataaatgattagacttatgaaagttaaggttattaccttaaaatttaatatagtaaattatatgttaaatgtattgtatgcatatatatgtcaagatttatgtgtataagacataactaggttaggcctaataaacatcatcaggatatactattgtaagaacataatgtatgaattatgtatatatgagtagag

SEQ ID NO: 311248 - DNA, 1355 bp, Cannabis indica
cttaattttgtatcacactttataatagcatatacattatacatatgtgcccacaaaagatttttaatctaacaaactcaacatcgagtattcgagtgcaagatgaagatgaggattatccaaaggatttggttttttggttaagtcttaaggatatttgttcaaatgttttctttatagaattacaaatcagccaattactcaactaaatataaaatttgaagatcaataatcaaaggaaaagaaaacaatagtttgatacaatcacaatcttaattagcataattaatcaaaggtcaagtttattccatatctttcgagtcccaatagctattgtttgcttagcaaaattcaatttcattgcctctttatggtttcggacaacatgcaacgaaagagcttccatcctcagctcattcatcttcaagtttacatcactcaatttggtctcaaagaaatttgtgaggtgagttcccatcgataagtacacctcatctgtcaactccataggcaagtcgggacaacaaagagccacttcaaggcgcaagacttctttgaggatcattcgaaggagctcgaattctatgccatcatcattctttgctgctcttttcacaatcaaactctgcttgttctttctcattgttttttctactaattgaattacacataagaaagtcttgatcacaatggaatcattactatttttctcaacgtttaagagttttatcatagccttgaaataatcaagattcttcattatgtttatcctatcacccaaaatcatcaccacaaaaagaaaatcaatgataatccaagagatatttgtgccaagaccaatcaccactttcttcatttcctcaaaagtagtctttctttgagattgatcaagctattgcatccactcaatcaaactcttttcgccttttcttcttccctttttggtttctttacgctaaattgtcatgaactcttctaaatctttcaagtaatccttgaaagaacgatgatcaagatatggaatgttgtacttgaagtgtttgtcctgaaactcatcgacgcatctggtaagacacttggcttgattcgtcatgtctaggaatttgagtttgaattccagatgatcatcttcattattattccccaaaagggctaatgcagcagcaagcaaggacctatattcatttgctatttccaaaaagtactgagaatcttctgagttttccagttctatgaacttcttgggactcttttttatgacatatctcattgctaaatccattgcaagattattatctttcatttctgccatgcatgccactttcaacttcttcaattttgtaaagtcttttttt

SEQ ID NO: 311249 - DNA, 1425 bp, Cannabis indica
gtgggattgtacagctcccggtcttttcccttcggaccacgggactctgactgtcatatttcttgttgatggaacttgctgggcattatccacatcttcatcgggttgttctttagattttttggtaagaaccattttttcagtgaaaaacttcaagatcttgagttcagctctcaatgaaagtaccaaaatgttaactagatttttagccaactgatgcgtaggtggttgaagtctgattcttatagtaatatctcgatatttttgtgcgtttataactactgttgagcttcttgcaagatttgaatattttaattagtcacagacgatgagggtcccccttccccaagagtgtggtatgaccgttaacctcctctgggggtagtaactaatacttcggggtgacacccctgagacccatattcgtgaagggggtgacagtcgccactcggggtgttacccccgagacccctttcacttgatcttcgacgttgtgtggtagccttggcatcatgaagatgtgccatatctgccatgtcttatgtaggagaacaaatttcttggaccatgaggatgtaggggtttaggtgtacacccctagaccaaccccatcaccttttgagtagatcgttatatttgaggtaggcgtaatagtatatacctcctagactggtttgacttccttagtgtatggtgatcgtttatttcctagtccaccttccccttacgggtagtcaccttgcttgagctaggggaaaagatgaccgtcagacttctcttccaacagttatgaccaacggtcagtagtcaccttgcttaagctaggggaaaggtgaccgtcagagttctcttccaacagtcatgaccattggtcagtggtcaccttgcttaaactaggggaaaatgtgaccgtcagatttctcttccaatggtcatgaccttgttatgattaacggtcactccaacagtcataattttacatattcttcatcaatccagcccgatatcttcgtgccacatgtctttattcttagcatgtcactgtcgttaaaatttaggtaaacaagatgcaaaagaactctcccattattaagtacaccttaaatttttaaatacatttgtattcttttttgaaatgactaaaatagaaaatttaaaattattttactttttagaattagttatttttaataaatacaattaactttaggtagttaaaattaggtattttcaaacctaaaagagagaaatttttatcaatggaacaaaatagaaatgaaaattttaccatcattttcatattttatgtgtagaagagtgtgtacatgaatttatatatattaggttgatattacgtataatgcatgtataattagtttttttttaattaggtttaattaagtgatgttaagtataatacatgta

SEQ ID NO: 311250 - DNA, 574 bp, Cannabis indica
cttgaaattgaaaagtggcacaaaccactctatcatttccagtgatgcccatgaaattcaatgtcgtggtgatcacagttagccattgctcgactttcataacatctggacctcccaggaagagtcgaggtgcatgcttacagaacctttcatacaggggttccatctggttcgttgcagcaaccggttcgtcctgcacagcaagggcaggagttactggtatttctggagtaaggactgcgggagcaccctcctgtctcgaatctctttaacttgatcaataatcctggcttacatttccgaaacctgttttgtagtcttgggcagcctgggcaacctgcggcgagttagcatcaacccgtcctcgtgccctgcctctaaggcctctgctccggccacaaacgtttaggggaatctgaactttctgaccgccacaggatccaaccaagttacactaactcctggtatttcacccgacattcacactactggaacgaccttcgtaaccaagagctagtctggtctaatcgcgatcaaaaacaacttactaatgccactaatttggaaattaaaa

SEQ ID NO: 311251 - DNA, 1019 bp, Cannabis indica
tatttatgtataaaaaacaaagtatttattattttaaaatattttttttttcatttcattaatttggtcctaccacaattaaatttctctaacactacgtactataatactctctccctctctctctattatatgaattgtctcttatcttattttttcaactgaaaatatgatctcactaaaaaaagttactttagttttttaccctactgaaaacttttgcataggattaagtttttttttttaaccattagagacatgacaagtttttggggttcactcaacttttaatttatatatatattcttttttacttttctaaaatactgaaaaagagatcccactagagaaaatgcaaaagaaatcaacattgtcattatttgccaaactcttaatattctccagtacattaatttatttcttcttttctttcatgactttacaactaatttcataaaaaaatatatatttttataattatttaataacacaaccaaatttgtttttactttatattgtaataattatcctcttgtgttttttagagtaaaatatgtaaagattctagttttaacaagcatatatatattttaatttatttaataatttgaatttggattacttttacttgtacgtacattttagacacgtactaaaatatcttaatttacttttatggcctacgtacacacgaatatcacgttgtgataattattataaaaatctatatatataaatatttatataatatattggggagacaaaatctaaggtaaagattatgtgatgttcaaattgactacattttatgagacattacgaatcacagaactattattacttgttttttaactaacacattcatggctcgtttggaacgtcatattagatcgtattgtattgtattatattgaattgggttatatatcatatttttatataatacaatattaaactttaatttatactaaaatattatatatttaggtgtccataaaatttaataccacatatagttt

SEQ ID NO: 311252 - DNA, 1792 bp, Cannabis indica
atttaacatgtttttttttttttatttcatttcaatttttattcaagcccttgaaaaagaaaatattcaagccctcactgaaccgaatttctggctccgtcactggttccaggcaggctactatactaatgagaagggcctaccaagttaccggtcagcaaccagtgccttattctagcatccccttgggatctcaaaatgggttagaagagtatgtagcttatcataccacaaagacttaaaccggtcaaccatccaatccaaggccacaagttaaaattgtgggccaaacggtaaacaatcagatcttacgaaaccaccccttacgaggaggtactcagctaaacaaccatactcagatagaggtatcaggccaacctctcaaccaagttggtcagacccaaagacctcttaatgcatcgatctttgatcaactagataccgtacatgactttaaaaatgatctgcatacaaaaggggactggacgggctaaacattctaccaaccgtccagccaaatactatgtcccaaatctagttctaagagatcctaaatgcaaaatgtttccagccacactagcagagcaatggtatttcaagctgcctccaagaaagctcaattcatggaattctttctcatctgaattccatgcacaatttttctcctcttgtcagcttcccttgcatctagaagacctggtagaagtgaaataaatgccaagagaacctctaagggcttatattattagatttatgactgaagcaacgaaaattaaggggttgacttagaaaggaaggttggccgaaatactgggatgtattgaacctctaggagaactatagaataatattaagagattaaccatgggatcaatggtagaatttatagattgagcagatgggttaattaaacttgaagaggtagcatgacttgttaatactgagatgtattgaacctctaggagaaatatgaaatgatattaagatattaaccatgggatcaatggtagaatttctagattgagcagatgggttcattaaacttgaagaggtagtatgacttgtaaatacggttggacagaagaaaaatcagcaacacaccactacaatccactcaaaattcatagcatcccaacagttggaatgaaagtggaaacagatcaaacaatggcaatagacaaggcaatgcgaagaaaagcaagttcaacggcaactccgaacaatatcctaggtagaatgcctcgaagttcatttccttttcagtcctaacggaagacatagaaacgatctatgcgactacctagtctatggtaccatataaacaaccctctcccatgaaaaaggacatgagcaaatgagacccaaccaagttctattgttttcatgcagactacaaccatgacacaaatgaatacaataatatgaagtagaaaatcaaattcctaatcacaaaaaacaacctgcacttacaaaaatatgtcaaggcaaccgagaacaaagggccacccaagcagacactaactgaaactagttattgcctccaccagtggacatgcctttttaggttatcatttggggccctcaccttgctggagactctgacaaagctagagaaaagtatgtcggagacttgcaatatgaacaaaaggatgcaatcctggccatgaaagaaagaaaacctaaattaccacgtgttggagaaccaatcatcacattcatcaaagccaactctagccatgtcatttttccacacaacgaccctttggttgttgaagtgcagatttcaaacaaa

SEQ ID NO: 311253 - DNA, 1944 bp, Cannabis indica
tctctctctctctctctaactatagaaagtaacacacacaaacactcaaccggaacaccatttgctgaagcaccccttgccaaagttctcaatttaggtggaccacctaattccacatcaagtgcatagggccaacccaaaattccactataccaacatatttacttaaaaaaaataatgggtatgcaatttgtttgctaattgttattgtgtttagttgtattttgtttgataagagtagatctacacatattcttctttttgtttgtcttttttgtgtctgaaacaaacttgagtaaatctacgttttttggtttttttttgtgtgttttaacgatattttacgatggttggcgatatgtatgtgggttagaggttaggggtatcgtcttacgatatgtcgtgatgtcttaagatgttgttgctaacatatagtggagccatcgacactaacaatgtctcgtgatatgttgcgacatagtttgtgattttttgttttgaatatcaaacatgtcgcatattttttgattttttgcgataacttttaatgtttgcgattatttgcaataacttatgataataatgcatttctcgacatttttgacatttgaattcattgtttgtccatttttgttatcagattcaattatgtttatgattatgttgtataatgggatttgggcagttaaaagttttaactagatatctaataacctaaaaagtaaaatgttgatgtttgagattgacacaattttacagaagatacatgaaaattttgtatgaagagttagaagtcgacccttttatgtatgaattgaaattagaggtatgttacatgtacatgaaaggtaatatgataccgccgaaggttttagtgaaagatggtcaagtaagattgttcttaagcgtgaaggtaaaaatgagtgtggagaacttgttgccactgattatgactaaggttaagaggcatgcaaatttgggatccactccgccaactgtcccctcacgaagtgttgttgggagttttatctcagaaacagatcatgcggttggtttgaataagcaagtccctactaatatagatgagcacatagctgttatagtagatttgaatgaggatggtgataccgagttacaagttgatgaagctatagagagacatgctttgaggttagaactacctccaaggaaccagagtgcagagcgagaaagaagacttcctcgtagtgaaaatcaccaaactaataacagtcggcaaggtcctcctcgtagtactataccatcaaattttgaagtttgtacaaaattcaaacctctcatgtggataagggaaggcatagaggaaaataatatttatacaacttctctcagtggtacaacttcaagagaaatacacattggcaagttgtacacaaataagactaaattaaaaaaaaatgtagtgggaaggtttacattgaaaataaatgttgagttcatggtaagaaagtctggcaccaatgtattttacgtaacttacaaggatccaaattacaaatagagattgatggggaggaagaaggtacgttgtgacatatttgaggtcactgtgttccacaacaaatacacatgtggcctggattcttaacatattgataactgtcaagcaacaccgtgggttgttggccaccttatttagggaaagtacacattaaatagaactaagtacaatgcaaatacatatagaaggatatatttgatgaatatgaaatcacgattagttatgagaaggcatggaggtgcggggagaagacacttacatatgttaagggtacactaaacacaatcttatgcgaagttacctgattactcgtacatgctggaactaaagaatccgagtactatgattgacattgtgatagaggatgacaggttcaagtactgtttctggtcactggatgcttg

SEQ ID NO: 311254 - DNA, 551 bp, Cannabis indica
tgaatatgttggacaccaatatgtattctcttgaaatgtattaagaagaattttgtaaaatgtgtttcaatcatatctccttcagtgtatcctctttttagttgagtaatgcaagcagtatgatcttcatagagaattgctggtattgatacttctttatgagtgtaatccatatgttaatatgtatgtcatgatctcactcccacaaattctctacttgttgcataaagtgcaagtatattatcatgatataaagttaccacttcaaaaaaaaaagttgcctcattagaaccttgttaggaaaactcagtgtgacaaaacctgagctaaagaaaaaagagtacaatatatataattcatattcataatccccatgaaaatgggagaacttggtcatgtctcttttgcttacgtcttttttcatgggtgtgagcttcttgtacggagctgatgactgagtagccatgtagatagtttctaaatcttctgtcaggacagagaaagcagtaaacttggtaggattttcgttggggcctgttcggttttgccag

SEQ ID NO: 311255 - DNA, 946 bp, Cannabis indica
attacaatttgttgtgactaaatgtattttcagtcccaatacttattgtgactaaaactaaattagtgacaacttgtaactaaataccatgttttagtcacaagtaatattttattgtgattaaaagtcacatttagtcacaaaaaattatgttgtaactaaaaaattgtcaataaaaatagtaattttttttgtagtgttttgattccatccactataaattcttctagttatatagtattgcctcgtactttatcaccaacaaattatctttgatatatacttcaaaacactattcatgttggtccttatatctaatttttaaggacaccatcgctaaaaaaaataagtgacagtttaaaaccgtaatcgctaaaaaaaataagtgacagtttaaaaccgtaagctatagttgagtatttccaatggttttaaacaatcgtttaatattctcagttgtttaaactaggtaccagaaaaaaaaaattaaaatggagcattttaaaggaaattaattcttgacgattttaaactgtcgggtatagtgtaatatcccaaaaaataaaaatatttaaatagacatattttattaaatatgtaattattttggtaatgaagtaagattatgaacttacttagggtaatgaataagggttcattgaatgatcataaagcgtaatttattaattacggagattatattgggatatgtgtgtatcggggatactatttaataataaaaaaaatttatcaagcccgacaactgtggaaatttagcattatggtgagaaatgtcacgacattgatggaagaattattttggggatattccggactagtttagaattttagaatgtcggtttaatggattagtaaaattaccaaaatgctcctaggttattttttaaaatttaagtttctttaaagggtaaattagtcattttgt

SEQ ID NO: 311256 - DNA, 1213 bp, Cannabis indica
cccgcaccgcgaacactcctagttagaggtataactaatttagctgagttcaggcgtttcatcgaacatatggtagatgtacctttaatacatatatacacacaaaaatataacttataaaagaacaaaaaaaatgttggcaaataagcacaattaataataaacaaatacatcagcaacaaaatttttaaaaacaattttacgataccttttacctttgttggccaaagatttcccaataatttttgaagatttagaactttttcaaacctgcttcttaagaatggattttttaatagaaggaaatgaagaagatgatgaacgagtgacaactatttatataaaatttgattaaagaaaataaaaagaaagaagaaaacttggacaatttcttcaagagaagttggagatcatacacgagcaattttatgaagaggaaataccgtttatcttgtgtggaaatgattcaaacaaaaacttaaaataaaaaattaaaagagaaactaaaaatatatgagaaagtgaaagaagaacatggcagtatcaaatatataaatattatgtgtatgtgggattttggtaaataaaataaaaaatagatataaatgtttttcttgcaaaaataaaaggaaaattttatttacacccctattttttttttttttgtagaacaaaacctttcattaaacaatactaccgattacaaggaactggcaagtcacgatcaatagcgtgacaagcacaagggggagaaaccccgatccacatagctctaactttgttaaccaaagcataattggctaatacatgagctaccacattagcttccctaaatacaaaccgcaacccgccaacagaaccatgttgaagcaatctttgaatctccataataagaccatcctcctctcgacaccccaactcttcaccatgaataagtcgcaccggctgcagacaatccgtctgaacaagaaaccttggcagccagcgttgtataccagccagcaacccctcccaaatggccataagcttagccactaacggtgatcttgcaaaccgcacgacagtagcagatgcaaaccggaccattcccacttcatccctcaccaccacaccagtagactgttgggttttatgtcctaaataaaactcatttcaatataatcagattcacttattaatataaatcagaaataacatttaatgttgcatggtt

SEQ ID NO: 311257 - DNA, 2665 bp, Cannabis indica
tcaatctcatacaacaaccatattagcaaccctggcatcaactatgatagtaacccttcaataatcaggttagcaattcaatctcatacaattgatgatggattgctgtaaaggttgctatcacagttgttgtatgaggttagattactgtaagggttgttaacacaaattctgtatgagattgagttgctgtaagggttgataacacgtttattgtataagattgggttgttgcaagggttaatttttatattgttttataagattgtgttgttataagggttgctaacatgattgctttaagggttactaacgtggttgttgtatgaaattaagttgctaacatgttttctatatatgagattggattgctaaaatgttgttgtcttgtatagttttagattgttgtcttgtataatattgagttgctgtaaatattactaatatggttggtgtattagattgaaatgctatgagaattgctaacatagttattatatgatattgggttgctaacataattataaagattgggctggtgtttttcttttaaccacttgaggctagctcaagtggccatagggaggtgtgtgagtattggaggtcttgggttcgagtcccaggttaattaaatcaaaaaaaaaaaaaagattgggctggtgtaaggattgataacataattgttgtaagagttgctaacatgtggttgatatatgagattgagttgctaacatgattgttgtaagagtttctaacatgtggttgatatataagattggattgttataaaggttgctaaaataatttttgtatgagattgagttgttcaaagggttgctaattaatacgattgttttcaatatatattaatgatttttttttttcactctattaggttaatttatacattgtatattaaaatataattataaaataaaaccaaataaatcatagactcattttttacttaaatttagttcaaaatgtaccccacttattagagatggtgtaatatcacaagtcatataagaattttaaaagcccttatacggttgtactaactcattaatgttcttaattgttgtgattggtcactaatagagaaaatagacatcattggctcaacccatataaccaccaacggttttacctaactctcagttatgatagttaggatcggattattacatcaaggctataaatagccaattgctacagcaatttcagtagcaatcttgggagaatttttcaaaaaaattttgagagctagtttagtgtgcaagacaaagagagttttgagtgaagttgattgtaaatgaagctatgtttcttgagtgattgtgtcaagaatgcactgtgtatcaacattgtaattctctcttctagctcaataaagatttcaacttttggggctgttctggccgaggagtaggcaagtgattcatcatcacttgttcgaacctcataattctggttgtgtttgattctttctctctatattcttgtctataattgttcattaatcattgttaatatctggtttatagttgctggtttattcatttttgttctctggtttttgaatcaattcaaggtgcaaataaatttgttagctttattcttgattgattccttattttgttttgtgtatgaggtgcataatcaagtattgatcacatcattaattaatataaaaatgataaacaagctcataattaaggtgatcatcatcatcattgatcaaagagatcacgagcttactatttaattggcaaaataataaagggtttaaaagttatagtttatacataaataaaaaaaaaatcttaaagtatactaaaaatgtttgaaaaacgtattaatgaaaacacccctagcagatataagattattataaatttatcttttccaccgactaaggctcccaagccaggccattattggctttgggtgtggctctggtcgagaaattttatgagtggtttggctttcttcttttcctctgatggtgatcctggttcttaaggtcattttctagggtcgatgggttgtggagtcggggttggtcggcgttggtctgttatgggtggtggccatctattgtgagtggtccgactttgtgagtgtagatttggtgacctctggtagtgggtggtggtttgatcttcttcttttgggtctgaatccagtgttttggaggttcggctatttcatttggggcttggaacttccccaatcattttgggggtttgggctgcgacgacatattggttagtggtggtcgacgattggggttctattatgggcagggtggaggttgttggcttaagtggggatttggatctagaaattcttaaagagaaaatgagtgtattaggggtgttcatcaaaccgcttaaatcgcctgtaccgcatcgtaccgcaaaaaaatgcggtttgaaattttttacgttgcagtcgcagtttctaaatcgcgcggtgcggttttgaattgttaatatgcggttcaaaccacaacgcacattataaaaataccaatttttatatttatttaggtccaatatgtgaatgttcaacccaaagtccactaattattgtattattgaaacttaattttttttttcatatttattttcaagccttatggtatttttattaagtgttc

SEQ ID NO: 311258 - DNA, 1046 bp, Cannabis indica
cgttttcatcaacccagtcaaccccgagagttcaaacggagcaccaccacgattcatggcctgtgatgaccggagcaccaccattgtcgtgcacatccgagaaggagaaaaggagaaagacggaaaggtaaggggctcgagggtggaaggttagggtttgggttttaatttttctgggttcatttcgagcgtgaaggactgaaaatggctagcgttgggcttcctctctctcagtccacgcgaacgaccaggcaaacgggcaagatttttagatgcccaaacaaattggtagatctggtcgttcgggtacgtaacgtcgttggggtttgatgtttgcttttggaggatgcaacattcgacggggatggcggggtttgactttattttctctctcccggcaccaagtcgtcgccatggagcttcatctccagtgacattttctccaataaggatctttctctcactctattttgtttcatttttttgttatcccttcagatctaacagccacccttgagtgcgagaggaacaaaaaaaaaatcaatggtggtggccggtcctctcttcgcaccagccgtcctcgaccccacaaccacctcgtcgagtcgtcggtggtcctcgactacagaagaccccagtcgtacagtcacatgccttccctcaactaagattttggtgttttatcttttttctagttatgagttttaagtttttaatgtgagagataactatattgaaattttatttttaaaaaatattgtatcaaaatttgatattgttttaatgggttggtttttggtggccgattgtaaacattgggggctggaatgggggtggttagggctggctggggtcgactgggaatgttggcagttgggatgtggttggggtcgtggtggtggtgctccggtcaaactttgctggttgaaaaagatgaataagaaataaaaagaaaatatacaataaaataaatttttaattttaatatatattttttagttttttattttatttaatttttttaattaaaattattatttggacca

SEQ ID NO: 311259 - DNA, 1672 bp, Cannabis indica
ttttgaaaatttcttattttttgttacgatgttaggattaattggatttgaatcctaatcctatttgtaaatgccatttgaaattagagagagaaaagaagagaaaagacttttagccttttacttatcatttatctttttcctttaattatctaaatcttccttaatcttaatagcattaggatttcatgttaccttttaaatttgtattcatattcctatttgtataggaatttagaaattagcttgacaagagaagggaaaagatataattatatcttttactggtcatttatctcttccttaaaagctttaaatttaaaagactcccattagctttaggattaaaagattgaactcgcatgtaaataagtgagttgacaatcaaattttcacactttctcattctctcccacatgcctatagccttttagagagaactttggaatctcatcttcataaagctttcaataattcttcattccaaggtagataaagcactttcttttttctttttctttttcctttttttcaccagtttttttttattattttttcttcttctcctcctttgttgaacttattccaaagacttttttgactcccaaaaaaacctttgaaacacttcttccaagatctccaaaaattcaaaacaatctcgtagaaccttgaaaaattcctcccaagttactttgactttttcaacctaattttgatttttcttgagttgtaagcaacttgtgttgttgagcttgaaatggctaaaatgaagagaagtagaaggttacctaatcagtatgacccccatgtagctcagttcattaaagctaagctaattgtgcataagtctaagaacttggacaaggcgcgtggtgggaaggtgatggcaactgaacttctcaaagctgccattgagagtgatgatccaagagatccagcctttaggcttaggcctcttgtttagtactctcaatgaacattaagctcaattaatacaggatgattactgtttccctgaaacttgtaacaccctattgcttaggtacgctacaatgattttctacttactgtgcacacctttgctaataaaaggatttcttgaaaatcgtgtcaaattaaaattttttcattaataaatatatattccaacattaaagtcaggatctcatccttaaaatttacaacaaattaaaatacacttgataaacatgttgcacaacaactacaaaatgaaggccgaagtcgtcctgtgaccaaactctccaagcataaccatattgatatgtacaatcatccacaagctctagactcattggtgctcagtcttagccttttctttaccgacacatgcaaacattatctatgagtcaatagactcagtaataaaaacatataacatataacatataacataataccgacttgtatttaggcactcatatacctatttataaggcttaacaaataatcatgaaggttcttaacaaaagtacgatctatgtaccacatgcactaagtactcgtcctgtactagtgttggtagggatgaactataccccgagtaccactgagtgttgtaccatatactgttgggttttatgccctaaataaaactcatttcaatataatcagacttacttattaatatagatcagaaataacatttaatgtt

SEQ ID NO: 311260 - DNA, 477 bp, Cannabis indica
gaaatttggcaatgccaaagaacgtatcattcaattaattaatgatttgggtgtttatgagcatgatttttgattaagaatctaattttcaaagtctctcactgatcgagcatactcttggtatacgagtttgccatcatggagtagttggaacaacatggtcgctcaattttatgcaacgttctttatgattgaagataaatggagcatagctaacttattaggagaaagaaaaatctttggagaagactcgttaatttcgctcaaaagttttaggaaaaagctcttgattgtgctgataccatggttgaaaaggatctggtcaaaatgtgtatcaaaagaatgttacatgaatatcacttacacattgaaaaccatgccatatacaattttgcaaagcttatagctaaatcaagaaatactaaagccactattttctgtttgaccaagtcgtccaactaaaatgaccaaacacat

SEQ ID NO: 311261 - DNA, 1260 bp, Cannabis indica
gagtctaatcaaaactgattcccaggcgcttcccagttatgcaatgagtgtgtttcttcttccgatcgatattggaaggaacatggaacaacgtatggcaaagttttggtggaaaactttcaataccaaagacaagagtattcattggatgtcgtgggaaagattgagcaggcacaagagtgtcgggggtatgggatttcgtaatctctgtcatcaaaatttatctctccttggtaagcaaggttggcgttttctcacccgtccaacttttctggccactagaatttttaaggcaatgtattttcctcaaggcacctatctcacagctcaacttggtcacaacccgagcttcgtttggcgtagcatttgggaggctcaaagtgtggtatctaatggagtgtgttggaaagtaggcgatgacaagactgtgactgtgttgggggaccgttggcttccagatgagaataatccttgtgttacatcctctcatccgacccttaatggtattttggttgaaaatctcttacaagttgatggtcttgattgggatatggagattgtgaatgatctgttcaatgctagagacaaagcactcatctgtggcataccgatccatgctaatgcagggccagattccttttattggtctcttgaggttttgggtgagtacactatcaagagtgcattcaatttgttgcaaaaaatgaatgactcttggaaccatgtggctgtttcaagttttaaaacaacctatggagattaaaagtcccacccaaatgtaagaacctggtgtggagaggagggtcttactatctccttacgatggtaatgttactaacgaaaaaggttgttgttagtagcctctgtccgatttgcaactaccatgatgaaaccatcctccatgcgcttgtcacatgtcctatggcattggcttgttggacaaaagctggtgttaatacgacaatcacagcttgtatggatttcttggaatggtgctctgctacattcgattcatcctcaaacaaaacccaatgtctggttgctgttctctgctgggccatttggaaagctcgaaatgataaagtgtggaataacaagatgcctaatgcttttgctactgttgcttttgccgttacttaccttggtcaatggaagaccgctcaaactcctgtggagccatctcagctggctgctggtgatggggccgagcggtggagcccccccgtatcaaatggtatcaaggttaatgtcgatgcttca

SEQ ID NO: 311262 - DNA, 1140 bp, Cannabis indica
caatggaacaattgttaattagacatggttcatttagcttaatttatctcttccatttcgattctttagtgttgagctggtgcactttatattctcgaccactcaacaagtacaacaattactacactattaatctaagcctatcagagtgaatgcagtctgtagagtccttgatctattgaaaaaatctgcctgactatttattatatagaaaagtattataaaagtcttgctatgctattagactggctaaggtgtcacgtccacaaatgatgatgacttatacaaggaaaagtgaaatagtatttcatataccacgtaccctttatgacaaaacactcccattatttttttctattctattctttaaaatgtattactaaatttttgctttttttatctcaaaatttttacatcacaacatacattaacgtcttattaatttttttttatattatttaaatattatatattgacaattttgattaaatatgcatctattagattaaaattaactatctaaattatagttaatatgtataagttgtgtgctaatttttcagtatacccaaaaaagaaactctctttctactctccattttcccatcgctctgtgatctgtttccttctctcccaaccgaccaccacaaaccaccccaaaattcaccaattgcaccaccgcaccactacacatgatcctccctctctctggtgtgcgaccaacgaccgacgactctccctttctttctggttctccctagtgcgtgttcgacaacccaagaccaacgaccgccactagaacatacaaacgaacaatctgtggttttttttagtattttttgtttatcgtttggtaaaaaatcgagttttgatgaaatctgcattttttatgattttttttgtttatggtccgatatgatgcaatggtaggtacgatagtagtgtaacctgcaggttagggatgaaggttcgataattgtctaatggtggtacgatgattgataaaatgcacaatatggtccgatagtagtccaataggtacttaaaatttatgttataaaagaagggaaacttacaaaaatactatttttttactaaatgttttcaaaaatactgggatacggcaaactttacattttt

SEQ ID NO: 311263 - DNA, 1632 bp, Cannabis indica
ggtgaaggaggccccaaaaatatgaaaaaaaaaacaaataagatgtttttgacctttgatgatgatctaacttgaaaattagctcttggtagtgatggccatttttcagagctcggcgggcctcgttgcgggtaacctagaactattttcgtaactcttttgggagtgaattttgacgacaatagcttcagaattatgtctaccgtgtgatacatgatttgatagaaaattgaattagctacgaaacacaagttgagtcgcatcaatcagatcaaaattgaatgaggtatggctattttactgaagacagttcatgacccaatgccgagttgacatctagcgcccaggatgacatcccaatgcccaagttgacgtctgttgacatatgatgttaactttgatgttgggtaagtgtaaaaatgtctaatgaatgtactttaaaaactagacagacgatcgaaacaacatcagatttggataagcagaacccaacacaccaagccttttgtcaacctatgcactgggtacttaatcccgagctcccaagattttgtttttgaactttcaaggcttctgaacttgaggacgagctcttttatcttgtttttgactattctagatttaatggtcgcatcagatttggcatttgagtaattgaaggcagcgtcctaggttaattatcaattgggcgtggggccctttttccaggagcttgagattgttattttctccccaagttttcttgaatcatcattatttctgatgacagataaaaatacctaggacactttttgttcaagttgatcagaaatagcccaagttgacaatatgtcaattgggcgctaggcctagccttaagcgttaacctcggcgatgggttccccttttgccccccaaaaaattccgtttggtccccaaaaataattgaatctcaatattttcttaaaatgaagaaaatgctcgaaacagattcttgaaaaattccatttgaaatggctcaggttgataaaatgtcaacctgggcgctgggccctaatttttgtacccaagaattgatgtttttcctctaaaatgacctatttccttatttttgatgatcacaaagaagatgcaaaggttgaatctctaatctaatacttggaaggtgcccagattgacagattctcaacttgggcggtgagtgcttggggctgcgggtgctaaaaaatcaacttgctccgatgttaattctgatgcctcaaatatgtttgtggtatgtctagttgatgtctcaatgcaagttttgacccttttgcactaagacgatcccagaaactaaaaccctggttgagaatgtcaacttgggcgatgggtgaaaaccctatgtgcctaagttggcttatggatcgcatgtttgtgttattgtagctcttcgggcttagattaggttgatccatgttttcatagtacaaaatactaaaagataatgggttggattcaagttattgaagtcaacaggtgttggtaaaatatattccaacacaatgtacaactatctttctttccaaatatagactggggacatgccaggatacacgttgatccatatctggctattgtgtgttccttggccaagctcttgtctcatgaaaa

SEQ ID NO: 311264 - DNA, 1764 bp, Cannabis indica
acctctataaaaatcattgtcttcttttaatttctaattctaattgtgtaacacgtgtcaagcatcaatatcaattcgactccgttgtcagttggccaatttttgaggtcaatagtgggtgttttgcctcatggccaaggacacacattcttgggtgtccactaaatcgatatactgagcatactgtgaggttaacctttctttttcctcttgttctctatttgcgtactttgttttgaagatctcttactctaggagctctgaggaacatctgctacacttgctgctggaggcgcatattgagagggatattgcaaacctactttgggagctaagttacccctagtgctccaaaattggattgagtcggggtagaagcaaggttgtaggtgtatcctggtattgttgaaaattacacattaggcgatctgcttgcttacgacacaactagaagggtaattctaagaaactgcactttgggagcatattctggaccaccaataggataatatcctccaaaagcagtcatttgtgcttcctctaaattgatgtatttttgggccctcttttggaagtcctaaaggctagcggctccttgttgctggagctcattccaaaaaggggttcatgttcgaattccaacttgtagtaatgcaaattgttgtccatcatctaccttcttagtattagaagctttttccttaaatctcttaatgaaattttttagagtttcaactagtagttgcttgatgttggtcaaagcactgacttcaaggtttatctttttggcagccacaaactatcttgtaaagctaacttacaacttgttccaactgtccacggatccaggttctaactttctaaaccactcctcagcggatcctcctaatgtcagtaggaaacacaaacactttgcgtcattgcaaactctcatgactgtcgtcatgcagttaaactgggataagtggtcactggggtctgagtctcctacgtacagtgtcatttcaagcattttgaaattctttgggagctccgtttcaaggatgtttctagcacatggttctcgatcctcacaattagactctgaatcatctcccctttgtctttaggagactttggttatatctttcttaaggatggcaagttcgaccaagatccccttattacgggcactttccaagactggtattgcttgtttctttaagatcatcatgtttggcattgagtttacgtctcaaattgataggaggatctttgtcattttcccccttctctcccacgtctcctggtgcacggatacgctttttcgatctccccaatcctgaggtccaacatttccctttggaaacttgcccctttgcgaactttttcctctagggagatagaagcaaactttttgcaaatcttgagccttcttgttcttttcaggaatggtcgttggttttgcctttgaggagcattctgaagggtaccgtatagggcttatctctcgatttttatgcctcagattatctggcagtagagattcctctcttattttgtcttgcctagtgggtcctgcacttggatgcacacggatgcatgcactttccatcactttttgcatggggatcaatatttcttgcatcctcctgttctgctccttttgctatgccaactcggttttatggtcagcgacattctgtcttaacgccataagtttggtgtaactaactgttgggttttatgccctaaataaaactctttacaatctaattagttatc

SEQ ID NO: 311265 - DNA, 2052 bp, Cannabis indica
gctagagaaaaatttactttctttactaaaaaaatattggtttagatgaaatagtataaaaaaaactgataaaaaaattattaaattttttctcttgttacatagaatggtatttcattcttttttaaaatagaatagtcattctatcaaaatggtggaaagaacattctattggaatgctattccatttcattccttctaaccaaataccaacttaatatttttatatataaaacctaaaattgtcaactatttaagtattttttaaggaaatgtaaaattttatgtggatgtgagataaaataaaaaaaataatactttgaaatgatgtatacactttacaattataaatgataattctaatatttcactagctggcacgtttattgcttaaaaagtatttatccattactagaagacaatactacccagaattgttttcacatttttttcagtaaaaaccacacgaaatatacccaaaattttgctcacttgtttttttgatttttttttttaaataaaaaatgtaaacgtacatgttttatgtatgcactataatattataatatttctaattaagtatgaaaatagtgatataatattgttgtgttttaacatttctaaaaactaaaattcaaataatttaacacaacagaacatcaaatgtatatttttaaattacaatttgtcatttaaaaaaattacagtttgtcattaatcattaataatagactttaatatacatattaaattataatattgctactaattatttttaaaaatatatatatttttaatgatcattaataatattttacttttgtatatactcatttatatcttaaaaaaaatattattgtatacatattataacaaatataacatttattcatttgccaatttagctctatatttaaattaagatggcatgataaatatttttgactaattgatcgataataggttggaggttgaattgacttatggaccagaactttaaggtgttcctatgactggctatgattgttatcacactgattattttaaaaggaaatgcatgttcactcctcatgcaacttgctcgacgatctctgtttactacaattcctaacctgaatatgggggacccttcacatccaagacaaagactccacaagttggatcatcacttggtacgtactacaagatacagtgttaatctaacaattggatccactagaccactccacaatcaccatcacactgatcaaagaaacttctaattcgaaccataactttaaaattggagttataagttctaccaattctgctcaaattcaaccagcagttgtagcaaagccagcttcttctctctcccaaaagcacattggaacacttcctacgacaccactcttcgtgcaacaagttaattaataatgataatacatcagtaacaccaccatacccataatccaaatgatgtcttgtttgcaccagcaaagctaccaacatgcatgatattaatggagagtacttctctaatgtggtggctacatatatactctcagcccacgccttcaagcttttctatgctaattagtcgtggacaaagctacatgtccttcatacaaccattgctgcgtgtaacgtgcgtgctaagatggcacgttacaagctaagtgatgcccacaaattggccaagtggtggtcaagtggtggcgcatgttgtggtgcatgctggtggcatgctgatgcttagtttgtatgcagtgtcattttcgtaaatatcttcaatattgtccggaacgggacggaatgggacttggtattcgccatttatttgggtctacaaatagaatggtgcaatcggtttggcaaaactatgtgatttggtttacagtttggccgtatgtctacagagccaaaatcatgtatgttcctggtagaaggcaaaaagctcagaatgctctttaagggggtaccctggtgtcagctctccaccatcccttgtaccttggtgctaagtgagctattactagtcagtggggctagtagggcgggcatatgaggacc

SEQ ID NO: 311266 - DNA, 1578 bp, Cannabis indica
aaaataatttccaacagatgttgcctattagaggcatacggccctctggcttgataaccccccagatcaggatttggttggctgttagcccaactttcagcttcatcatcaccatgatcgtcggggtagtttgaacggtagtcactgttgacctcagggtcttctcttctccccctagacctactatttcttgggcgatcatcgccatctcgtggttggctgcgttaatcgcggggttgccactccctacgttggggcgtccttccaccattttttccacgatcaccattgtggttcctagagtttcctccaccactccgccttagacagacattgtgggagtcatcacatcccatatgatgactgggtagaacttgctaatcggccgagagcggtcgattattattgcggggaaccctattagaggagtgactccaagccctttctttgttcctttggcgctcttcaggtccatagaccaccctctccctctagttcctcggggtagggacctcctgaggatatgtttttggtatctgttgattgtgggcatcagtacccaacacttgagtattttggttgaagtagcttcatattaagttgacaacctcttggtgcgacgatcctggtcgtcttggcacctcctcatctcacgagcataatcttccagccaagattggaattctgaccgaccagccttgtcgaaggttgtctagcctagccgaccatccttgccgaaggctgtccagcctatggaagttggcaatcctagccaaccaactatacgtccggccaaggctttgctagcaggtatgtggatctgtctttgcttatgtccaccgtgcagccatgagatcttgcaggttgaaagttgcactcactaacctggtaggttgaaggctgcacgcactaacctggcaggttgaaggctagacgcactaaccttgcaagcactaacctggcagtctgaaggctacatgcattaacctggcaggttgaaagttgcaggcactaacctggcaggttgaaggttgcacgtactaatctgataggttgaatgctgcacagactaacctggcaggttgaagactatacacactagcctagtagtttgtaggcactaacctagcagcctgaaagctgcatgcactaacatggcaggttgaagactgcaagcactaacctgacaggttgaaggctgcaagcactaacctcacaggttgaaggctacaggaactaacctgacagcccgaaggctttagtcactaacctggcggctgcatgcactaacttggcaggttgtaggcactaatctggcaggttggcaagctgtaggcattaacttggcaggttagtgacgagttgttctccacgtgtcttttgcttttgattatgtggacataccacgttaggtggataaaatttgagataatagtgagtaccctatttttgtacctatagcataaagatattttttaaaccgttgatagagatgacttttggggttcgtttggtacgccgtattataccatattgtattgcatagtattatattgaattgtattttatgcaatattt

SEQ ID NO: 311267 - DNA, 1133 bp, Cannabis indica
ctccacatattactattaagttataagtaattatcgatcagtgacaaaaaatactgacaaatagtctcttacatatacacattcacagttttacattttttagttacaattaagttgcatgttagttggctcgcaacaaacataacggttgcattacagtttcaacaacaacccacgatctatgcttcctgggattgaaacctttgtctaatgcaactttcggtcaaccaccgagcaacctttgtctgatgcaaccttcggtcaaccacccagcaaatttcgtctaattaaaaactttgtctgatgcaaccttcggcccaccacccagcaaccttcgtctaattaaattttttgtctgatacaacctttggccaccactcagccactatcgtctgattgtgtaaatgatagtgtaagaggtattttgataattaaaagcacataaaatatataaatattattcacaccttatagaggtatttttataaataaagcatcaatttgtattttctatgtaataatttctttataatatctatatattattgtgtgtatactattattattattattattattattattattattattattattattattattattatatattgtagcattctcttgatattctcatatttatacactagctatatattgtcatgatgtggagccatataaaaaaaattagctagaaattcatatttttttctcaccttttgtgggctccattgtctatgcttatccagctactcttcatgatgatcaagctaattaggagagttgaaatggctttctataaagatagtattatctttattctattttgtgatggttttagattgttttaattatttttatactaatactaaattaaaatcaattaattaaaaaaattaataatcaatgacttatagtattctaaaacaaaaacaattcatatgatagttgtaatattataacatatgtattaactatttgtattctaccattaaaaaaactatttctattatttgtatttatttatgagatttttcatcatcatcaaaatttttcatcatttttgccataaccttgctccatcacactaattatatgctaatacgagtgatattagagctcacata

SEQ ID NO: 311268 - DNA, 1296 bp, Cannabis indica
ccaggacaaaacccgaacccgaacccaaaattagacccgaacttgggatccgaactcagacccaaacctagacctacacccggacccgaactcgaacccagactaggatcggaaccaaagacttagactcagaaaaaaacctggactcagacagagatcgaaacttgggacttagacccgaatctagccccaaacccaggaccctatcctacacctagagcccgatccaaacctagaccgagattaagaccctaacccaaactcagaccagtactcaaaccctgacccaaactcaaaatcagaatcgcaactggacctagaatcagactaggactaggacaaggagcaggacccagagccgtacccgtacccaaacccaaataaaaatctagaccgagaccaaaacccgaactgtgactaagacccaaacccgaaccgcgactaagacccaaaaccgaacctagagcgggacccaaactcaaaccagaaccgagacctgggaccagaatcgggataaggacttgggcaacagatttaggattgggacccaagacttgaccccagacccggacttgaacctaagacccaactcatgacccagcacccgaaatgaaatcagatcgaacccaagatcaggatctagatctagcttggaccgaagtagtcggtttccagatctgggacccagtcccagaccgtaacccagaccagagcccgaacccagacccagacccgaacccagccctagacacaaacctggacccgaacccataccttgtgaccagaaattggaactgaaaccagaagtagatcgggacccaggaataggagcggaaccaggacttggacctggatctggagccgtaactagacctggacctagacttggaaccgtaactgaacccagacctagacccgaaccgcgaccaggacccggatcccaacccacatctcgactcgattctaaacatggagtcaaactcagacctaaacatagaaccagactcgggacacagaactagagttgggacctagaaccgcacccaagtctcgatcccgaacccaaacttggacctaggaccccagacctgaaccagaaccagaccgagtacgtgatagggatccagatatgggactcagaccaagacccaaacctggaccctgagctagacctacgacctgaaactagaacctgaataagaaccgtcagaccaagacccttgaacaagactaggaccgtgaaacaaacttggacttaaacctagaaccgaactcggacctagccctagacccaaa

SEQ ID NO: 311269 - DNA, 1606 bp, Cannabis indica
attacattgaaatgggttttatttagggcataaaatcccaatagttcctgtcccagatgaggagaaagctcgggatcgcgtagctcggtcatagaaccttcaaaacactgctccgggaagccaatgaaggagcatcccgaggtaatcaatgtggttggtcacccacactacttagggttgagcgtaacactctagttacattccgagatagccgctttaacttttatatttggcatcccctccttgtagatctcataactcataggtttggtagttggtatcccagattccatgtccaaattacctgtaatgagtcgtactacggtataaacgagcaatatggtaccatgacaaatagggcaagtcacctagatgcgagctgggatttagaactagttgatccctttgatatattcaagatcacgggttgtagggattttagcggatactatggtccttctaccccatcttctagtgactatggtaaatttcttaggtggaacattatgccctaaactccccttttacttgtctgtaattaatgctaacacttttaaattgtctcgtagaaatgcatttcaagggtctcatgcagagcaaagggaagaagagggtgaccacctcgtaggctccttctgatgccgaagtggaacccctcaaaaggcaaagaaaaaccactgccaataagaagaaagcctcctagcctgttaacctcgagatccctgagactgaaactcaagatccaattcctccctcattctccgcaagtaccaacgagcatgctccaagtgtgaacctcacttctccctcttcgagctaacccctcgagtctcttcctatcgacgccaatagtctcgattcgaaattcactgcagaatttggtgcagcctgctggcgtcacttcaaatccttccttccccatgaatgggatttgacctgtaatggggatttggagaacatgctcgagaggagtgttgctcatggcctctcagtaaactttgtttcctttctcttcttatttttccttttaacgattttcaaatttgctaatacattcactatctgttcttagcaaactttcttcgcatttatcgtccaacggcgtggcctggacaagctgaagtacctggaaggcgaggttcaaaaattgataggtctacacgaggttgtgtccaaacaatggaacgatgccaagttagagaatacccgcctcaccaaggatgctgagaaagttaaaatgaaccttgaggccaagcttgaagctgccaaaaaggaagaaaaggacaaggctgaggaatgcaagaatcttgaagaggaacttaatgttgccaaggtgatactcaaagggaaatagaccaaaacccaagaatgatgcaacaacattggcctccgttccctttattgtgcttgcatggaaatcggactatggatacaagttttctagaggaggaagaagaggaaattcttgcttattgcgagaagaccaggaaggaggaggaagaggtcgaggcagcagaagaagaaaaaccatccaagtctcctactatgtaggtttggtttttatttatttattttttgtttaggaaaatggccctagggccgagac

SEQ ID NO: 311270 - DNA, 1584 bp, Cannabis indica
tttagtattctcgacggtttaaagcagtaggtaacaaaataggtgacagttttattataaaacgtgaatttttaggcgggcctatacccggcggtttaaaatcattagctatactatacctgacggttttaaaccgtcgggtatgggtataagtagtccaaaccggttttcccatctaaccccgcaatctctcacacataactcataacttaacctcataaaagaaaacccctaaccagtgcggctgacagggacaaaatctctctccgccaccggttttcccaccttcaaaacttcgaaacccaccattgtttgaaacccaccaccacgaaatccaccaccgtccaaaacccaccaccacccctcaaaacccacgagcaaccttcgaaacccacgagcaaaccgtccactggtcccctccgtctccgtctcttctccatctgccatcgaccatcgaatgtccaccggtcccctcctcaaggtatagatatatatttattatatttttaaatctgaacatatatttatgcatttatatttatttatttatttatttattttttaaaattgaatatatttttctttatttttatatatatatttttttgctgaatatatataaattatgtgttttaaagttagttattattgtaaaagatttaatgagtaaaatatatttagaaaaataaaattaaaatagaaaaaaaaaacaagtgtaggtgtaaaaagtttatttattccaattgttattgaaaaaattaattagttattttaatttaggttaggtaaaattataaattgttgttaataagactatatataaatgcataaatttaggtaaaaaaatattttggaattagtttagtatagttagggaaagatttaactgtttcagattgttaattttaattatgtttaggtattagtgtgatgttgttcgagtaagcttttaatttaatattttaaatattttatagatttcaggttctttgtgttgattgaagattgcacataccacccttagcagtaagtatagttgctggctagttttgcttgtgatgtataacttgccgccttggttggtaatgaagaggaagttcactatgcttacactgttaatatcaggcccttcacagcctagtaatgacattgatgtgtacttagcccctctagttgatgatttgagtgaattgtggtatggggtgttcctgcatacgatgtcttttagaaagaagaattcaatcttaaagccatattacagtggaccattaatgattttttagctttcaaaaatctatagggatacaatgtgaaagggtacaaagcatgtcctatttgtgaggagaaaacatgttgtatgtatttaaaatactcaaagaaaatgtgttatatgggacactgaaagtttttgccaaaagagcatctgttttggacttggaaaaaagtatttgacggtaaacaagaatttgaattgtcaccgccacctttgcaaggggaacaagtgttagaaaagttaaataaagttcaatttcaccttggaaagcaaaaaagcgaatccaaagaaaagaaaaggtcaccgtgaga

SEQ ID NO: 311271 - DNA, 615 bp, Cannabis indica
acattaatgcatattaaattaaagtattttttttctaatacttattatttatatttttagttttttaataattaaagtaaaagtgtgaaaggtataatttaatttacatttattatcaattaccatttatcgggtcacttatttcactaaaaattgaatagaatataatagaaagatcacgttactataaaaattatattcttataaaaaattatactataagggacacaacttgaacttagtaacataaaaaattcaggagagaaaagatgatgaatttgaatggagtttagtacttaatatttatttattatatataccagtagataaatagctgaggcaatgagaaaagtggtgtatcgaccaagataagcatcagcaatgtaagcacccaaaataggtgtcatccaaacagtgccagcccagtttgtgacattatttgaagatgtaacagtcccttcatgcaacttatttgttaagtacaacactagatttgttgagatcccataatatgccatcctctcaaacacttcataacctaattcatataacataacatgttaaaatctaatacaacctcaacactcctacgataaacaaataaattaaagccat

SEQ ID NO: 311272 - DNA, 528 bp, Cannabis indica
gtgctttacatccaatcatcctgaataatgtttgtatcgtcagtattattgctgctgctggtacagagttagcagacccttattccccaaataccatcattacttctctaagaacaaaagtttacaacccataggccttctacctccacacaatattatttcgtcaggcttttgccctacgaaaaaatttcccgaagttgtctcttataagagtttgggctgtgttttagtcccagtgtggttgatcattcttttgtacaaaactattgattattagtgatgtaaacacgggctgaactttttgatacaacacgaaatcggcacgatcccagaatgcacaagtacgattaggcacaaaaaatgacagccttgggcacgacacaacacgaaaaatatgtcttttaagtacgacacgatatgagaagcacgaaaggcacgacacgtaatcacgaatagactagctcaaaaagtacgacacgtgacaagcttaaaaagcacggaacgacatattaaaaaaccttataattt

SEQ ID NO: 311273 - DNA, 1333 bp, Cannabis indica
attgttcatccaccaatcagtaagatacaacagtagaaaactgttgcagtaattttcattcaacctcgtagcttaatcactcaattattggttaaggtatattactgcactgctaacaaccttctcaagtcgtagaaaacttgttattcccagccactaacaatgatttgatggcgagtcaattgaagaacaaagaagaaccaacaacgaaattaaataaaataaaaatcatgtcacacagacaagactaaaacactcaaaattgtatcacatatacaaaattaatcacaataacaaaatcaaaattgtagtagcaaaatacaatcccgaccaagccgtatctaagccttaaaaaagctagctggtaaaaaaaaagaaaaaaagacaacatttaaaagctataaattgatataaaatttaaaagggatcattaattgattttttaatttattgattttttagaaagtacttatttttattttaagttacacacatagcattgatataataatattataaatatccacattattattttgtttatcacgtgtgacaaacttgacaaaagaattaatttataacaatgtgaatagtttagagactatatataacacacatgggcataataataaataggtgatgagggcaaaaattctaaatatcattcatataaacatggtttttgtcggggataattgatttacacatacccaatcccaaaccgacaaactcttatttaaaagaaaaaatggttaacatataaataaaggtaatttacagctaaactttctcgacttgtaagtttggtacgatctaatcttcatattggaaaaattatagctagctaaagtccccaacttctacaatcgttttggtcagcactcattccattagtttttgactgttaagtgccaaataaacttgtacacacaagtgtacgcatggggaaattttattgggcacctgatattgataattaaaaaaaataaaaaaataatttaaaaatatgaaatataaataaaaattaaaaataaattaaaatgttaaaaagaaaataaataatttttttctattttttttcatctttcttccttcctgttctcagtagggctgtacaaaaaaatttgtaaaccgcctaaaccgaataacccgcccaaaccgaaccgaaaaaatcgataaaaattacaaaccgaaataacccgaaaaaattacaaaccgcccaatctgttaattgggcgggttgaaaataggtccaacccgcccaattaaaccgaccaacccgaccaacccgattttgcactttatttttttttttaaactttttagtttttat

SEQ ID NO: 311274 - DNA, 1691 bp, Cannabis indica
ttttttttttgagaaattagtttaaatacgtattaattgtattcttcttctttcggtaaacaaatatgttgcactctcatttttttaatctgtaactatgttatacgtcacgtaaaaaaaaaaagacattatttatcataatttttttaaaaaataaattataacttttaataaatatgtatttcattaaatattattctaaaaaatgttatataatttgtatgtgataaattaaattaattgaattttagacgtaataaatttaaattcaaataatatttttttttaattcatgtgttttaaaataatatattttgttattttattatttaattaaaaaaatataaatattaaattacttaaataatatttatttgttattttattattttaataattaaaaatataaatattaaattaataactggtttgtaagactataagtgcctttgaattttaataataaaataaaagaagaaatactatgggtaatatatatattgaacgtacaataatttttttagtgaaaaaataagatgtaaatgatctaatgtaaaaagataagagttaaaagaaaactattgcagctttcaaaattacctatcaaaaagataatatatttaaattaatgaaatgaaacaaccaaagctaattaattttatgagagccacttggtaataaattaatgatttcttatgacgggttaaatgggaaaatgtacagttttatttactaagggtgatttgatagtaatagaccaggtaaatcatgaactttcgatatatggaatgaattattttgagagatgactcgaacactactgcagcctatttttcttttctttcttttctgtcaatattggaaacgggaattttgatttacatttctttttaaaaagcatctatctatgataagatattaataggctaaagtctaagctttaatcacaattcacattccttaaaatataaataaaagattccaatcgaataagaaagctaatatatggggtccaaaccaaacaaaaaacaattataggtaataatatatcactatgtttaatagcgacacttccacaaatgagtgagtgaaaaatcaagagggtgttatgttgggaatcctcgggacgatatctatatttatattaatatgatattatccgttttgatttaaattctcacggttttatttttctagcacattctcaaaaaatatcatactaataaataaagagagaaatttatactacgagaatagttaatatattgtgggaacccacccttaatggggtggggattccccgtcttagtggttaatggggcagtggtgggggacaattttgatacccaaaacggggatggggcgggagcaagaaaaatattatccgcactatatccgacctcaatatagatatatagtttcctttttattgttaacgtatatataatatatatatatattattgataatcaaaattattttgattatcatccataatcaaaattatatattgtatgcttaaattatgaagattcaatgccgatagtgaattggtgattattgtagattacaagtgctaaagtattttcttctcgattcttagtttcatctttgttttacatttttaatttgttttagtagactttgagaggtatgagattatgatactaatacttgggttattgattttt

SEQ ID NO: 311275 - DNA, 5891 bp, Cannabis indica
ccgaattttggatttttatataaaaaaaaatcgaccaaaccgaccgatgctcacccctagcaagaaacaagaccccctttcttgaaggtacttttcctcagcccctgataatgatccccttctggatttttggattcgttgtaatcagctggtaatgtcatggatactacactcggtttctcctgaaatcatgagtagtatcatgtattttgatactgcatctgaaatgtggactgtgttaaacaatcggtttaacaaaggaaatagtccatgcatttttgaactaaatgaaacactaacctatctcaatcaaagagatgattctattagtccatacttcacaaaactcacagctacgtgggacaagatcaacaaattaaggcctcgaattccaagcacgtgtgctgctgttgcacaacacttggatcatcaaaatcatgatcaagtgcttcaatttctaaagggtctgaatgactcatacaaggttgtgcgtgatcaaatcttacttcttgatccatgtcctcctctgaataaagtcttttaaaaggtaatcaaccaagaaagacaaagatcactaggccatcgcatgattcccccaatggctgcctcaagttcttctactcctcaacaacctgcccctatagcaattgcagcatccaaaaataagaggccaagacctcactatacaaatttccaaaaacctggtcattacaaggataaatctacttcctaattgggtttccccctagctatggcactcgaaaaccagctgactccaccaacaagtcacttcatctacacctgatctttccaactcacaactcacaccagctcattgccaacaacttatttcaatgttggcacaacaattgcagcccacaaattcatcaacatctactgacaaggctgttgtgaacaatttttcaggtatctctaaccctttctcatggattatagatagtggtgccacacaccatgtgtgttgcaatcttgattgtttttcttccattcaatatactcctacttgtttttctgttcaattacatactggtgcaaaatttaacattcatacgattggcactattactattaactcacacataacactcaccaatgttttgtttgtgcctgacttcaaatataacctactttttatcagtgcactcacacataacaccaaatccacaattttgttcaatactaacggctactatatccagtacccttctctaacatcgaggattgggatagctaaaagacttggcaacctttactacctgcaacaaaccaatcttgaggataatatttcagtacaaacttgtaatgttcacttgaataatatccaatggcatacacgtcttggacatccttcgataatgatttcaaataaactcaataagcaattacaagttcctgtaatttcaattccttttaattgtcatacttgtcatatttcaaagcaaaagaaattaccattctaatcaagcaataacattgcctcgactatctttgatcttgtccatatggacatttgggggccataatctattacctctattgaaggttataaatatttgttaaccatattggatgatcactcaagacacatttgattatattttttaaaagtaaagtcagatgccattttggcaataaagaatttttttcaattcataaacactcaatataaaacaaacatcaaagcaattcgtaccaacaatgctaaagaactcactctcactactttctatgctacaaagggagtaatacattacacttcatgtgtagggagaccacaaaaaaatgttgtggttgaaagaaaacatcagcacatactcaatgttgctcgagctcttgcattctaatccaatttaccttgcaatattggtgtttcatggtatctactgctgtctaccttttaaataggaccccatctgtcctactaaaagataacacatcctaccaactactccataacaaaccacctcaatattctcaccttcgaaactttggttgtctagcatacgcctcacatgttaccacaacaaccaagttctcccctcgagctagagcacgtgccttcattggttaccctcccaacatgaaggcctacactctcctagaccttcaaaccatgaaaatattccattcaagagatgttctcttctatgaaaatatttatccatttggcaaagtctctcaaacacaccacatagaaatttttttcctaaacattactgagactcatccatctcaaacatatcaaattccaccaattaacactgagaccagtccgttgcataatcaaggcaaacaacaatctcaacctaatgtctctgaggcaagttcatcacaccaattccccattactgaactccatcaccctcagcacacagattcaacccaccaaaatggaaaatcatgcactaccaaatcaggccgtgtacaacaaaatccagcttatctacacgattattagtgtgacttagtgacaacaaaaaatagttagaccatcccttcattaactatttatcataccacaaattctcacgagaatttcgagcggctattctatccctaagcttaatacttgaacccacatcttacaaacaagcttccaaatacaaaatctagaaccatgctatggatgtcaaaatcgatgccctcaaaaaaaatcatacttggattgtcgttccattaccaccaaaccagcatgtgagtggcaataaatgggtatacaaaaagaaactcaaccccgatggctctatccaacgttgctaagcacgtttagtcaccaaaggttacacacaattacctggtatcgactgcttcgatacctatgccctagtggctatattcaataccttaaaactcatcttttccttagtttccatccatgaatagcacttacatcacatggatataaacattgtgtttctacatggggacttgaatgaagaagtttacatgaaacttctccaaggttacaaacccaaactccctattccatataatgttgtctgcaaattacagaaaagcatatatggtctcaaacaaacctcacaccaatggtatgctaaattgagttccgcagtgatacaacaaaatttcactcaacggaaataataaatcaaagtagattagcatacatatattatatgtagaaacatataactagtattatatgtataaacatatagcaagatgaataagctcatttatttacacttttatttacatttctatatacttaatattatctagtttatatattatttaatattgaccactctctgttcataagacaccaatcaggtatttttatggctttacttatatacgttgatgatattgttgtagccaccaacaacacaactaaattacaaaaattcatcaccacactcgataccaggttcaaattaaaagaccttggtccccttcgtttttttcttggtctcgagatagctcgttgttcaaaaggcatatccgtctcacagagacccttcacccatacaactcttgccagattcaagttgcttggctcaaaacagccttccacccccatggaaccaaacaacaaactcagtaatgacacaggggaatcgcttccaaacccaacacaatataggagtcttatagggaagctcctttacttgacaatcacacggcctgacatcagccttgccgtgaacaaactcagtcagtatctccaatccccatgactccctcacatgcaagctgtaactagaatcctgcactacctaaagaactatccaggataaggccttttcttctatgcttcctcaacaaaataaatccaactataagcctttgcagacgctgattggggagcatgcctcgatacaagatgatccataacatgctgctgtgtcttccttggccaatcactcatctcctaaaagtcaaagaaacaacaaaccttatcacgatcctcagctgaagtagagtatcaagcaatagtgcatgccacttgtgaactcacttggctcacttcaatcataagcgattttaacatcaacatcacactaccttcaactctacactgtgacaacaatgttgctatccacatatctaagaatttagtatatcatgaaagaacaaaatatgttgaaatagattgtcatactgtccaagaaaaagtcactaaaggagtttttcaaatgaatcatgttccctcaaaagccaacttagcagacatactcacaaagccacttttccctactcaattcaaagatattctgtccaaattgggtgttcgaaacttctacgctccaacttgaaggggtctattagacttagagataagttagttatttttctggtttttctgttatttcagttacttagctgctactggattttgcctacatatatgtaaattttctctctatataattcataagatacatttcaataaaactcttcttctctaaatgctctgttcctaatattcttattaggtataattgagctaggtgctggaactgggtgaagttcctttggagtcttcatcgccaaggggtaaataccaaagaggtgtttttgtatgttcaatccttgtggatacaatatggaaggctcaaaatgataagtttcataacaacttaacctgtaatattcctcaacttaataattatgtcctgtcttactttaattgatatgcctaatttcttttttcacaagataataatgagctccttgcaactagcttgtgccctcttcaaaagggatggataaaaattaattgtgatgtggttgttgggattgaggacatgatgattttaatcagtgcacagatattttggatcgcgacacgtagacttgctttcgtcaatcctctgctgggttttacgggctcaccctttcaggcagcggaacacccgtgcggcaccttacagccaaggtcagccttccaaccatttgagtaacaatgggctcatttttcgcgcagctgtgtgccacgtccacacatccgtctctcgtacaactcttgccaagtcatactcgcaagcatccatgagtgcatccacgcatcgaggctctctagccaagatactcgcactgtccataggttcccattatgttatgatacgacaaaatccccaacaccgatgctcacctagtcactcgtgaccaaggtagcatgtgtggcaagattccaacaccaagctgacatgccaacgcttctatcgtgccccactcgatattgtccgaacagtctccctcatcttcaaggatccccatacatccatggaccaatcctcaaggtgctatgcctccacgcatgttggcagaccctcgagacaagctgcaaaattagttgcatacattagacctctgttcctttcaaacatggtgcatctgtcccatgcgcgtatgctaactagcccacgaatgactacccgtgtcatcacgtgttgagacttgtggccaaggcgcaccacaatgtctcttggaagtttgggccacgtcttgtgcaagtggcataccagcaagccaatggaaacatacccgttaatctctggcatcttcttagacgcactaatgggtcggcccgataatgtccatgaatactccaactcatggagacatatgagtcccctcatggtcctcatatgcctgcccgactagtcctactgactagtagtagctcacttagcaccaaggtgttaggggatggtggagagctgataccagggtccccccttaaagagcattctgagcttttagctttgtaccgagaacatacatgattttggctttgtagacatgtggctaaaccatataccaaaccacagagtttctcaaatccaattgcaccattgtattcgtagacccaaataaagggcgaataccaagtcctgtcctaa

SEQ ID NO: 311276 - DNA, 874 bp, Cannabis indica
aaatattagaatttcttaaaactaaatgaaataaaattgacttctttttagtagaaaaattcacacatgattcatgctacaaaatacggaatggtatgtacaagacatgtgtgtttcaaaagcaacataagtaacgaccaaattctatctcataagtaaaataataaaaaaaaggttaggtgatgtgcatttcacaccgtcatacctacttaattaattgttaatattatatgtatttttaattttttttatagcaatgtattttttaaaattgaatatagcgtcaaaatcgttaaagaaattaaatatgaacgtaaggatatgttcatgtgacatatttaatttacaaattgttaaactcgcttctagttaatgatgttaatggtgatgagtttttaaactaattattagaaattagaactgaagaaatagataattcaaagaaatgaatagaacaacacttggagttttttacgttaaggcgttaaagaactttagtccatgagtcgatattaatatgtatttaggctagaaaagccattaggaatacaatgagtataagttctctatttttgcttgagcatgtattgcaagagaatttaacccttattcgaaagatttgttaggtatttatattatttacaggaattgtacttggtttcccttttctcctctaatgggtagtttatttgaaaatacacaaagtatggcagtttcgtaaggcccaactcatgaaagggttgacgagctgactaggaatataggacacgatcaagctgccattaccgtgttctataattgtgggtaattaattatgaattaattacttgatctccattttaggtaatttttctttttcgcttgatacgatctt

SEQ ID NO: 311277 - DNA, 708 bp, Cannabis indica
accgcatgttagattatggataagtaaaggcaattagcattaattattgacattttataattatatatgattttgtatttgttgtggaacctatttttagaaataggtattagagttataatttctcaattctagagattttgttaaactctaagggtattatttaagcttaatatgaaatatgtgacttttataatttttgctcggtgactatggaaaatacgatggatagtcgctagagccacttgggtcagttaagaacctaattattagctagtgagacatatatttgagatacttggaattccaagtttaagtgggcttatagttttagactattttacccctaggcttagaattgcttaagttggaagaaagagggacatttttggtattttgcattaaggattaggtggcatgcccctaggttagcagctggccacttattactttagcctaagattgttaattttgtagttaataaattaagaaaaatcaagaaacaattagaattcctaccctctttctccccctcttctcgaaccaagaagaaactaagaacttagggttcttctccttgctctgattgattcttgctagaattcagagtgttgcccagcagttggtggaaggatttcatcaaggtaaaccctataactttagactttatgttgtttaagctttaagtttggttttgtcatgcaaatt

SEQ ID NO: 311278 - DNA, 549 bp, Cannabis indica
ttcaaaattaatgcacctattaacttaccctcacaaaatttaattctatatattttttttttcatacatgtatatatattgtcggaaacatttaaatattaatgacgcttttattatttcaaatttgtaggttgtaaattaaaataataaataattaaatacagtcacctacaattttttaaatatatatgtttttttgacaaaccacctagaaatttaatagtttgaaatttttattagtgtaccgttacttttaatattttcgtacttcatatatggttcttaaaaaaagacacactatatataattaaggattaatttatgtttttattataataaatatataggcacacgattttgtcttgatgtgttttcacgtaatattttgtggtacaatagatgagttttaaagtacattaaatgagtttctggatacgttactattttttaaccctaataatccgtagatcaacttcagcccttaaatcaaataacttcccatgtaacggctaccgtacatcacgaaatacattccataaaaatacatca

SEQ ID NO: 311279 - DNA, 1582 bp, Cannabis indica
agatcctggtaaaataaattccaacataaatgcactctgagtaggggagattacctgatcaaccagaggtttaattctgttagcaagcacttttgcagcaattttgtaaacaacgttacacaaggcaatgggacgaagatcacccatagtcgttggagtcttcttcttaggaatgagaaccaaattagtgtcattgaggctttcggcaaaagagcctgtttcaaaaaagtccctcacaagataaatgacatccgaacccactatatgccattgtttctgaaagaagccacgtcccataccattaggccccggtgctttgtcaggatgcatttgaaagagagcaagccgaacctcatcatcaacaatcggttgcaaaagcatatcgttgtgtaagtcagtgatagagcaccttataccagctgtaacataatcaaagttaggattcccagcagtaaaaatgtcttgaaaatactgaacaataatatcttgcaaaccactatcccaagtagcccataacctgtcagcttgttgtagttgatggatattgttggttcttttccttgaactagccatggcatgaaaaaacttggaatttttatcaccactatgaagccagaattgctttgatcgctgcttccaatataattcttgttgggcaaggatctcgaaataattagtttgctcctgacaaaaatcatgtacagagttgggatcggttttaccttttagagcagaaagagtggccttgattttttttgattttatgcttaaagttgcatgtaagacttcttccccattcggctaacaagaaactgcattgctttactttttcctgaaatgaaacatgtgaaaaattctcccaagaagattgaacaatttggctatagagaggctcacgtgtccatgcattttcaaacttaaaatggtacacaaaatgggttacagcagtcggctcaggctgaagatatatgggtgtatgatcagaagcagaaacatcacaatcggttaaaacagcttatgggaaagaatcaagccaaagttgagacaccaaagctttgtccaacctgatttcaacccagttagccatgcctttgcctctctcccaagtgtaaggatggccatgaagctttaagtcaacaagattgcatctaccaaggagaccttgaaagccgtgaataagagacagtgggtaaggtctaccccctcgcttctcagactggtcaccaatgttgttgagatcaccaataatgcaccatggaaggtgagaagaaccagctaaagtttcaatgagttgccaagttagccgccaaggaatgcagttaggagcacgaacaactacatcaatgtgattacttgaacaccccaaaaaatggacatcatcattaactctccaaaggagagcaagtccccctttatgaccgtgaacttccacacaataagctccttcaaaaccaagcttgtgtttaattcgaaccacaatatcagttttgcaaaaagtttcacacaaaaaataaaattgggcttcttttgaacaacaatgttctcaaggaattgacaggtccgtgggttcccaagcccacga

SEQ ID NO: 311280 - DNA, 1016 bp, Cannabis indica
tttttagatgaatatatatagtattgataattccttttgggctttactcgtttagtaacggagaagaaagaagtggacgaagtaattggatgcacgtggactagtaatttgtagaagattaattaattaatgattgtgaataaaaatcacgtaatgtaaaatacaaaaataattcttaattttaaaaaaaaaaaagaaatgacaagtattggagagtgatgtgtaatgtgatggggactaaggttccaactttatgtttgataataaataaattaaatgaaatcaaaagtgcttggtggacaaagcatctttcatttttattcttactcatcaatttatggtcttccttcctacttgtggatttgtcaaaatggccaataactagaaaagtatacaccacatgatactcaaatatttagtaaacctaacttatccgtatacaactaattaaaattacataattgttaaggtataaaaaaagtttaaaaaaaagaaagaaaaacaagaagatggcgatgaaactctaccttttatttggtaagaagaatgaattgtatttgaggtgtaaaaagatggggaaaaaaatgatggattgggtgtttatctctgtttacccaaaaatttggtttgatgatttggacataatttttgacatgtgacacaaaggaaacaatcctggggcctacatcccaagttaggagcagtgttacttgcacattgggagaactcaagtaagtaccaagatccagtaaaatcgtttttgagtgatatccttcaacaaaccggtggtcatgaccctaaaacgatgaaccatgaagttgaggttgctacgtggacatcccagggctctacttggaaccagcatcagtgtttgttgggcgcacaggtcgacatcttgtgagtgtgcgccgtctcacatcaattttggtttccaacaactttctatggaatatttgcttagccattgtcctaggatacatgagagacattgttgggattttatgccctaaataaaa

SEQ ID NO: 311281 - DNA, 1715 bp, Cannabis indica
ttgccgaaaacctcggtcaaaaattttcaaccacaacattgctaaaaactattttgatcttatacccattgacatatggggaccttttaacaccatgacagctgaagggcttaagtttttcatcactattgttgatgattgttcaagatatacttggtttaatcttataaaacaaatttttatgctcaagttgtcattccccaattcataaaacttgttcaaaatcagtttaacaaaacttttaagggagttagatctgttaatgaaaaggaattaaaatttaacacccggtctggtgtacttggaattatgcattatcattcttgtgtgtaaagaacccaacaaaattcaattattgagagaaaacattaacacttggtcaatgtggctagggctctcttatttcaatcttatgcttctttagattattggggtgagtgtgtctccactatagcctaccttatcaatataacacctactcctaacctaatgaacaaaacaccttttgatattctatattctaagtcacctgcatatgaacatttaaaagcttttgggtgtctagcttatgcttctacccaaagtaaatctagatccaagttcagtcctagatctatcccttgtgtttttcttggatattctattggtatgaaagcatactagcttcttgacttgaataataataagattttaaactctagagatgtctatttctatgaacaaatttttccctttgttaactcagaaggcttacttactgcttatgaaattattttctccaacatcccatattcagtaagccttccgacttcaaataatgtgtcaccagtgaccacttctgttgatcccaatcggatgtcacaagatgtgtcacttgaatatactcatagtaattccacctaaattcttcatttttctattaatagaatgggaagacagatccaaaagccttcctacctcaatgattatcacttttacttggcgactaatgctagtgttttttcttcctaacgttctcttgttactacttatttttttgtctcaggttattgattatcacaggttattaccaaattttagagcaactattttggccatctcaagccattctgaacttgaatttttaagtcaagcacatggaattaaagagttggataatgctatggatacaaaaaatgaggtctcttaaaaagtatcacacctggattactatgtctttacctgaattacaacaggttaaaggttcaaaatgggtttacaaaattaagcttaatgccgatggaagtatagacagatttaaagctaggttggttgccaaggggtacaaccaacaagaggaaatcaattacattgatacttttgcaccagtaacaaaacttgttactatcaaggttgttttgcctttggctgctatgcaaggctggtatttacatctgttatccctttttttgcactatgacgtggcagcacatatgagtgacacatgtccaacattccttgcatctgggatgagatcaatatcccgaacagactttaagtagcacatctgcaagtatagtgtgtacttacccgagtagggtaaaggatagactacccaaacaggggcaagtttggctttctgaactatctaccatgacttgactatttcagaatgatatcgtggagtccaagcatgaagacaatccctacaatcatgggattgaattagagggata

SEQ ID NO: 311282 - DNA, 1306 bp, Cannabis indica
tagttgataaagaagatacaccagcaaaaaattggacaaagtttgaagaacaatttcagaagaaatctttgatcaacaagatctatctaaaagaaagaatttttagatttaaaatgagtcagtctaagactttggaacagaaccttgatgagttcttgaggttacatattgagttaggcaacttaagggagaataaggccttaagtgatgagagtcaagcaattatgattctcaattcattgccataatcttacacggaagtcaaaacagtaattaagtatggaagaacagagattactcttgaagaagtaatctcaacactttggaggtgaaagtgaaaatgcctggacactctaatgaagatttaaacctaagcaatggaacgtctacacagaagaaaccttggcaaaatagaggtagacgcactagtaaaggatctcagaagggaaacaatcatcacaacaaagggagatcaagttccaaaggcactaaagatcctaatgggtgttatcactgtggaaaacctagacatttcaagaggaaatgctacttctataagagaagcaatggaaaatcaaatacagatcatcaagaagaatcaaacaaactgaacaaaaccaagaatgactatcagaatgcaaacctaagtgatgattatgatagtgtggatgtttatgttgctgcatcatcttttaaagatgattggatcattgattcaggctgtacatttcatatgactaataataagtcttttctgtttttttactaggaatctataggaggaaaagtaattttggggaatgaccagacatgcaacattgaaggtttaggttcaattaattttaaaatgtttgatggcgttattagaaccttaatgttagatatgttcctgatttatctagaaacttaatatttatcagtgtacttgatgatctgggaattgtaagtaaaattgaggtacgtacaatcaaattgacaaagggttctatgacaattacaaaatggcaaaaaaatggtggcctatactacttgcaagggagcccagtagcttggtgtcacaataccaaagaacatgtcatagaagacactaaagctattctatggcataggagattgggacatattagtgaaagtggcttacaacttatgagggaacagaaactacttggtaaggataaggtaactaaagtagatttttgtgaattttgtgtactataggaatacaccataggcttaaattttaactggcacacacaaatcacaaggcatcctagattatgttcattcagatttatggggtcctgag

SEQ ID NO: 311283 - DNA, 772 bp, Cannabis indica
gtagcacctgtatcaattatccatctgttatgcaaaataggaaagttctttccagaaaactgagataccatgggctgattaggattaggagaagtttttggtggttcttgactcttttgagacaaaagattcatcaattgttgatactgatttgtgatactttgaataagatcttgatctggcacattgcattgtccactttgaccaacttctccagaagactgtctttcttgtaaaccagaaaaattaccacaaggttttccaagctgattattcctactcttattagaattttttccatagaatttgtggcctggtggatatccatggagcttataacacttagcaacaatgtgtccaggcataccacaatgatgacaagtaactctaggttgattgaaactagcattcccagcaaactcatctatagtagatccagaaggaccgggtgtagttttaccagtttctgcagcagtatttggaatcgtagtaatgcttctttgtctctcctcttgaataatcgatgcataagttttgttaacaggtggtaatggatcttgcataagaatctgagatcgtacaggtccataggattcattcaatccaattagaaactccatttataactttgtcttcctcctgatactcttggatgattttcatagctccacaattgcaaacaagtagtggacgatactgttgtatcatatcccatagagcatttcttcgagtaaaataagcagtaacatcaagagatccttggttaagcatc

SEQ ID NO: 311284 - DNA, 1451 bp, Cannabis indica
ttaggtagaatattaatattgagtttatattgttacgataataatttttattgttatttatatattataaaattattaaaagtaaaaaaatcaaaaaaaattagaacaactacaaaatacaaaccatggctcaaaccaaaccaatttatttttgagttgtttggttggtttaatcatttaattgatctgatttagttttgaatttttaaaaacccataatactagtttggtatgtaggaatttcctatggacaggtcaagctattgctgctggtcctggcatgattgtttgggataagttgtgttatcctaaatccaatagtgagctatggggaaatatatttgggccatttcaaacaaggaagatagtctttggatgaaatggatccattgtgtgtatatccgagatgaaaattggtggcactacaagccccctatccaagggagttggtattggagaaggcttgttttgctgaaagaacagttcaaagatatttgtacaggtcagttgtctgctctccaaccttatcacgttgcgaaaggctaccaattgctgaggccgaatctagaaaagatgagctggagtcaacatgtttggggaggttaagcacccccaaagatagtttcgtcacatggattgcaattcaaggacgacttaaaacaaaggatagattagtaagaatgggaattactggtgacacacaatgtgttctatactgtcaaaccgaagaaacaagctcccatatgttatttgattatttagttgctgcagaatgcttgagtgcagtgaaagagtggctgcaatgacatgcttctgctactgctctgcctagattaattaggtggataggaagagccaaaatgagtaagtttcgaaagcaaacttatgctgcctccattgttggtctggtatacactttgtggacagtctgaaatgccataatctggaacaaagaccaagttcaccccgagcagttgattcaacgagtcaagagtactatgaagcaaagaatttcactttgttggccaaaaagagtgaaagaagaagacaaagaatggttccaaaagttgtaaagattgtaaagcttgtaaataaaagaatattaatagatgatgtttgtatagttattcttagcccttgaggggtgcatttagtttgtaaaactttgtttgtgagcaatacaacctctctcattcatcaaaaaaaaaaatagtaatttggtatgaaaaaaattgaaaatccaaaccaaaccaatctatgaacacccctaattctatataacagaattgttagtttaagggtgttttttttagttttgtatgttatttaacagaatatactattattatagaatatttttttattaatttataatattattatatatatttaaaaataaaaattaagtaaatagtttatataaaaaaattcaaaatattgtagatattttt

SEQ ID NO: 311285 - DNA, 1121 bp, Cannabis indica
cggtgtcatttggaattctctgatcagcttcatcttctagtcacggaaacatccatcaggtgggtttcgatgccatattctccatctctccacgcgctctccaaataccagatgaatatccattttattcatcctttcatttgcataaacggatttgcaattcattgatttagagcttcgtgacctccattgacgactagatacatttctctaatggaacgtcggagttcgaagcacgaagtgtggaatatactgtacgcctttattttgcgattgttagagcctttgttgcaatttttgtggtcgcttctttgtggctgcgagaacaacgacgagttgttccccaatcccgaccttcttctttatgccatattttcgattgtgcgatcatgacgctgaaatcataatcgtcatcttcgtgaatggttttatatatgctctgtttagaatagcctttttgccattggttgtagtcgagcttgtagtcatgttgattgctgatagttcgaagttatgagccttattgtcactattcttcttttgcaggagttgacgcgatatcttccgaactgatttgcaatcattgttttggacttgagcggtcccgagatctgagcgacctcaagatcagggcggttccaaaatctgagaaagcagttagagtcattccttcctcattaaatataatatatgtttttcatcttttcttctctgatcagctggattttttctaagttggggactgttgagattgcttgctgatgtgaattttgtgtttctctgaacagtgccttgataatctagaaagatgatttgtattgattttagctgatatctaagtgctggggctgatttcttaacttttgattactatgctaggggctcgtcatgccatgattctcctccaaaatcatagaatattatacaacacgttcccacagatggcgccaaatgttgttgaaggaattttacaacaccaaaaatagattgtaataataatagtaaatatataataagtgcgagtactcgacccataatgacgacgggtattcaaattaggaacacaaatacttagtataatagactggaaaaataataaacacaagaggaatatagtggtt

SEQ ID NO: 311286 - DNA, 1605 bp, Cannabis indica
tttgttgtagttttgctctccggaagtatgtgaaactcacatgccttctccgggagacattttagatgctgctccctttgactaaagagacttagctgaattatctaaacgttaaacccttcagtctacgtgtctcaatccggttggtccacatattttggacaaaatcagaagcaacaaatacaatacaagacttaatacgttccaataaagctcaatacaatacaatacggcataccaaataagctctatatctactaaattacttatacaatgttcattgatataatgaatagcagtactttatcttttttgtattaattcataattaaaattgatcaaattatcattttacttgtctaatttttttttttatctttgagtaccattaatttattaataaaaattaattcaattcaatcaaaatattttaattacagaattaacgcttaaaatcaaccaatatctacgaaatatattacatccgatgtaatatagatttttccaatattttgggttttgctaaacgaaagaacaattattgtaaatgttgttcggatatatctacgtcataaaagatttgtgcatttttaaacaaatcattctacctaatgatgtggcaggtaactattggacccagtgtatgcgactgcaagtattaaattaaaatcaaaagaagaaagaataaacgtggcaggttcatgaacaaaataacaagtaacagagagttatgatccagtgcagcaaggctcagcaacttggatcaacagactaaataactttaccaataacagagcatatcataatcttcacaacccttcaaccaattaatgtcgattaaattatttagagataatataaatttgtgcgcatctgatcaccgactcgtacataatgacatttgtaataccatttttatcggtaaaatcaaagaattttataaatccttcactaccttatccggaaaaatcacattaattaatgagttacataccaccacattaattattatttaattatcgatatcagggactatatagcaaaaacttaaacaattgaacataacggctgaactaataaatttctttctcagagtgtaatatcaattttggcattcttgtggacttaattttaaataccgtaaatctgagtattaaactaaaaccaacataattaggaaccaaatgtgtgacagaaaaataaaatctgaaagaaacacaacacacccacctttgagtaaaagctaaataaactggaaaatggggaaaaacgacatcatgataacccaaaacgacgtcgtgtgttgccacgtggagctttttgctgctttattggcccccaccatcttcttgtttaaaaagcaaagcgagatccaaagttgcttctcactaactgtcgggtcacccttaaacacctaagctctttcatttacattccggcaatgccgccggatattccacccgacccgtgaaaaagtgacccgaattttgattaaaaagacgaaaatgccactagcctcctcttcttccgccgtggctccgcctcctcacaacctgaagcaccgcgtgttcacttgccttaacaagctctccgaccgagacacgt

SEQ ID NO: 311287 - DNA, 1605 bp, Cannabis indica
ttttgtgtaaactcaaaataccctctcttacccaatcatttttttttatcttctcttttttctctctcttcactccaaacattttctctcttctctacacccaaaaaattttagccatgacactaatttttaaagctattatctataaaagataaacatatttctatcaagaaaaagccttatcacaagataggaggagaatgtcaaagtttttaagattttagattgtttttttgatggaaaagaaatgaatatgtgattttatgttaaatttattattaatattaaatttgttattattattttgtagcttaaatatacatttaattgtgtgttttgtcaatttgttggttagagatctatattttttgggattttctcattttttgcataaatttcaacgtatttgacgcttactcaatgcttacttaatgattagcatttttagaggttagggatgatatttcgattagtgttcaatttctcctcgatatatattagttatagtacctatttgattgttacacgctgcatgttcaatacataagaagttatgtaatttgttcaattgcttcgtgatacttgttcgatggtactcgatatatctttgatgatgtgtatttgatttatataatttgtagatatttttttttgtggtatttattttattttgttaaaattgataaggtcaacattgtttagctatttgatgtacaatgatgtttggaagcacgtgggaagagattgagtttttaatggaactaaaaaaaaaaattaaagtcgagtcagacataacttactcacaatcagttgagcttctgtaccagaactggaggttgataaagtctaatacaacctaattgattatatattttttatgtattaattttaaatatataaaacaccattaccaatggagtagcgtaatccaacaacatcaaacaaaaattaactcatttaaattatctatttttatttaaatatcccatgcttatcaagtaggtgtttgagtaattatatatcatctcaaaaatagattattttaagttaaggtattaagagaatttgaatttaaatttagattttagactcaatttctaaagggtggcaataattatgtttaattatttattataaattctaaaatttctgatacacaaatattagtttgattttttgatatttttttaaattaatgattttctctggtcactttactcttatttctaattaatcaatttttatgttgagccgttaacaattgagtagctgataagagccttttaggttctataaatattgattcttcatagttagaagatgttgttacttaataattttagcgtttttttgttattttagaataactcgggtttaaaagaaaattgatttttatgagtaaaaaagtgatggaattgatattttttatgctagagaatgttggtaggtggattggcgtaccaaaataacatttttctagagttttggaagtctgttgacttcgcttttagccaacgacaatgagtatttttgataagcgataaacgatatgtcgtaataagaatatgtagtaaagcaataaaaagacacataaattttatagag

SEQ ID NO: 311288 - DNA, 705 bp, Cannabis indica
tggttgtattaaaaaaaaagttgtcaaaaattaagttcagggtcctatttttactattttagaaaatacatggtctattttgtcatttaacaaaacacagggtccaatctgcaactttcgcaaaactcagggtccaaaatagtatttaccttaattattatagtataccgacccaataatcatgattatgcacctagaatatataattaataatatttagtaattattatataaattaaattaaattaattaataaggtttgtttcaatatcggtggccaattggaattttgtcatatacaatacatgaagaattgatataatgaatattaatgttatatagttttattttctcaccccgacaaagagtttaggctatcaaatttttcttgccatctagaattatgtagaaacttttccaatactaattaattataatagtcctcctcccatcatatattttttttccttggtcaattattatataaaagtacaacattttctttttattattttatataaatatttttgatgtgctacacattttttaaaagtggcatttgggtacaatattttctattttattttaacattttagatatttacaattacctataaatttttttaagattttttgaaataaaatttaaatatttttattacggtttgattgatatttatattagggtttttttttaaaaaaaaa

SEQ ID NO: 311289 - DNA, 872 bp, Cannabis indica
attcaataggagtcatattgaacagtagagatcagttattgaaaataacagctgcagcaatagcaagctttcctgaaaaaagatgaaagagaatacatacatatatacatacatacatattatcagaattaaacagtcagtcttctataaaacataaaagaaaagaaatactaaaatcacataatcagccataaaaattgttcacaacttctctaagcaggttatgagttgaaagtattgtccattttggttcaaaacttatctgtaaagggtaagtattcaaaaattgtttttaacttttcaagacaatgtattagttgagagtatacattgaagagttttctctttacagaaatataatagaagaattgtgtgaaaggagaattacaagcatgagtatatcttatattattacaagttcatccacaaagaagcaacaaaatcttcatccaatttgggacacaaattctaaatcttagaactaaacattttgacaaacctaatcgttcaaatgagtatctatctggatttaagagaaggaaaaatgaaaaaaaaaaagaattggataataggtaaatcatatcattacaaggaatgtacctgtgagtgaagtgattgtgttatctggccacccaatcgttgaaacgagtatgtatctgggtttgaatttcaaatatatgattgaaaattaattggaagattttattcatttttacataaaaatcccaaaaaaggaaactttctaagctatctttgtgtgattgtgtaccccaatcaatcgttgaaatctgggtttgaatttcaaatatatgattgaaaattaatcggaagattttattcatttttacataaaaatcccaaaaaaggaaact

SEQ ID NO: 311290 - DNA, 2035 bp, Cannabis indica
catcttcgattgtgagattggttttgaaagtagcaaattgattacttgaaatagctttagtaagcccatctgctagctgatcaaagggaggaacatgcttcacttcaataagatcctgttgaaccttattttctcggacaaaatagagatttaactcaatatgcttagttcgagcatgtagaacatggttttgagtgagcattatagtgctcaagttgtcacaccagattactggtggtcgaggcaagctaagatgcaattaagagaacagggattgcacccaagagatttcagcaaccacatttgctagactcctatactcagcttcagtactcgattgtgacactgtatggtgcttcttgctttgccaagtaatcagatttgagcctagaaaaatagcaaaaccagaggtactccttctgtcatcacagtcagtggcccaatctgcatcacagaaggccttgagatcaagagatgcatattgttttaggtgcaatccataatgttgagttgcactaacatatcttaaaattcttttgactgccaaccagtgactttgtagaggcttgtgcatgaactgacacactgtgttcacactaaaggcaatttctggtcttatgatggtcaaatactgtaaggcacaaacaactaatctgtatagttgagcatatcttcaatgggatcactgccataagtagagagtctttggccacttgtcatcggagtcaaattaggtttggcttcttgcattttagccttgtagagaagatcttttatgtatttggttagagtgagaagcatcccttgatcagtgtataagatttctatgccaagaaaatagttcaacacacccaaatccttaagagagaactcttgatttaattttgatataagagagtcaatgacagtttgatcactaccagtgatcaaaatgtcatcaacatataccaatataattatagttgagtgtgatgtgtgttcaataaacattgagtgatctgtcttagatgagaggaagccaaacttagtcaaacattgttgccacctttcaaaccatgctcttggtgcttgctttagaccataaagagcgttgtgaagtttgcaaactagatgagaagctgtaggatctctaaatccatgaggttggagcatgtagacctcttcttgtaaatcaccattcaaaaaatacattattcacatccaattgtctaacacaccaacctctgctcagagcaagagttagcacaactcttattgtgactggtttgaccattagactaaatgtttcagtgaaatcaaactcatgttgttggtgaaagccattggcaacaagccttgccttgaacttgttaactgaaccatcaacattttccttcattctataaacctactttcaccctatagtttgtcttcctgcaaaaagtccaacaagagtccaagtcttgtttttctttagagcaaaaatctctttcgacattacattattccagtgaccgtacaaaaatgcttgttgaaatgactaagggagtttggaaacaataaatgttttaggcttgtaaatacttgccttggatcgagtttgcattttgtgtttggcctgttgatgggttatattagcaggaagattaggttgtgagtgactgtgctcaacttgtgtagaaaaagcagtggaagtttgaacttctgtttgaccagaaggtggtgctagtgcaatattaacaatagggactaaaattttgatgggagcagaagtagtgttaacaggttgcacactgccaataacctattcaaagagactatgatgtgaatcaacaggtttattagcatgggaggtcgagcatgagggatcatcttgtgttatagttggttcataagtagttggatttgtttgtacaggaacagatgcacacataggaatatggacagaaggcaaggtttcaggagcaggaaattttttagagatgtttgaactacttgattgagcatatgggaattgatgctcatcaaagacaacatctctagagatgtagagtct

SEQ ID NO: 311291 - DNA, 1405 bp, Cannabis indica
catctctagagatgtagagtctagcattggagctaaggcacttataacatttgtgattgaggttgtaccctagaaaagtgcaggttgtggatttaaattggagtttatgcttcttgtaggatcttatattagggtaacaagtgcaaccaaagaattttaaccagttgtagtcagacttgatgttaaacaagacttctataggagatttatttcctaatactggtgtgggaagtctgttatgaaggtggactgaaattctacaagcctcatcctaaaatttaaagggtaagtgtgcttgagcaagtaaagctagactattttcaacaatgtttctatgctttctttcagcaatgccattctgctcatgagtggttggacaagggtggatatgagttattcccatttcttgtaagtgactagagaatgacctatattcccctccccaatctgtttgaagacaatttaatttgaatcctagttgtaactcaacttcacttttaaagcaaagaaacacctttataaggcctcaaatttattctttaacatgtatatctaagtgaaacttgaatacatatcaacaaaatgaacataatatataagggagtcagtatgtgagggaccccacaaatcagatacaacaagttgtaaaagttgagtgtacaagacaatcaagagagaaagagagagttagttagaataacaagctaacaactcactcaagctcataacagaaaaataacaaacagttgaagacagctaacgctaactaattgtaactgacttgagctaactaactttaactatcttgattaaagcccttttttcctgtagtttcactctctatgaagactttaattatgtaggatgaggaactaagaacaatgtattgaaactaactacctcgagacaaagtcatagataacttagtataaattaaaatagaattttaacaaatatttcaattatccatatattcatttgctatcatgcaatgcccttaaattaataatataatctgtgaagaaaaaaagattcatatttcaagccatttttaaattataagaatattttagttgtgaacttatataaatgtgctttgagtttgaatgtttcataactattttatgcttaacatcttaatgttagaaataattggggtcacaattgtatatataaaatgtgtgttgggtcatcaaataaataagtcaaatttatgtggtctattttggaataaagtttatgacttaagggcatgattgtcatgattttaatatgtggataccaattagacaatttctatattgatgaggggccaaatagaaatagtcaataaatattaccaacaggtttgtctgttggtaatataacgggtaatggtccccatttgcatcgtatcttttcactc

SEQ ID NO: 311292 - DNA, 2391 bp, Cannabis indica
aaaactgtgataatattaaaaaaaaaaacttgactaaaataaaatactaaaaatagacattataacggcagtaaaaaggtattctggggatccctgatatgaaagttttacaaaatggctagtaaggtcaatatgtacattgcttgagaagactgtcatctcatggttgttctaacttttctttgcccttacccgcaccacagagcacctgtgagtcacatagactcaacaagaaaagtaataaagaaggatacattaaataattaattatacattttattatcataacatgattaaaccataacatttaacagtaggtaatataaccatccatatacatagaaatagataattgcactacctaatcaagtgggcccatgccataacctggcaccaatatatcacatcgcctaatcagatgagcctgtacctatgcccggtactcatatgtcactgacgcccgtacctatctcatctcttaatcaaaccctagaccaggacctcgacccggactcagatcctgaccctcactcagactcgaacccagaacctagacctgtacctgaacccgaaacctcgccccagaccctagaccctagaccctaactcctgaccttaaacccagaccccagacccaaacctgaaacccaaaacccaaaacctggacctgaaccttaaaccctaaactcatacctagattcgtactcagagcccaaagaccggaccaagccctagacctcatacccgaactcggaccccagaccttaaactcagtcaggtttagatttgggtccaagtctgaggtatgggtcagggtccgagtttgagttggggttcgagcttcgtgtccgtgttcgaggtccaggtctaacgtccgtgtccgtgtttggggtccaaggtttgggtttggggttcaggttcgggttcgagtccagattcgagattcggatcgaggtccgagtctgagtttggggtctgtgtctggggtcaaggtccaggtttggggtctaggtctggggtcaaggtccaagtttggggtctaggtctaaagtctaaggtctgggtctaaattcgtgtccttggtccagatttaagtcctaagtccgggtccgagtcttggcccgaggcttgatccaaggtgggatgggttcatgttgtggtatggtgtagaatattaaatgttgagttatttattaataatttatatatatatataactaccatcaaattctttattcatttatgaggttgtgacttgtattgtacggataattaagatcacaagccttgaataaaataatcagcaatatattaaagttatagaatatttaatcaatgattgctagtatagttcactgatccctgttattcagtgtaagtaatcttgattcggatcgctgatgtaaatagacatcttggtgaatgtcttgtatataatataaaatatatatatatatatgatatgaatgatatgtaattaagttgtctttatcaaactagtcgtttttaataaatacctaatttataccacaatgatgatcaattagtagatcgacctaaatcttgagaaatcatgaactcttgttcatgttattaatttctttgattcactcgctaaagtttttcagagaagatgtttcttacaacttctattttggaaagctaataatgtggatggttgggaacttgatctataatgtggaattctgacttttctaacggatcgaatattagttccctttaaatgttaattctggaactcaaagttgtgcataatttatattggatctaaattatattttcactagtgaattaatgatactaaaagataaaaagttaattagaagggtaaaactataatttaaccaaaattaactatgaactgatacatgaagggctaatcactggtattgattatattaatgatcactatagttaaatttagtaaatataattctataattactaagaattcaattctatttttttaatgaattaataatagaattagtaaataggattatttggttgatgatattcaataaataatctaatttattagagcttagtattatagattcatagtccttggattgccagtatataacatttgtcaagggtatggatgacacaaaataattatattgaaaaaaaatctatagaaaaatagtaattctttatttttttaataaataaattatttttaaatttattactgaaataaattgggaagacaaagatttatcacgacaagataccatcttgtaataaccttacaaggtggcacctagcactgtgttcctgcacagttataggcgtctatgacaaatggtgggcccactggtttgtttttgaattaattaattacttaattcaaaagataaacattta

SEQ ID NO: 311293 - DNA, 820 bp, Cannabis indica
ccaacccatgtgcaggcctacttagtattctacatatttattatataaaatctatagttataggtattcataatcattccatatgaactagaagaggaataactattcaaatgagaaaaataactaaggcaaagagtaaaccacaatgcacatataccaggtatagttatgacttatgagtacgatattagcatataccaccccatacctgctcaatatatacatatacgaatatgttttattaattatatatttgatttatcataccataatttttattggggaattatcttatatactatttttttttaactttttttcaaatttacggtttgagtttctaaagtggttgcagcggtagttgtaataggggtttctatacgattttttgttacaatttaggttgcaatagggatttttatgtagaattttgtaaaaaatatatatataaaaaaaactgttttgaagtgtaaaaatgaaaaaagctcattttttatttactttttaaaattttattaaatttatggttattgtgattttttttaatgttttgatgtcaataatgtgtttatttaatattatttaacaataaatatatatatgtagttggatttgagtttgaaaagcatttaaaatgttatttaattaaattttatcaaaattaaattaaattactataatgactttttagaaaataattactattaactgttacgggtaaggtaactatggtttttctccaatgatctattggtccgcagtgaaatttagtcggtcataaataaaaacatacttttggacccttattttgaaaaaaaaa

SEQ ID NO: 311294 - DNA, 1701 bp, Cannabis indica
attaatagactaccaacaccaattttgaaatttcagtcaccatttcaggttgtttacaacaagaaactagattacaacttccttaaaatctttggagtgaaatatgttaaccttgggtacagtgatgcccacaaaggttataagtgtcttagctccacgggtaggatgtatatctcgagaaatgtaatatttaatgaagatgtctttccttttgaatctggtttcttaaacaactatcaatcggaacagtctgtgtgtgtgagtgttccctcatggtccaccttgttccagtccctacaacacactctcaaaaactcaaagtccacagccacttcgcaagtccctggagatgcaccctcagaaattgcctctgctacaattgatcttaatggtcaaaactcggcccaggtaacaaactcatctgatatctccacatctcccatttctcatgaaactaatgtgcatgacatagaaatagcacaggtgctactcttaatcacagcaacagtcgtgagtctcatgcagacaaaccagatcagattgtcccacataaaccagcaactttggaaccatttcaccccatggttactagatccaaagcagggatatcaagcccaaagtctaccttggacatgcacaatggcattggaaaaatgacactcctgctacagtcgaagaagctttaaatcaccctggttggaactcagctatgggtgaagaaatgacagcattgaagaaaaataaaacctggtttctagttccaaaatttgctggcatgaatatcatcgggaacaaatgggttttcaggaagaaaagaaatgcagatggcagtctcgaaaggctcaaggcacggctagttgcaaagggtttcaatcaaagacctggtgttgattttggggaaacttacagcccagttatcaaagcttcaactctaagaatcattctgtccattgctgtgtcaaagaattgggaaatcagacagttagacataaacaatgcattcttgaatggcaccttacaggaagatgtctatatgtcacaaccccaaggctttgaagatcaaactcaacctgatgctgtatgtaaattaaccaagtctctctatgggctaaagcaggccccgagagcctggtatgagagactaagaacaactttattaggctggaaattcactaactcgaaggcagattcttctttatttttctacaaaggtcctggtatcattgtcattgttctaatttatgtttacgacattattgtaacaggcaacaaagctaccatactcaagagttttattgaaaagctgaacactctctttgccctcaaagacctcggaccacttcacttctttcttggaattgaagtacacagagatgagacgggtctctacttgaaccaaggaaagtatgtcaaagaatttctaacaagaactggtatgatgcatcttaaaccgtgcagtacacccatgacagtgggaaatcctctatccaaatctaatggtgaacctctagcaaacccatccgaatacagaagcatcataggggggctgcagtacttgactcacaccagacctgacttgtcgtttgctgttaacaaactgagtcagttccttcaatctcccaccacagtccattggagtgcagccaaaagagttcttagatacttaaagggaacagcttatcatggtcttcacatcaaacc

SEQ ID NO: 311295 - DNA, 2192 bp, Cannabis indica
ataatttaccctaaatttctttcattcatttcaaatgtacctactctttttttttgtctttccttccaataaatattacatgtataggtgtatatactgtttcaactttcaagcatggcttgatctcaatttacttaatatataatatatacaaaatttcacaatttccctagaacacaaatttataatcatatttgtgacagagcagatatatatatattgatttaataatatattactcttgcataagtttaatatattgttgtgatcatggaggcatttaacaccatcgagcagcttagtgaagccaatgctcgctgtgagatgagatgagagttgagagagagactgtgagttgagatgagagtgctgtgagatgagagtgtgagtgctgagattgctgcgagatgtgagtgagagagagagactgtgagttaagatgagagtgctctgaaatgagagtgaagtgtgagagtgtctgttcatggtgataaactgagtcactcgtcaacgagtcaccgagttgatgaaagtttctattgagaatagagataattgttttttacaggctttgaaagatccaggaatatatttgttttaaagggccaaaactcagaagcagtaaccgaaaattgaaagaccgttgatctcgggttgctttttgatctggcttctggagttaaacgttggtttcaatttaagtttgaagagattggcattttctgctatttctgtgtttgtcttggtcatcaaaggaaggggggtgagaccagggactggttcgggcgtgttgcggttgacgggaaactctcctagccctaggccgtcgacggtagctacgctgggtggtactgggaagagaggggcgaccttggcgactcgcgactcgaggcggttggtgatagggacatctcgacctcgggttgggaaggaccagcctttgttgaagcgttgggttcccaaggaatggccaggtgaggagattcgaggaagttctagtttgggtaataagggtaagtctcttttgaatttggaaagaaagacatctgattatactcccagtttagagttgttgaagttggactccaggagtgaaccgttggtctctgtagacccttgtcgtggcaaggaaacggtggggattgtgccaaatctttgtgaaaagtttcctataactattgggccgaatgttgggccgaatattgggccggatagtggtattgtacctggattaattggagagaaggtgctcatgtcttgtgatgttggaactatggcccgaatggataatgagattcttctaatgggctctggggtcaatgttgatagggccgaaagctctatagatgtagttgggtcgttggtttcctgtggttcgtcattatactctactaatgtgggagttaataagaatggcattaataattgtctcatctcccagaaaattaatagcttgcctcctagtttttatgatggttcatctatgggtccggttggtgtagtggaggccgagcccatccttggtgaagatagggctttgtctcttttctttaaggcccaagaaaaattgctctatgatctaaaacattttgggaagatggttttgtttgagattaagaacataggaggggatattggtgtattgccaacctcggaaaccaatgagagaacaacgccatttaagatgaggaagtttgaaggctctgcttcgctgtgctctagacctcataagattatcagaactcatcctggcgttattcgggactttccctgggacaagaaggatcaggaccaggattctaaagtggcttttgaagatccttctgaggatagctttagctccctgaattgcaatgatggaattatgaagaaccctctggttgggtcttttgtgatggaagactctgattcgagcttattggttcactcccatacccctgtggaggagaatgtcaaatctcctccacaggagccacgagaggcgtggcctggaattgtagagggttggggcagacctctacagtttgtgaactgaagtccctgatcagatcgcgctctcttgattttgtctttatttcttaactgaaagttgatgctactgttgggttttatgccctaattaaaacccattacaatctgattagttatcaatttagaattttgaagtgaattatgattacatgtatgttaca

SEQ ID NO: 311296 - DNA, 1900 bp, Cannabis indica
gaccatggcacttacttaggcctcccgaatataataggccagaaaaagtcagcaatcctggggtttttgaaagagaaagtgcagaagcgtatttagtcctgggatgggaaacttttgtcaaaggcgggtaaagaaatactgctaaaaactatagtccaagctctccccaactatgcaatgagcgtctttctgttaccaattgaaacaagtaaagagatggagcgtgctatgtgcaaatactagtggagttcttcttccaaaaaggataagaatattcattggatgggttgggatcgtatgtgcaagcctaaattgcaaggaggtttgggttttcacaatctctatgactttaatgtggttctattgggaaaacaaggttggagattgatggtacaacctcactctcttgttagccgggtgtttaaagccaagtattaccccaatggctcttttctttcagctatctctgagataggtggcagcccaagtcttgtgtggagaagcattatggaagctcaactactgctcaaaaaaggagctgcattcgtgtaggttttggtgcatcagtaaatattctaaatgacccttggtcgcccgatatttcagacccttatgtgcacactgtaagtgattcccttcttgacaaaaaggtatcccaactaatgtccatagaccaagatcaatgggatatggatatactccatgacatattcaatgagagagagatattaacttaattgttagcatccctattcaagtcacagagccagatatttggtactggaagaaagaaaacttgggacactatactgtgaagagtgcttatgctaccattcaagaagggaagcagtagcctgcaacacctgatcttttaggtttctggcggaagtgttggaatttaaaagtccctccaaaggtgaagaatttcttatggcaagcctctactaattgccttcccacgaaaactcagctccaaacaaagcatgtggttgtcaatgctatgtgtcctttctgtaatctcaaaaatgaaactataaaccacattttagtcacatgttctttctctagagcttgctggacaaagttagaaccaggtatttctactgatgtggcaggcacgtttcctagttggctgaatttgattttcgaaaattggagtggaagaagtagacagctggtggctatgctatgttgggcactttggaagagtagagaactggtgtggaatcaaaagaatgttgaagtcaaggatgttgtagttttggcacaaatggttcttaatcaatggctttatgctcaagataaaaattttgatccatctttaggattactgtttcccgaagatggtaatgagcattggaccttaccaaacattgatacgattaagattaataccgatgctgcaatattctcttcaaccaactgttacagttactcttgtgttgctagaactcataatggtacactgttgcaagccaaagccaaatgtgtaagaggagttgtttctcctgaggttgccaaagctcttggtatacatgaagctttgaattggattaaagataaacagtggagtcgtgtggaagtagaatcagactgccttgttgctattcaatctatccgtagctcttctaccatgttttcttattttggtagaattattactaaatgcaaaaagttgttggatgaatcgaaagattgttttgtttctttaaagtttgttaaacggtctgcaaacaacggagctcactatttagcaagattcacttgttctattgctgatcgtagtttgagtgtgagcaatatgctccctcggagtttatttctgtattgatgaacgatttgattatttaatgaagtttattcttcttttgtacaaaaaaaaaaaaactataaaagtggt

SEQ ID NO: 311297 - DNA, 1983 bp, Cannabis indica
tgtaaactatttttaaagaatttacctaaaaaaaaaatagaaaaacaataatttgaatataacgaactaacacgtattcagtgaatcaaaatttaactgaataaaagtaagaacattattatttaacaaaaaaaaacatttaagtattaatactgaaaaaaagagtttaagtataacaaactcgaaacttcgagaatttataggctaactattttctttaaagtttaaagtgagtttagttgttaggaaataaataaataaatataaataaaatattgtttaagtttgcaagtggatgatgagctgactcagcagccaagccaagccaagagggatgggagtgggtcccacaaagtcacggacggctaacgtgttctctcttcttattacgtaatacgacgacgtaataaacgaggtcctattaagaataaatagcacattcttatattttgtcccttaattttgtttaattgcaaaaattattccaaaccataaaagtccttcgcaaatttgtcccttaatttttaaataatttattcatacgattatgggtcacaaacatagtcacactatgagagtttatataataactttgtagttttttttttttttttttaaaaaaacttaaaaaatcacttggtggatatctttttctcactctttcagtaacttaaatttattaaaaaactagacccgaacaaattcgtgatacgaaaaatttgtaaaacacgaacacgaatatgaccagaataaattttgtgtcatgtcgaacctgcaaaatctcgtgttgtattggcagattgtaagttaaatagttgtttttagtgtaatcatatcgtgtagagttcctaaatttattttacatagttgacacgaacacgattcgtgacacaaaaaatttataaaacacgaacacaaacatgagccgaataattttgctgtcgtgctgaactcgtaaaatcttgagtcatatgttcgtgtcaaacccacgggtcttgacctgaattgtcacttctatctcgagggttctcatcctattaaggatgacaccgctacaataagctagcctgtaaaaagactaagcataatctttttgtaacgagattcaaaccttgacccaaacaaaagaagatactttattgatattaaacataccaacattaactttaagaatatatatttatattcacataatttattactataattcatatatttatagatttttaaactgcatcattaacattatgttagtgctacattcttaaaagaattaaagagactataactgtagagaatatttacaatgatgagttttaggctatttagtacttttgtcttccgaattattacatatgtattattgtgtccctgaactttttagctcgttacaaatagtccttaagctattcacggtattatgaattagttctctgtcaagtttggtcacacgtggcacatcaccgcctataattttacatttaagaaataaaaattatgtatttttaaaaaattattaaagttaaaattaattaataactaagaaaattacttaaaattattattatttttttttaaattaattacaaagtattacgttattgtcatgacaacttattaagcagttatgttattattttgtttgtcatgtgacaaaacttgaccgaatgactaatttataatactacaaatagttcaatgaccattttaacgagtggcagaatagtgcataattcataattcggggacaataatcttaaatagttttatttttattattcaaaggaaattttttacaatgaaagtaatttagatgacaaaatttaataagaatcaaaattagggaaatttattttagtctagtttaattttttgtctcctaaacattgacatgtactgaatcatgctccttgaatttttttaagtcgttaaaaattctccccgaactatggtttaagattgttaaatttaaggacttttgtc

SEQ ID NO: 311298 - DNA, 844 bp, Cannabis indica
atttgattagtacccattttgtattatcattgtttccttcaaagtgtggaaattccctttatattgctgtttttctgtgaagattttgggaatttaaagatttgattttggaaaagatgatggcttttttaggtttgttgttgtgaacattttgggatatgactgagtgattgagtctacaactacaattggcattaaataaatggggttcattagtaaaattcacctggggattttgtgttcagattctcatttgatggttttatgcttagatgattcatttcattatggagaaaaaagcttaaggaaaggaagagaactctgtttaaatttaatccagatgagatgagatgtgatgagagcatattatgctgttttcagtgaaaatgactaatatagttttagagctaagagttagttttctaccaagaaattgtaacaacccttatagaaattggtttgaatggcaattaagaaatgaatctaaactgtcttacaagatatccacctgcagacactaaagattttctttgttttggtttggttttcagactttgtcaagtacagttgaggagaaagcaaagtggattttcaacaaactcaaaggtattttttatgttaattaatctctctgaaatgatatcttgaaaatggtaatggtgtctagatcataccctataattcacattgatgatattgttgtagggtcaccaccaaaaaccttgccagatctcctccgagagtacaacttaccaccgggactctttcctcagaacataacctgttacgaatttgatgaaacaaaggcgaggctgatcgtgtatttgccatcaccgtgcgaagt

SEQ ID NO: 311299 - DNA, 796 bp, Cannabis indica
atatatataatataatattttttagcaaaaaaatattttataaatataatataatatgtacgtattattatttttatacgcttaattcttttatttttataaatatatatttttagatatgcatatgggaagattataataaatattgtaagcatttttaaatattagaattattttttaaaatatagaatttttattaatttatcaaatcaattaaaaaataaaattgtacctaaataggatcatcacttttattaaacactcgatttgaaaaagaacaagatactctagtaagactatgagtaaccatgttagcaggtcatttaataaaaaaaacaaagaaatattgtttaaagatgtaaggagcttacagcaatcttctataataaccctaaaagaagaaagcatagataatgaatttcgaatagcttgtactactaccaagcaatctgactccagctccactttctgccatgattgaattttaatccagcttagcgcttcctttataccaattgcttcagccaaatcaaaagcacctataccagcaaaattgtctgactgagccatcactaattccccttgagagtcctgatcgactatgtcataatcaaacgcagctcgatcacaaaaaattgcaacatcaatagttaccttacttgtattctcttgcggctaaacccaaaattcaactccatcaccagtttcaaaaactgaaaaagaagcatttgaacctctattttgggctgactttcattgtacaagacaatttgtagatgagataagaacaccatcc

SEQ ID NO: 311300 - DNA, 2565 bp, Cannabis indica
ctaatttgatggccactgatttgtctaacatatatttattggtacgtctgtgcaactctatgtagacctgaatgatatcctgatatgttattctgataacaactaatatgtacactaaacatgtgtatatatatgtaatcattatactaatcttaccttatttttgagtacaggtgtaccggtcaatttgggtggaacaactgctcaacgatttacgggcccctaagtcacaatatttgtaaactaatgagtgaaagactaaattactttttgggaacttaaaattaaaattaaaagtttccttatcgatggataacatggcaatatcctaaatatcgtaaaaatggaaaaatctaggatgccctaaaatgccccaactggtagaccggttcccaaccggaaaaccagttctgtggggtctgcctggagacgaaccgagaccggttcctacaggtccatacttaaccagtcgaccgattcagtataggaaccaccaaaactcttctaagcaatccaattcgaccctaaatcattccaaatcttccaaggtatctattccaaatcttgctagaacaccaaaaatggagctgaaaaatcctatttccttgctagtttttccaaagaggtcgagaggaagagagggttgaaaagagaaagttggtttgtctaatttctaatttaatagacttaatctttatctatggtattatcttgtatcatatacaaataaaattagattaatcaagcctaatatttatctactagaggacaaaagagaatatatggtaaaagactacattacccttgcctaagccaaaaagcattacttactaccaaagggcatttaggtcaaatctaagaccaccaatattcttgatattcccaatatctatttaaatagcccgctattactaaaatattaaaccttgataaaatgtggctctatcggccaaacgtcgcgttccattattattgggcataaaatatgaaagatatgaaattttatatataacataaataacacatttagaattcaaatatatcttcataaattcgtaaatcattattaaaagcatctaaatattgttttattttttaatcttgatattttttgatgaggactttagttctgacgtgtgatcaatataattaaatgttactgaacattcatttagtaatgccactttatttttttttctcgaaaagtaattaactctctttatttacactatgtttggtaacgagggatgtgtgaatggagaggggtggagagagagagttgaaaagagaggaataatccattgtttgataagaggaagaaaggacgggagaggagaggtggaaggagactttctcccactaaattttaaatttttaatacctcattttaggaaagattagagaaaaagacaaaatatacacacctaatactaaaattaccctttgaaaaattacaaatactaacgaggatactatagcaaatttaataactaacttcctcttcatcctcccacctttactcataagaccaacaatacaagcaggagtctcgtgatgggtaatggttgattttcaaccatgtgaaaatatagttgtgtttttcaaccatgtaacaattacaatggtaatttttttacttgaggaatatgcatacatacaactatgcatttaatgcaagattcattttctgtcttgttcatacattcaaagaggcctataaatagagctccatccctttcatttgttccatcacaatcatcacaagctattccaagagtgaagagtgatgctcttaagagaaaaaatatagagaatacctcttaatgagagaaatctaagagagagagaaaaagagagttcctacaaaattgtgagaaatattttgtagagagatggtgagattatcacactagtaattgtgatgcccacacattaaagaatcagattagcaagactctaactagttaaatgtgtaataatgtggaattatattattatataattcaatatatatgatttataccaataaatgacatgttaagaccccgtttgtgagctggggcattttttataattttgacccgagaagggtaaaatcgtaatttacatgatatatcatacttttggactatattattatatagtatgtttattctgtctatctgcaggtactttctgacaagccaacgcggtatagtcacaaccgggtattttgggccgaactgggttcggggcccaaaatgcatttttaggatttatttatggtatgattttgataaatgagaaatctgaaatgcatgtattatgtatgtgtgatttgaatgacaattatacccttaataattatttatgacattatttattccttgggagcattttcgtcatttgaccacctattctattttcaacaatagggtaaaattagattattgttaactgaaaaattaccatttctgggtttgaaccccatagccaaccctttctctttgtcttcctcatcttttccaatatcaccctgttgggttttatgccctaaataaaactctttacaatctaattagttat

SEQ ID NO: 311301 - DNA, 2531 bp, Cannabis indica
ttccctctatttttgtgggttgtgaaggcccaattcagagtttgtcatgttgtcacgtgaagttgtgcaccaaaatcctgtcaagccaatgtctggctgaccatgcacctacaggatgcatgctggcagaccctacgatgtctagaatttgcctatgctccatagggctggctaggggtggctagccagtcccttgaggtggttggtccgtcatttgtcgtcctgttcaagtcttcatactcctcgttagttaaagtgctgagtagatgacttggccttcttattggcaagctatacaaccacatggcactaatattggccacgttgacaagccgcgtcaagtgggaaatcaggataacattttctcccaagtctctatgttgacgtctatgtagatagggactttccagcttagctgggactgatgtagccttaactgggtaaatcttactgcatatttagtctcctgctcttgacttcctgatctcatttcttgcagtaagttaattgcattatacttctacatgctttttagttaaacactgcatgccaagtaaagatgcggtcccacaaaatctatataagcttaatggagggaaacctctcttctctctctagagaaaaataaaagctcctccttttctctataggtcgaagccccacatttcttcaactcccaagattttcgtgccattttgacaatccaagcttcccaatctcttcaccaaaggtttcttgtagtgggtaagctttctattcctgctatttgcttgatttagttgattttttcatggttgcatgaagcttttcttcgctttgaatgtttttcaattcccacgttagattgtaatcttttcggtattttaatctgcatgatagtcttaggatgtataatgtgtgatttcatgacaaaaaagatatgattttgagctttgttgtgattcttggctctttgagtcatgaagaacacaaagaacgtgttcaagttcttgaaaaatacacgtaaaatacacgtttagatctaacatacaccttggtcagcatgggggtcttgttcaagacctggccgaccatgggtcttcatcatggggtctggccgtccatagggtgatatcccaaaagttggccggcccacgcccaggcataaggaccctggtcggcccttggctaggtcagggaacttggctgaccctctctaagcttgggaaccctggtcgagcaaggccaagtgtctaagcgagcagtaaattttttgtccccttttgacctcagcaaggggttaatgacggccttgtatgcatgtacaactataatctcagatgtggttcccttaggaactatgtataactcttgatagtgagtccattatagtcaagtgcacaatttaggactcaatttatctaagtaaatatacttgagacagtacttcgctgataccagtcttgtataatgtaatttatctggcaagtacccttgggtacgattggttggaactcaatctatatcttgtagctttttcgggttgctcacctccccttatctcttctatgcatgtgattttgagtgttggtctggggaggtgacaaccgctgtgtcataggttcagtcagtcttacttttgagaggtagcatccagtttgtcccttgcctccttttgagtgacctttggaccgataatgatatagtgtggccaaaactaaacggtcgtgctatagtgtgccaccatatgatcctcatgttgctagggtggtaacgatgggtagagttggcatagtagaggaggtcgcataaccccttaacgatagagatctagaggtcagtcaggtagagattcctatggttaactaaggtgctgagagtctgaacaccaagtctaaggtggatgctccgcctgctaggaggaagacgtgcaggacttgtgatgtcctccccaactaccctttggactcatatgatgttgataggcaaccattgaataggcttggtcagccctcaattagagaccatgtcttggtacagtcttcagagcctcaggttcttaatgctgggtcacagggagaccggtgggtctctccttcatctgttatccttgtcgaggcttttgataggatactggcgagtggactagtgagaggcatccactaagaggtgccctcgagggattagagagcatgccagcttaccttcagttggatggcatggtcagagtgccacatctagcaggggctagtattactgttacacccatattttagagatatagtcgcttacttcaagatgtgtccaacacaatgttggattttgtgccctaaataaaactcatttcaatataatcagatttcctaattaataaagatcagaattcacttttatgttgcatggttcacatgatttatttatgattatatttaatgtataaattctattaagtccagaacatatataaatatgtatttatttgttcataattttagtgtcatcagaacagtagaatataatcatgattatatgttcaaaagtttaattcccat

SEQ ID NO: 311302 - DNA, 1269 bp, Cannabis indica
aattctatgaccgtcccttacggacccttatatacatacaagacaataacagtcaggttatggtacggggttaccatttgaacagattgaaagttttgcttgcgtttcttactcttgctgtagtctgctaagttattaaagctataaatgatatctcttaacaattacacagtaagatcaacgtctaaaaacttttttctttgtcgtttctttatgtttgtaggtagagagactattattcccctctcagcaaaacttgaaatcagatgagcaagagacagtcatgttatgacaatcgattcagattctacctgaatgagtatgaatatcactgtcgagtgtcgatgtcattcatttggttttaaaacttttcctaaacgatactaacttttgtcgtttgttcataacgaaggatattcatcaaatgagtgctttatctgttgcaagcaatagcgtttgccactcagattgaaaatacagtagtgtcatgtaatcctacattgtagaagacgaatttcactcgcattgtaactcatatattccgatctttctaattcatggcctccaggaaaaaacctcgccccaccctagagccaccaacctagtggtagtgcaaggcccacctctctacatacaatacattaggccattgacaaaaatgcatcactagaaaaacctaaaaaccataaataaatgcacttgtcgaaggataaaggaaaaagtgtctaagagtaacgagataagctaagaaccacatgcagtggccactagcgatgcatattcaggtgtgtaccagattttgggcacattcgagttttgagttttaagtttgggaaaatcaataatgaacccacccatatgtgtgtcgggcttgaccaggttttgggtggatacgagtgggacaaccgggttgggccttgtctacattattttattattcttattattatcttttttttacattttggttagcagagagctcagatttagagccaagcaaccaccaccgccgaagtcgaggagatggcttagaaggcagcgacaacaatcattaacaaaactgagacaaaaaaagcccaaaggtgtcaggtggtcattacctagctgcgtacgtgtgtggggaaggaaggaatgggagttggtttgctttgtttggatttagggtaaaatagatatgagagagagaggatttgttttgtttgaatttaaaaagagtgagtattttttttaaagagtaatttgcggctaaatttcaattgcatttaatct

SEQ ID NO: 311303 - DNA, 1466 bp, Cannabis indica
ctataagaaaaggaacctttctccttgttcttgagttaatacaaataacgaggattaggctattaccgaactgttcggggctgaacctctataaaattcatgtgtctttatattgctttattatctttcaatcgttataaactacttgtcgcttatcaaattagactcactgtcgttggctaaaagcgaggtcaacacatagctcaattctgaagttatcaggtccaaaattggcttacaaggcagactagtacactttactagggaattgagtagtgtaattgagtgtgggatattggagaacaatgtcacaacccatgtggcattgtgtgcaagcagcggcaccccaaaacacatgtttccaacacttctcaccaatgtgatgaattctaagccgaggagtgacatcccttgtcactccatttcaaattggtgcatctttagccgaaaataactacttttccaatgtagatatttatttatttgtattttttatacatcattaaggatgatatacgagatttgttagtgggacaccccaacatgtaggtgatcactaacaaatcctaaggcctttatagagagaggaatatgccaaaagaaaggggatcgtttttggactcatggaatggcttcctagaacaccacattcctttcttcacatttttcctaagtcctccataatttgtcgataccgaatctccttgattctaacactattaatctacactgttaccaagaacaggaccattctcttttcttatttttatttgttatttgttcccaagaaccttacaagtacaaactttgatcagatttgtgaatatcgaatctcccatgagtcttgtattcataagtcttgatcgagatttcacctagaaatctttcgttgtgttaatgtccacacactcttgagaacataactctggtgtgtccgatctatttaataaaagcaaaagtagacgtagccccattaccatcgtgacatgggggtgaactactataaatccctggtgtctattttatttattgcgattttatttagtcaaattaattcatcgcagtcctctttatgtttacgatcttcttaatcgcgtcaataggcacgttaatgaaatatgtttattacatatcagtttagtcatgcataatcgaattatacacaacacctttactacttgtctatccacatatgtgatctgaatcaaaatcacacacactagaagtatagtgtatagtaaactgtacttaacaacttcatattaaagattcccattacttaaaaacactacctacttgtttcatacatatcgtataatttcaattctcttgtacatccttacaagattatactttctccatataaataagaaattttcagatatatattgttgaccgaggttttcggcaactaataaagtatgaatataataatgagctgtaagaaagcgagatgaagacttttt

SEQ ID NO: 311304 - DNA, 719 bp, Cannabis indica
tgaaccttcaaaatctaacacacgggcttgtaacatgtctttcgaaatctaaattgtccttttagattgacccatggccttttggagactcttccaaaacttgtaagtaagctttggatctctatccaaaactatggattttgaagctccatggagacacactatctccttaacatacaatttagcatactgatccactgtaaaggtgcttttcactagtataaagtgtgctgactttgtgaaatgatccacaattacccaaattgaatcatacattccagtagttctaggtaatccaaccacaaaatctatggtgacatcttcctttttttactcagcaagtgtcaaatgatgtaataaccctgccagcttctaatgttcagccttgatgtgttggcagggcaaacatttagacacatagtctaccacatccttcttcataccaccaccagtaatagggtttcaaatctttatacatcttggtggacctggatgtactgaatatgaagtggtgtgagattcatctagaacctctttcttaagcccactatcgctcggcatacaaactcaagccttataaagtagtatacctgttgagttttgtgctctaaataaaacccatttcaatataattagatttactaattaataaaagatcataaatcgcttttatgttgcatggtcaaaagaatttatttcatgattatgtttaatgtata

SEQ ID NO: 311305 - DNA, 508 bp, Cannabis indica
ttttatttatttaatttttggtggtgttttctaaaatattttttaaaaaacaaatagtttaactataatattaaattatatatgtagatatagtaaattgatcattttattttgcttaccaatggatgatatatttcaaattcataagaaaagtatcttaatttaaataagacatttattaattgttactccaaatatatttatttattctcttttcaattctcttattttctaattttttattagatttatgaatttatgtgatattttatagtaaaaacaattatatcgtatatagtcatcaaagaatatctacctatctatttatacttataatttaatttataattattaattaaaataaaattaagttagatatctattctatataaagcgtgcctatataactgaaattcttgatttatgagaaatttatgggtgactttttatttttatttaataaaataataaatattatttatatataataaaataataataaaaccaa

SEQ ID NO: 311306 - DNA, 3457 bp, Cannabis indica
ttatttatttatttattttgtggttatcaaagaaatgaatttttttcttgtaatttaatatctagtaaaggctagttgtgtaatttacttagtggaaagcccaaaactattctcatttttatagaggttatagatactttgtttctttctctttctttcaacaaaaatacactttaattcttacaaaaatatcataaattaaatcaaaattaaatatttacatttataaatatattacaataatttcatgaaaattttaattaaaatctaatttattttatcatttaaaataaataaagtgtattttaactactaatcacaatccacaactatcttatttataatccctagcaattcaagcaaagaaaaataattatcaagttgaataaacaagtcaaaccaaataaaaccatcctattattttaaaaatattagtagagagtctaaaattgctattaatatttttttagttgtaactccaaagtcgtgtgtgtgtgcgcgcaccaaattttttctatttttttcataagtcttaacacaaatagtatcgaaaaatctcaatagtgtaaagttctcaatttcaatgtcctcacatgtattgaatgtattagtatttaaaatgtgacactctttgaagttggaaatgtaaatgagagatgataaatttttaggacaagcaatttaaacaagtattgatcacaagataacatatctaattaatagaattgaaatgacaaataacatttggaattcacatgaaaaatttacaaaataaaaagtcaactagctaactaataataaaaaatacgataacgaacctatatttttagagagacaactgatggtttttttttaattaaaataaactaacatgaaactctttctttgtttatttatttatttataattattattttttttttgtttggaatacgagagaatggacaaaaaaatagaaataattaaaataatgttattcttgttccattttaattaatttatttatttatttgaaaaaattggataaatattacttgaaaatcgaaataaatgatgtttgccttgttcttgtttttattatttttttctatttttttaatgaatttttattttttggacaaaaaacatataaaaatataaatacaaaaaaataaaacaaaaactctttatgacaaaagaaattcattccaatattaaatgtcgtatttgaaatttcataagtttattttgccaattcaaatgatgaataaagttcaaaaaattattttctcaactctcataactcaccaaaaatgaaaaaaattacactcaaattttttcaactatatgtgttgacaacaatttcaccacacatttagaaagtgcataaaagaactttgaaaatcacaacttgataataaaatatagcagcaattgactcaaaacgtaactttacaatcatgcttggataattttgaaaaaattgacttagaaattcactacaagaaaattactctatctcgacagttaaaaacacatatgatagacctatcttggcagttatcaactatcgagatagaggtaatgacctatcttgacaattaagaactgccgagtgaaagtggtgggctttaatttggctgacaagaaaaactcaatgaaaatgtagttttcacttaacttgtaattgattttccaatgctactggcagtttgacacaaacttttgtattttaaaattattttgttttatatatgaatactaatgtatataaaaatatttaaaatatgaagtaattctttaaattaagaaatgatatataaagtattttccatatttttttatttatatagtttattttataaaatatattaccaatttgtatataactttactctttataattatttattattgttaattttatttataaaattatatgaaaaataataaataaaaattattttaaacacttaaaaagaaaaaaaatattgaattattaatattttacaaaaaaaaaaataattattattgtaaaagaaaaaaagttgtcacattccattctaatgtcaaccaaacacggtaatgttgctttcctaggtttattattcccttcatcactctccaatcaatgttaaacctattcccataaaatgaaacatgcataccaaacggctctttagttctaactataaatctaactaaaattatacttgaaagaaaaaaaaaaaaaaaaaaaatagtaactaagaaaatagaatattttcattatgtattaactataattattttaaaactttattcctaaaatcatgacgagcaaacaaactagtgcaacaagtctttagaaagtcagtctctactgctgtatgcaactttggaacattttcaggaatatgtgcttcccttaccttgcttatcttctagaaactgcaattgtctgttagcttttaatggtcattatgaatataattcttaaaatatgaagaaaaaaaataataaagctataaaagatagtttgtagctaacaactgaaatagtgaaacattaactgtctttcccatacctgtgtctcagcatcctatctcattcaactaggaatgtcaatcgggttgggtcgggcctgaccccgccacaaacctggcccggcccgatatcactttagcccgacccgactccttctccgactccttcttttggcctagcgagtcaagcccgacccgagataatcggaccggcttaggccggactagggatggcaattagggccaattttgcgggccgagtcgggcttttatcgagctaccagcccggtccggcccggtatatattatttcgggtcgggttagacccagcctgatttcaaatattaaaaaaaaccctaaattcctaaatgaattttactcttccaccatttccctttttcttcttcttcccaactggcccgaatctggtttaaacccattgtcaatattaaaatcttctatattctgttattcatcttgtgtttgttgttatttgaatcattttacatttcaaggtttagaaaatctcgttgatgacttttcagctatatgtaaatgttcaagagatgtggctcgtttgcatttgcaactagaagcagcaagacttgcttcatctgccaaacagtatcatctgattcatgtgctttttgtgaccgagtgctttccaatcccgaatctgtttacttgtaaagatctcatcacacaagaaaggaatgcctagctgtatgaaccaaatcgtaataaattgaggaataaggttcaactcccagttgggtcatgtgaacttccagttcctcttaatgctaaaggttaaaccatttactcttattgtaaatttgtttctttgctatttgcttttagaaaactaaccaagtagttgtaagcagaaaataggcctttgtaaaaagcttattttcttgaactaaacacaaataacttaagtggatccattc

SEQ ID NO: 311307 - DNA, 1258 bp, Cannabis indica
tctactacatcagcaagcgtctcattggggccgagtcaaggtatccccccattaaaaagctggcctactgcgtagtcctggcctccagaaagctaaggccttacttacaagctcatacagtcaaggtattaactgaccaaccacttaagcaagttctgatgaagctagaagaatagttgaactaggtgagtttgagatcacctaccaacctcgaacaacaatcaaagggcaggcattagcagagacttcattgcttaatgcactagccttgaagaagatgatcctatgattagtgaagatcaggtccacacgcccgagactgcagctcagaatgacactggatcttcttggaaactatatgtagatggatcctccaatgagcacagttctggtgctggactcatcttagttacttcagggggattccaaactcacaatgcattgcagtttgagttcaccgcaacaaacaacgaagtagagtatgagccactcctagcgagactacaattagcattagcaatcaaagtcgagtcactcaaggtctacagtgattcacatctagttgttaatcaaattctcagcaagtatcaagctcgagggtcaagcatgatcgcatacttaagcaaagctaaatatctattagcccagctcaatcactactccatccaacaagtgtcgcgtaaatagaacgccaacacagactcactagccaaactggctagtacaacaaattctgacacttccagtgtagttcttgtcgaatacttcgccaaacagagcatttatgaagactcggagcctattctgatgatcaacactagtccatcatagatgatcccgactgcacaatacttagaacaaggtattcttttaattgactggaacgaagctaagagattgatgagaaatttgttgttgagctaattttcagcatcaatatcaatagtagatagtttaacatttttcttttctttaaaaaaattaaatactttatgatgccaaaaataaaatcaaaataataaaataataaaaaaaatttttgaatattaatcatagttacaaacaatgtacactaacgaaaaaatgatatcagtgctctttgatggtatatatattttgaaaagtaataagcgtttggttggaaagaatgaaaacataggaataggtatagtataaaataaattttaaaatgcattaaaaaaattgataaaaaaattattaaatttttctcatcatacaatggaatggtctttccttc

SEQ ID NO: 311308 - DNA, 883 bp, Cannabis indica
ggaggcccttagttggttgaagtcgaagaatttgtccaatgtgctagttgagacagattgtattgctgttgttcaagctcttaatagctcggttgctcttccatcagtttttggtttgtttgttcaggagtgtctatcgattctttcttctttacttaatgtttctatttgtcatgttaaacgatctgctaacaaagccgcacattgtgttgctcacggtacttgtttttggtctgatcgtctttttactgagagcaatgttccacatgctcttcagtctattgtgatagcgaatattactgtttgatgaattaattttgttcaaaaaaaaaaaaataaaaaattataaatatagttaaatataatcattataaaactagataataaaactgtaataaaaaataattatcttggtttctccattgcaattaaataaaatctacaaattgcataaataaatatgaattgcaaaacattaacaaatatataatataagttttaaaattggaagaaaaataaataaattgaaaatctacctgaatcaacaacacttaaataagtaaactgataaatttaatacaaagataatattagagtttagagtattaaacaaaaccaataaatagacatatagaattgtctaaaaagattaacaatagaataaaaacttatttttagtttagtttcagaaattggtgtcaggttatcatataattatatatgaatactatgaaagattttatcttgtctctattttaatctttttcttcgtctaatctcttaacttagaaacttttcatctaaaagttaatttccttaaaattgttatgagttattaaaattttattataatttagttaattataatcataaatatataaaa

SEQ ID NO: 311309 - DNA, 934 bp, Cannabis indica
ctccctctaccttgctctctttgaagctcacgactgccacaccaaacagcccacagtcggtgcccaaacccccttctctaaccttctcgcactctctctcccctattctctctctcatgagatctccgcctaactcggctgagctttttccagccacacaatagagagacagaggccatctttgaaatcaggacctctcgaaacctccaatcccagatcttcgtccctatttcattgtcttttcatcactgcaagctcttcattggagttcccatccatgtcattcaagccatgtttaggcgagcttaggcttcaccaagagatctcgtcggagctgctcgtgtttaggtctgatccaaccaccttcgaacctcgaggaggtgaacaattacagtcttgtgctaccattgacatgagtttcatcatatctggtgttaacgtagattttcgttaactaaattaatagtattttttgcaataaatatactacagaattaaatgatgataaataacatcagatattttacgtggttttgtagttaaaatctacatactccacgattccttattattaaggatattttttgggatacaaaatacaaatcttagtatttgaaaatataggatttctatctcttttttttttcgtcccttttcctatggattctgcccctatttataagaatataggttggcagttattctttttgggactaattcatgtacaactgctaatgaaatatgaacattctccacgtttcatttattcagacatggaataatatctgataactacccaactgctccttacttttatccattagacggttatactgactaagaaggttgtatctcgttaaacctgagttctccttcttatccatcttaataggaaaaatcactaagtgttggaagcacttcatctcgttgtatc

SEQ ID NO: 311310 - DNA, 1008 bp, Cannabis indica
aataatgaacattgattatatgacagaatttaataaggcctttgggttttattattattgcttcgtacaggtcgttcaaattatgttaggcaaaaggcaattatattgtgggaagtttcttcgatgtacatcttcaatttaaattgatcatcaaaatctcagagtcatcatctgatggctggcactatatacgcataaaacgcacctaggttgactgttggtgtcatattatcccacaatcattttattaattaggtgcacaaatatacatacgtatttagtcgacataaataattaattaatgccatttttgaatttgaaatgatttaatcatgcgagccacatttatgtgagatttcattcaaaaagttcataatgttttgatatgatacgcacacacctggcatgcatgctatgacttaatggtgctagctgctgctaatttcttggatctacagtactactactgcttttattttctaatatatttatacatgttgctagctacaaaatctacaaatgcattaccagctctgatattgtcacatgtatggtagtttgcgaagaaaaagacaaaagtcacttaattatattataggtgtataatattttacgaaaaaataaattatgagaatgaacttgatatatgttgccaatcttttgttgcatgactgcatttaatgcactacataggcatctttttgaagtttgggcatggacagatcattagggaacaagacacacatttttataagtgttatttgcgtcataacctctataaatatttagtttattgcaattaacccccaattttaaaattttggtggtaaaactttctaaactcgtgttctgttagcagtttagcatttccatcaatttttagttgttaactgtcatggtagaatgtgtacacagtatacacataacacaattttattagtcgaggtaaataaatatttaaaaaaataaaaaaaataaaaaaattctttaaaaattaaaattaaaaaa

SEQ ID NO: 311311 - DNA, 910 bp, Cannabis indica
aaaaaaaattaatctaatggtcaaatttgagattcgtttagtgagcattacatcgtaatattatataaaatattttttgaaagataaaatacataaaataactattccctattagtggcttacaaaattcttctagaaaaataaaagcaaatcttacactcaatttttatgacatatttaacgattcacatttcacataaattcataatagcattaccatccattcacacacatatctcatatgtatacataaatttataaaacacaggcaacattttatatacatacataatggaatcacaatgttactatttgtttgtttagtggtactaaaccaaatacgtaacagaataatagtttctgattatcatcgtaacacatctttaggatcagcatatgtatatacattaaatataaaataaatagacgaaaaaaatttacctcttgaaacctatcaagatattcttgtttcttttcataagttgtattgtagtgccctcatgctaagggacactacagtgctttttcaattacagtgcagtctttgctaatcaaagaattttcttgaaaaaagtgtcaaattaaaaattttatattatatattatactttatattataccaaattatttacaagtaccgggaccccgtttttaaacttttaaaacgtaatataccaaactacatattattcaggtcgcacagcgactacaaaatacaattcccagatgtctcgagaccgaacactctaggtcgcgatgcttcgacatgtacaacctcatcctaactcaggttcactcctgttcagctttcgccttatctttacctacacatggaagcagaactgtgagtcaacagactcagtaagaaaagcatataacatattgttgaccgagattttcggcaactatt

SEQ ID NO: 311312 - DNA, 659 bp, Cannabis indica
tttttttttctttttcttatgttttattttcacttcattttgttttattaacgtgtttcactttgttttaggttatggaaaccaaaaattacaatgccgaattcaaaaaacttgataaacggatgaaagatatcttatcaaaccaaaaaaatattcatggcgaacttgtgatattcaaccaaaattttaaagatttttgtaagattctaagtgaatacacaaggagtactccatccggtacatctaatgttgataagtgtgttcttgaaaatgatgttcctcttactaaggtaaccggtttcttttcattctacaactaatgaatttaaattgctaacttgtttgtttattttaatttcagaaggacaaaattgaacattctttatctggccatgaagttgtacctggtaatgttcatgcggatgatggatatgttgaccctcaaaatgaggtacaagaataaatatttatcctatttatttctaagtatcaggttactttttgtagatacttattatcatattttcgttattattcttggcaggaactcgaaggcaaaaaattgatgggtgctttagttatagaggatcatgattgtactgatgaggttgttgatgcggcttattctggtttcagtgcagcaatgaaatttattcaaa

SEQ ID NO: 311313 - DNA, 1568 bp, Cannabis indica
taatttaaaatatataaaaaaatttaaaatcaaaaaaaaaataatttttttttcttttttcttctttcttctttctttttcgttgttcactcagcctcagaccagagatctaccatcatcgttctccctttcccagatctctttgcacgacaccaccaccacctcattcccaaacctcccgcggacataccatgccgattctcccattttggatctctctcactcctcttcttcttagtgggcatcgaggacaacgggatcttgactcctccccgtcaagatcatctctagcactgtatgtcgacggaggaactcgcaactacaggaggttgggacgacgaagcttcgaatctcgacgagcttgaggatgagatagtttggagttaggcttctaggctgaggaaggacaatcttgttcttttttggatctagtatttttttcatttgatttgtattttttttttttttttttgcttttgttggatttgaatttgtttgggttttagtttgattttgttggaattgaatttgatttgggttttattttgattttgttgggttgagaactaaaaaataggtttcgatattggtggtggtggtttcggtagttgtggatggtggtgggcttggtggtgttgatagattgaagcagaagaaggttgaaaaattgaaaataagttttgataatggtgtgctagtttcggtgggtggtgggtttggtggttgtgttatgattgtggtggtgggaacaagaaggtttcttggtagaagaagaaagacgaagaaggaaaaaaagaaaaaaaaaaaaattctaattttgaaaatttttaaattattttttaatcattaacattaggttgattaataaaattttgtcacgtgtacacgtgtgtacacagtgatagtccactttggtacttaacaaaccaaagtagagtagagagcaaaacaattatgtagattggacagtttagcctttattatttcagtctagggttgatcgtgctgaacttcaaagttcacaaaatttggctgtaaattactcttatttatttcatttaaaaaaatgtcatattttttttatatgtaaatattattttggacttataatttacaaaaattactaattaaacgttgtattttgttaaatgtcaatttagacccaatatttttcaaaagaatataaaatataagaaaattctataatccaccatcttaaaaggaatgcaccgatacatctttattcattttagtatctgaaataattttttactcaaaatttttatcatggtcatataaattataattatttaagatatcctgcaaaattttaagaaattcgataaagtttaacacgccgaaaatagcgttcaaacagtgtgttgcactcgtgactattttattttatacgcatgtaagatagattgtttaaacattattttctatattgtaaattcttctgaatttctcaaaatttcgtaggatatcttaaatagctacaatgtacatgaatatgaaaaaaaaatagactaaaaaattcttctggatgccgaaataagtagagggtg

SEQ ID NO: 311314 - DNA, 4319 bp, Cannabis indica
gactttaccaacatatcattgacttagacctccatcttcctccctatttgcttttccaacatcttatttactagtcactgatatgttaccccaccattcttcaaaccaaaaggcatgactttatagcaataaagtcccatgttggttacgaaacttgtatgttcttggtcagggacgtgtatcttgatctagttatatctagaatatgcatccataaatgtcatcaactcgtgtccagcagttgcatccaccaactagtcgatccttggtagtggaaatcaatcttttggacaggctttatttaaatctgaaaagtcgatacaagttctccaagtaccatttggcttcgggacaaggacaagataagatacccatgagagatagaatgcctcgaatataaagtcgttagttaataacttatccacttccgttttgagtgccccttatctttcaaaatccaagggtcgtcttttctgttctttagctgggtaatttgggtcgatattcaagtggtgacaaataactttaaggtcaatccctagcatatgtgagtggctctaggcgaactgatcctggtttgccttccaaaaaattattagttgctattttattttttctggatctaaaataaattcctcccattcctcaaatggttttaacatgttcttttcatcttgaactcgaggatctagatcctcgtcctgtttctcacctttctctgttataactgccttcaattgatggctagcctttttattttgtagctctatgcgatagcattcttgagccattagttagtcacctcgcattacacctatacctgtcggtgtttgaaattttaaagatagatgtttaattgaactaactgcccctagtccaattagtgcaggatgacccaacaatatgttctaggccgatggtaagtcgacaactagaaaatcttgcattagggtagttgataaaggcgtctcacctatagttaatgggagttcaataattccttgtggcgacattgtccctattgaatctgcacaaattcaccatgcaaggttttaacttcgcattttgtaatcccattttcctcagtgtatccttataaaggatattgactgagctcccattatccaccaacaccctttttattcttttgttggtgagctagattgtaattacgagtggctcaacaggtgggcacctcacgtgctttgcgtcttcctctaaaaacacaataagaggttcttcagtcttagctttcgttgatggttccagagcaaatgctgaccgctcattcttgatttccttgacatatctcttttaggcattgctactttctccagcgagatgtggccctcccgagataaccagaatgtcctcacctttaagaggaggaggttgtaatctttggctgcctgggttattgggaaaatgttactggttttgtccattgccttgtcgctttacatactgttgaaagtagcgacgtgagatgaggctatctatcttgtctttcaactgactgcattaatccgttgtatgcccaatgtccttgtgaaatttacagaattttgttgcatcccgtttgtgacacgcatgtctcatggggttaggcttgcgaaatgcaaccctgtgctcatgtgtgagaaagatattttcccaagtttcattaagctcggtataaacagtgtaaagtggcacgtacttatcatgcttcttttgtttcttattatccttggctgatttcgtagagttgtcttttctgttagtgctagagacacctagattgttagccttcattgagatggtacttcatgagacagtgttgggtttatttcccaagccagcctttatcaatttcatctccttccttgcttcctcttttcgtaggaacacctgacctcttttattaaactcactgatattttttacagggcgaccctacaagtcatcccacatctcgcctcaactgtcgagagatcagtcgtaatccctactcgaagagtagtaaattttatattgtcattcaagtttctaactcttgcagcagttgtactaaattgactgcagtatgccttgagtgactcgccaagctactactttacgttagtgagggaagacgcttcaggtcgcctatctcttgctgcctaaaattgcttcttgaaatctttagacaactgttcccaataggtaattgagtgatgggtgaatttattgaaccagctgctggctgccccagttagcgaggtgaggaataaaatacaacgtaagttattcgtaacagtactggcttgcattattgtattaaagttgttgaggtgagcgatcggattcgtagtcctatcgtgtgaacgagacatgagggtttttaaatccctgaggaaattcagtgctcataatatttggatggaaaggttctagctcctcatccaagtcgtaatcaggtagtttcccatcttggtatttcttaaatttgttttccaactcggggatttgcaattagattgggttctcttgcttttggttggaattgagttgtttgcgtaaatcgggcttcttccaattcaattgctcacaaagatatggtcgtcttcaatcatagttacttgctgaccttgtgcctgagtaactctcaaattggctactccttgtatgactcatgctttctcgatcattactacattggggtctatcccctcctcacgtatatcgactctaatctcgagatctagtacgtcccaaactagagcttgcctcatcatgtagcagccttctcctttgggaaaggtttgacacatgtcccctgctggggtttgtatacgcctcctccctatcaatgcgagaaggatgttgatggtgtctcagaggtaacccgcttatcctaagttgagtcccaggatttctcttgttaccacaagggatttcctgatccctagtcctgggctgtcttcttcctgcatttctacgagaagactctggtaaatcattgtcttcattcccttaggttatgaatgcccggggtctccgaggcacttcttgacgatgtgcctggtcatctagttgttcatcctcaggaacatctctagtttcctcaggttgctcctcctgagtgttctgggggttttcctgagccatctcctacctcctggttctcgagccctgaggtctacctcgtggccttgttactcaaaaattaggttggttttgtgtgttgctttccagtgtcgccctggttacggttgcctccttttccaactcagagtttcgttgatttgcctcaaccaagcatttctagagttgacaattctccaactcaaccaacggtacgtacctagtgggatcataggcaccctctctcatagaagtagaactgtcagtatttgtgttgggttcctcattcccagtttctgggttttgatcatcatcacattggcttcttcttgaatgtgttgatcgtgttgaacgcattgttcatgaattgggtggcctccgtgagcccattggctcttttccaggatgaagatttgtctcttcagcccccattatcggccatggagatgaaattccttctttggttaggagggatttttctaagcttttatcatgtaggctctcaatgaaagcatcaaactagtaacgcagattttcgttaatgattatgagccaattttgtaataaatcaagcatagatataaagaaaataataacgatgacaccaagatttttacgtggttttacagttaactttgcatagtctacgagtctatcttatttagatttttttgatacagaaccaggattttttacaatcagtataatcctttttctctatattatttttgtcccctttttcatataatctgctaatatttatagtaatataggttggcagttaattacatttaagttcaaattctataacaatatttctcgaatatgtgggctttaattacgctccacgtaaataaatgcaattaatatttgaaaatcacatagctgtgatttaaaccgtttttaaaggggtcaacactaacgtggattaggacacactgccaaatgtatcttgctaagatgtctcacctagtacatgaacaactttttttattcataagccttccagcaatggcatgagcaccagtgtactgagcaaacttaagaactgctctttgaccataaggctttgcagattggataatcatgtccctcaagtcattatacttagttattataatgtatattatacgctaagcgttttaataaccatttcaccttatcaatacttttttacatatagcgaggtagatgcctcgctatgcattgtctat

SEQ ID NO: 311315 - DNA, 1350 bp, Cannabis indica
tggctcccgcatcatcgcattttcgggaatcccctaagcaacccttcaggaatgagtggacaagccccatctcactctgctcctaccgcaagcttgaaaggacctcctcaaagctcctggagtaagaggtcctcaaagggtagcaaccggatggaagacaagcgacaacgaagggggtacacccctcaatatacacaatacacggatctcacggacatgcaagagcgagtgtatttctccacgaggcaaaatacacactaccggaagcctcctcccctgtacagggacaattcgtgaagggatcccaacaagagatgcgaatgcaaaaatttgaaggatgagatcgaaaacttgatcctgttgggtcatctgtatgagtggatcaagaaccggctaccacatctcaattcggttccagcaagaggcccgtggcctgaagtggcaccaggggtgcacccggaacacccgttgtacccctaggggagcaatccctcagcaggtccatgggctcccaccaagacccaatgggagagtggctatgatctccggtgggccccatattggggggaccaccataaaggaattaaaacgctatgctggggccatgaagcatgatgaagtgtgggaagtcacccagcttccagcacaaaggccccgactcatggatcagcccattactttcacagaagaagatgcaaaactggtgcgtttccctcatcatgaccccctggtcatagagactcccattgccaataaaattctggctagaatattgatagataatgggagttccgtgaatttattgtttaaagaagccttcacagccataggcctcacagaccgggatttgtcgcccagcggttctcaactcataggattcaatggaaccacacttatcccaatgggaaaagtgagactgccagtcaccctgtgcccggatacccctcagagtacttttaacaactgcacctttgtggtggtggactgccacactgcatacaacgcaatccttagccgaccggccttggttgattttggcgcaatcaaatccattcagcacttgtgcctgaaattccccactcaggaggccaaagtagggaccgtaaggggcaaccagggggaggccaggcagtgctataatgtcgcagcacacttgccggtggtgatggtccgtgggaatattgatccaggattggcagaagaggatgagttagatccccgtgtgggatccaaaataatcttagaacctatagaggacgtcgaagaagtacaagtgtgtgacctcgaccctaccaagatcctccgcctaggaaaaagcctagagccggaggatgttgggttttgtgccct

SEQ ID NO: 311316 - DNA, 2789 bp, Cannabis indica
tgtacctcctaagcggcatatatggtcggagcttgtattctagaagcttgtttgattcttactccttgaggagaatttagagctctgggctgtctaggaatagaaacgtgtccatgtgctactagttatttgagatagacgattggaattcagacccagttgtataagtggcctttgaaaactaatccttccactcatccctcaaatagtcacattagtttgttgtatgcacaataccaaaatggtactcacactttttattagggtccctcttttgctttccatcattgttcattggtggaggccttttgtaatgtaccatgttgctagtagctttgtataaattttcccaaatatcgattaagattgtgtactcagagtatcttggttcttgggtttttcctttcttcacagatttgctccaacttggtacttttgaacttcttttgccccaagaactacttacatttgatttttgtgcttcattctattgattcatttttttgggagcgacattatatcaggtttcagccactccaaagctagagaaacttgaatgtatagttggctgtgtagaagtaccaaatccataggcaattggtgttgtgaatgtaggtgtcgaaggtaaaatagccaaagcagttaattaagttgtagaagtgtttgttgatggtgctggaagtactccataaacctgagcataagcatattccaaatttatgaatctttgggctctagataagaaatcatataatgaatctgcttttcatctttcaagtttatcccccaacaaagatctagtgatttctcctaacgttaaggccaccatcttcatatcattagtaaactttatcttggcagcattatccattatacgttgaatgtactttttgaggctttctccttgtagttacttgatgttagctagggaactaacctgcaagttgaaatccttagctgctatgaattgctttttgaacatagcctgtagatctctccagttacaaacaaatcttggagataatcttttccacttgtcttctgtggacttggtcggaattagtgaaaagcagaggaactttgcatcatcactggccatagccacttgcatcattctgttgtatttggatagatggtccttgaggtctattcttcctccagtaattgttcattaataattcttttcgctcatggcttcatttactcttcttttgaatcagatacagttccattttgcttctgggagatcttttttgtgagcttcattaactcttcgactatgtgctataaacactgagtttattgtctgaagattctcttctacgaattcgatcattgatatgtttcctaatttcatctccacaaggtctgccttttcttccttggcatttagtcttctctaaagatcatgtgtgcagaggcttccactgttattatctgactaaggatgcaccttttcaacaccatcattttgactaacagaatcatcgtatgtgatttgtatgttaccgggcagtaggctttttgctttggtattacatttgtagtttttgcgcatctttgccactagaatcagtttggtcatcctgtagtgaaacttggtttcgtttcttattctgttgaggatggctaaaagacttagacttcttttgttgttcagcatgaggagccttcttttaagtttcgtatacttttcctttcccttagtccttatgaggttcttaagctccaagaattttaggatcaaccttccttgtggtgttgtcctttggtgtaatgccctacttgcttaggcacgcaacagtgattttctacatattgtgcacgcctttgctaatcaaagggtttctcaaaaattgtgtcaaatttaaacttttaattaaactttgaacttttataaacatttaaagggtcttaaaagtcgggatctcgtctttaaaagttacaatcatattcaaaatacattttataaccatgttgcttcgggattacaaaataaaggcccccgtcatcgtgagactgaactctccaggtttaaccatcctaatatgtaaaaccatcctcgagctctggactcattggtactcaacctttgcctttcccttacctacacaaataaaacatatctgtgagtcgagagactgagtaagaaaagcacaaaacatgtaacatagtaccgacttgtatctaggtgaccatacacctagttacaaggcttcatatgcatcaagagcgttcttaaaagaagtacaacccctgtacaacatgcactaggtaatcttctcatacaagtgttggtagtgctgaaacgcacttccagtaccactgagtgtttaccacatgcactacgtactcatctagtactagtgttggtaacaatgtatcgtactctttatattataccaatgcactccgtaccgctatcgtactagtgttggtagcatacaaatcatttaagaagcatgcatataataaacatacagatatacatatacgtcactaccacaaatatcagagttcgcgacggtccgaaaaatgtttttttcgggaaccgtcgctaaaaaaattaagttactatttaaaaccatctggaaaaatttagtattccagatggtttaaaatcgtagtaaacaaaataggcgacattttttaataaaatgcaattatttaatggatcccttatacctgacggtttaaaaccgtcgtcgcctatagtactggcgacagttttaaaccatcgcctataagagtccattaaaaaattgctacctacttctcgccacatttcc

SEQ ID NO: 311317 - DNA, 4284 bp, Cannabis indica
ttttcctttagctttaagcacttctaaaacctctaccacttagttatcggatgggactataatatattttttcatgtcgatctctcattagaaaattagactaggcctcaaaattgataaatcttgaaatcatatttgaatttaaagatgccaagttactgcatgctcagtgggagtattgctttgattttagtgaggtatatatgtattgatcgattcttattgataaattttatgagggtggaatcacttaaaaaaaaaatcttgggcatttgaaatgatattcctatgtttgtttcgcaataatgagttcaggagactagtacgttagttttgggcctagaaatagtttcattggaacttgtgaatcttctattactacatttttatgctttggatcaagataaggcatagatcataagtggacaagttttagattaatattaaaatagatgtatgatcacaactatctattctaatgtgatagtcgcgttaattgtgaatgctcgtaaacacaatgtattcaagatagtggattaatgcatgtgtactctatgtcacatcattgttgctactaaatttaaatgttgctaaggtataattagacaaaaaatttaaatcaattaaaatctaaataaactttccacgtagtaacattgatggcttaggataaactttggataacaaataaaaaataaaggaattcaagccttgtttatttaaggatagttcacatgttatgttcatatgattttcataatctacagtaccatatataaaatttaagaagtattgagtattcgttattcgtttgttaagatctctatcatatgattgtcataaacaaagtctctcaaagttttgactcatcaaagcttaagagcctttatgttttagaaagctttaaagtgaaaaacacctaaagtaattaatctaaacatgcataatgatatgcaattacttcttatgtgcattgtttctcgaagtgacaaggacacaataagactaataaatagtcttaattattgtactgtatgcatcttgatttaatggttattttttatatttgaatggctccccgtccaaattatgtgtagtatacatatcctatcgatgtgatatcatacataatttatttgactgcctattttgtgatggagattaatatgttgtttgttgattatatttgtccaagtgggagagatattgtgatcttgtatggactaatataatcacaaatataattctatatttccaaccatattcggtgttttctaaggagacaatatgagataagtctttcgcagcaactttcaagatactgagattcaatgcatcatatcgttttattctgaatagcctcatgaatattgtgattgaataaggattcacatctaaggttattttaggagttctaatattatgaggtaatatataggacattgcatttgataatcttggactttaatcatataaaacaagacgatcatctcaaaagttcattgaaaataccaagttctatacgttcatctcttctagctattattgctcataagtatataaagctatgtatgttggagttttaagccgacattagacaagggttaaaattttatttaaggaataattgaatttatccatcattttgttactttcgctgtaattattgatgactataattgaccagaatatggtaaaaaactccatatgtggacaaataaagataaagaattgagaccgtttgatgaacttgtgattccatacacaagataagtttaattagatatacctctaaatttttaatcgatagccactggtagttcttaatccttatatggagaattgatatggctatattatgatttccaagctatgatcaagcgtgaaagttttaggcttagtcccataataattgggagattttattgatggtggtttattttaagaataagttgtttaatggtcaaagtaaggtgaattaaagccaacagctagtctccattctaacaatggatttgttcattgctattattgagttgtaaagtggtgactatttggaaatcaatacataaggatgtgagaactaaattcttgtttaaagatcatatcttgtcaaatggctcgattaagcatggagaaggtaactgaaaaagatacatgagttaaatgaatttaaaccctttttgaggcagaacaacaagatagtgattactgtaattctccaaaatggtcaattcaaagtattatcgttagtcaatactatgtgagagataagtatgagcaatgatatgcttagattgttacttgatagtacattgctcattttatgatcttagtctattctagagacgattaaactgttatttggtaatctctataagatgaagaatctttaataaaccttatatggtataaatatttagattctacatgatgagatcaacattatactgaattgtctcatagtttagattgactaactatcattgtgattagtatttcaatttcgttgagattttttaagtagtctaaactgtaatattatgaacggcctaaagtccatgtatatcactaataacgagagatcaatattgaagttgttccatacatatatatgattattgaaggcatcctagggttcactcaagtataggcattcctattgtgatatctgttgcagacatgctggattggtgcttgagttgtcattcttatggtaccaaggatttgttagtcattgacaaaccaacatagtgacatatagtagttggttttaatgatatcgattggtaaggctgcatgaatgataaaatccacttatgagcattcatgattctaggaggagctattttgtaatttagtgtcatatgaacacctacaatttcctctctcatacaaagtgagtataatggtaaggagagttaaatgtaattaggtattgtatggacatttacaacatcttcatttgtaaaactagagtgtgtggcgtgctatgaggacaatgactttacattacaattacaatattttgtttcaatattaagagtagttgactttattatgaatttattgaatttatgtgataaatatcacagtcatatctttctctcggaacttgaggagtattattgctccattaatgatgatgacgtttcatatatagtgagaaagtcatgggatcctccattagtatcataacacgcacttacagataatatactaatgactacactgacacgacttacttgaacgtgtgtactaagaagtcattttggtttggattattggaagccaaattgtatttggtcattgggagttattatttcatgtatgatagacgtgttaatgattgatattggttgttgaatatatgcatattctggataactctttagtatagtgtgtcacacttgttgatgcgagccagtggcttagtctcagtgctatgttcgagttaatctaaattagtagttatcatcatattacatgaatattaaatgtctcattatatattatatttgtatcatgtcgatacaatatgatgcataattagttttatagacattaatatttcttgagatttctgtgtattgacactattgcatagtgagagcatatataggtgtagttatataatctaagtgggagaatattaaaatattttatgtggactaacataattaagtattgctcactcagtgttgtattagcatataatgataactatataaatcggtaatgcataatattaccattagaccataatgagatagacataacgtactaacacgctcagggcccatagacacgctctaaaacgtctttggtcagcctattggaccaagacaactaattctctcacattgggcatgtaggcccaatcaacccataatttcttataaagagaattgtgctctttattgggttttaaggtaggatgggtgttgctatagtgtagagagaatggaagagtagtgttcatcacacttaaactctcttttatatgtgtggctcaaagagttgtaatcaacatggtcattgaaaatcaaggtcaagattggagatatatttagggaaattcacaaaatactagaatttgagttaaattttagaaaaatactgtcacacgaaaatattttcaaaaatactatgtttttataaaacaccagtagaacacagaacagaataactcaaaataacagtagaacaactataaaacactagtgaaaacttaacacagtatactgcagtatgaaacttataaaaaaaatacagtaaaaaagt

SEQ ID NO: 311318 - DNA, 1710 bp, Cannabis indica
gtaataaaattaaatatcacaaacaaattataacaatactaaataaatatttaaaatatatatatatatatcatgttaataaaattatatatactaagtagttagtattggaaacatgtagttagagtaaagaacaagttcaaggatttacaggtctttcctactgatgcaaaccgagcttacttaattaaagaaagttacaaacttttatgtctttcttatccaaaaactcatttggaacccactatctattccaaaacatataataattttcttgttaatggttcttaacagattaaagttccagacacgtctattctgattcaacatatgttgggatgaaatttgtccagtgcgtggattaaacatggaaacacagaatcatgtattttttgattgtcacttgagtgcaaaggttttaacaggaattcaatcttggctcggctggtattctaatacaatccatgggctttttaaatggatttcgaaatccaaaattagcaagtttcagaaataggttttcggctgttttagctactcccatataccatgtttggaggtataaagaatagaattaaaaaggtaatgcctaagaagataactcaaaaaaatagagattggttttaaatattgtattagagttgcaggtctatcataatggtgctgctagtttgtaaatgaagttttatggaatataattgtaataccctaaggtttatggaattggattagcaacccatactagattaattatgtattaatgagaaattattttattatataattatatatgtgaaactatattgataaattacattttaagaccccgttagtgtattaggggaattttcgtaattatgactcgagaagggtaaaattgtaattttatgatatattatgcttatggactatattattatatagtatatttattctgtctatctgcaggtactttctaacaagtcgacacgatatagtcacaactatgtattttgggccgaatctggtttggggcccaaaatatattttcggaacttattcatggcattgatatgataaatgaaaaaaatttgatttattttgttatgtatgtgtgattgaaatgacaataattccctttttaattgtgtatggatatatatatacttcgggggtattttggtcttttggacaaatgagttattaatcaacaaaatcaattttttgtaaaatgaaatgttattattctgggttgagaaccttctagccgacccctctctcgctcaccctctcttttgtgatttcaaaatcaaagttgtgaagaaagacttgaatttgtgtggatttgtttgcacttggagcttaaggaccttggataatcactataatccattctcttgattttattttctgatattcaaagccttgagttgtgtttttgaatgctcttggatttaagatgcatgttgttgtgatttaaggaagtattagggattttagtgtgttttgagcttatggatgcgtatatattgtatctaggttgttttaattgatttgggatgtgtaattctagttttgcattttggattttttgggttttaagtttgaagttttgagttttactttgaatgcttttctaacaccctaactaacttaggcgtaatacgtgatttttaaacgtactgtttaattaacttataaacaatattacaaagactcgggatcccgatt

SEQ ID NO: 311319 - DNA, 1324 bp, Cannabis indica
aaagtgtagaaaaactactatgaaactaaaattcaaccaaaaatctaatttaatttgtataaaactaatgtactgacttcaattttcaaatccatgaaatgcagatctcagaaagttgaactggagttcccaaacaatctacctcaagtataatcccaaaaaaaattacatcaatactatagtaaaatatttatcctgatgtttattcgttgttttccaaatttctaatgataaatttgttcctattaaatcatgaagagacatgtagatagagttacgtacgtagaaacactgttataatttttaatgtttcataacagttgcataaacatgttgctaacagttatttcatttgattgtaaccttcgtctgatgcaaccttcggccaaccacccagcaaccttcgtctgattgaaactttcgtctgatgcaaccttcggccaaccacccagcaaccttcgtctgattgaaagctttgtttgatgcaaccttcgaccaaccacccatcaactttcgtctgattgaaaccttcgtctgatgcaaccttcagccaatcacccaacaactatcggttgattgtgtaagtgatagtgtaagaggtattttagattaaaagcacataaaaggtataaatattatccacgccttatgaaggtatttttataaataaagtatcaatttgtattttcctgtaattatttttttttcttcattaaatagaacaaaaagatattcttaaaaaatatttggtagaacattatttatttatgtatcttaatagatttcaaccatacacgtaatacttattcaattattaaaattttattatggagctaagacttgttacttatgaatttagaaaaatactaaaatgtatcaatggtgtttaacacccgctaacgtgtcatattgttattgatagaattatgtattaggttccacatagtttaatttaataattatcataaattatcgctaaccatttgcaagatgacacctcacgatcagtgaaggagggacatgcacactatggggggttgtaaccttccctcaatttagtgtttgtatatatttcatgtataataaacatacccctaatgtagtttctctctctgtaactgctcatcgtggtgctaagcaattgttggtgtctaatagcaagaggactaatatcatcaatttcatattgttggtaaatatcattttagaccatgtgttttgcaaaagttactaattagaccctctgttttgttaaatgacaaaataaatcctgtatttttcaaaattgtacaaataggaccatgaactatttttttgtcaaaat

SEQ ID NO: 311320 - DNA, 1246 bp, Cannabis indica
agagagagagagagagaaataaatctgtgtattcaaccattaatgaaaatgttacatttgtgttcttatatacacaagtgattgcagctaaaacacaaaacagaaagttcttatacagtaacaaactaacaaacttgctatttaactaactttaactaccaaaactaactaagtctccttaacaagtacctttcattagtcaagtgaaattcctacacaacataattagaaacaagtaaatccaatgcccaaaataagaactaagaacgtggcttaacataaaaagaagaagaagaaagctacatatttattcaagttagtttttttttttagtcctcaaacttttctgtaacttgaggcagatccaaatccatgtccattctcagcttctgaggctggtctatatcaatcaaagacatctgtttctgtgcttcatttggatctttagcgaaactgttggtatgctcaattctattagaaaattggaaggagaaaggtgtaattgggattggtgttcagcactggaatgatgctgctgctgatgatgatatcctagaatagttcatggtctggtttcatacataagaagacaaagagatgagagatacgagggattcaactgagtgcacaggtaaaccataaaatatggtatttcaaattttttttataaaaatatggcataagttaacccatacaaatataaagatggttgaaaatccacaacctaagtgaaaattaaaaaaacatgccataaaaaaaagcaaaccgttaaatttatcctataatttgtgtaatttttactttttttttttggattagatggatccaatttaatctaatagatactggatctaaaatgttagatgaatccgatccgatctaataaataatagatctaaaatattaattaataaactcgaattaaaccaatagatatacatgaaatacatctaatgcataacaccgctctaatccaacatctattggatgttggatcggttggatgactagaattaattagatcagatcggatggtaaaatttaacatctaatatatagttagatcggatttagatagacctaaaaatattggatgtgttccaatgaacacttataggtgttgtgtttgaccatattttttttaaaaaaaataattttttgaaaactcaatttaaaaaacaaaagtctcaaaacgtaaagaatgttgttttctattaaataattttttttgtcgaacttatttttc

SEQ ID NO: 311321 - DNA, 1730 bp, Cannabis indica
aaaaaaaaattcagatttgagatatattttagatccaacaaacaacaacaatccaatagctacaatctcatagcaacatcaacatcaatataatactataataataagatttgtgatgaaccaccacgtcactgccgcaccacctccactgcacgcctaagaagaaatacaaaattaaagagaggattgtgtgatagaaagatggatagagagagatcgaaagagagtgtgacagagagagatcaaaaaagtcactacaagaaatgtcacttttactagcacatttttgcactggtaaaagtttggtattatgctggcaaaatgaaatctatttttgatgtgttggcaaattaacattggtattagaatttttgccagcgctaaatgaaaagtgttggcaaaaattctcaccccgtaaatgcgctggtaaaagataaattttttccactgcaaatgtgcgttggtaaaattttaacttttttgccagtgcagtttgcgagatgggctggtaaaagttacttttaccagcacagtagcaaactccgctggtaaaagtgacattttttgtaatgagtgtagatacatatttttttatatgtatattgtataaatatttttatatataaaataaatatttatatatctatatatattacttttggtctatggggaggaggtgggtggtggagcggcgacctcactgttggcctgaggtggctcgcatgactgggatgagcagaggaggagagaaccctttatggtggctcgcacaattgagatgaatggaggaggaggaccctttaatctttgagaccatacagagacttctgcaattttcacacaggtctgatttttctagatctacaaagactttaggttgacacatgtacacaaagtcctctagatggccattcaagaagatattgttaatgttaagtgttttgatatcccaacttttgaaactgcaatgctcaagacaattctccctgtgaatacttttacaacttgactaaatgtttcaccatagtcaagacatgccttttgatgaatattctcagcaactagtcgagctttttaccttttgatggatccatcaacattttttttctctttatagagctatttacaacaaaccaagttgtaatctttagaccgagggactaaggtccaagttttgttgactttgagagctattatttcatcatccgtagctctattccaccatttatgtttgagtgcctctgcaacacaattagttatgtacaaactggtacccatctagcttgactgagataggtttttggtttgaaaattccagttcttgctctggtaatcatgggatgagaggacataagatgagaaggaagagcaagtgatgtttggtctattacacttggacctatgccattgttagtgatatgcagtgtactgccttaaagattcctgggaaacattttgctcaatagtgcagggtgcttcaaattcaactttaggaaaaataactccacgatcaagggtattaaaactggaacaaggtgaatttgattcaataaccagatgtggtgaaggcactgctggtggagtaggagttgatgcagcttgagatggtacatgaatgaaaatgttttgtgagattgtattatactgtttgaaataaaaatttagcacctgggaccatgattcatgtaaagcccgcttagctaatttggaaattagcagttatttatgtt

SEQ ID NO: 311322 - DNA, 710 bp, Cannabis indica
actagtagtgcctagcaccttgtcgacatatcacgttgctattggttagcgatactctctaaaagttattatattaaactatgtgggacccgatacttagttgaaccaatagcgatactgacatataggagggtactaagcaccactagtgccctttagcatttctcatattgtcatatattacatattaatggtttaatacacatatttaacgtatatattatatataaatgatatcacaagtacaataatacatagctcataataaaaaatatatccttaattaattgaacttggtacctaaacataaaatatgggcttttaaataagtgttgcaaaaatatagcaaactcaataccataaagaaattccaaaaacataaaataccataaaaaatgaacaaacaaaaacatgtcatatttttcaaacattgtttcaaaattctatacgttaagtgtaatttccactaaaagaattaaggagctaatgttatattatttttaatataataatatgtagattaaaatgtggtaatatataatattatgtgaataatatatattaagtgtatggtaaataaatgtgtaacctataatttaaaagagatagagacaaagtggtcttctatattttaaaatcaagatattgtcttgataatgaaatgtgaaagtgtaggggtgtatactctaatatgagaaagtttagacata

SEQ ID NO: 311323 - DNA, 1579 bp, Cannabis indica
atatcagtaagtcttacagatttataaatggcaagtaaagtaataaaaaaactacgttgtgttgttatttacaaccatatcaaccaattttctagtttttaaatgcagaatctatgcagattgttccaaaatacaatcatatatatatatatatatatattttttttttggtaaacatcataaactgaaaacaagtttatgcaaatttagagtgcattaagtaacaactatttagataatttagagtgaaattgataaaattacaagttgttaatgcctaatatttacatatagataaaatctattgataaactaagttgaaattgagtaaagtggagaaagaaatattattattgaacattaatttattaattagggaaaaaaaagtatattgaaaatttcaacttcaaaaattattttaaaattaatcaaagcacatattcatatttttatatatatatatatataattatataaataggtctagattaattaataaatacaggggccaatgaatttggggtccgactccaagttgctggtttatataatattatttttataacgttcaaggattataatacaccgtagtaaagtaaccatacgtgtgaaattatatacaatttcatctgcaataatattttaaaggatttcgaaatttaaaattgtacttttaagcaatgtgaagtggatcttggaagttcagaagataatttaaaagatttgagtactcacttggcaaataaaataaatctaatctgtctttttttttatatatatatacccttttagtacgataacaagtaatatatattattctctcaaatcaatatgaaactttgtgtatttaaaatgttaatggcggtgtgttgatgttaaacaaaataataaaatagtgattataaatgtgaaggataatcccacatcataccatgttcatgttttgtttaatagaataatatcaacttgggcatgtgactgttaaattaatactatatttatatatagtgaatcctacgggaaaacaaaatgattattattttggatgattatataattaattattgattaaatttcagttgtgcttttgagttgggacaactaatttccaatgttgaatgaagaaattaaaataattactatttgaagagaaagtcatcccattagataatagcaaagatcattgttattagacagtgcacaaaactattaggaagtttttttataatatttattaataaattaaaaaatgtgagactcttaaatatattgtgtagggacaacaatagtaaaacacttttcacttttaatcatatatttttcttttttttatttcacacaatcacatattttcacatgcttaataaaatacgaaattaaaaatttaaacattggagatgaagacacacaaaaaggaaaaatattagaaaagattgggagagagaaaaaaataaaggacatggcaagtggatgaagttggattggaagagctactttatggtagggctgtacatcggtcggtttgggcggtttatcctatatattttctaacccaatctaaagttcgggttgctaaaat

SEQ ID NO: 311324 - DNA, 1168 bp, Cannabis indica
tttttttaaaaaaaaacatttatggaattaattaattaatttgtttatttatgaaatgaatggaaaaatctttcatttgatgaatagatatgagatgaattatatattgtatttatttgagaagccgccgagaaaatctattttttttatttaattattagtcaaagtactgatcgaaaccttcaaaatcaaaggagagcaacaatgtttgattgttttatttgaatggagaaatgatttatttttattatttttaaaaaaataacgagtaaaaaaaactctggtctgtgttttttttttcatataaaaaactagtataggtatttctacaattcataccttagaaaatagtatattaatgtaatttttatttgtttcggtatttgaaagaattttttaatttaatttttttcataattgttataattatttaagatttcttgtaaaattttaataaataattcaaaataatttacaattaatgtataaaataatgttcaaacagtactctatttcacacgcatataaaataaaagaatcacgtgtgcaataaactatttaactttatttttaacatgttaaatttctctaaaagtctcaaaattttacaagatatcttaaataactataacttacacgactataaaaaaaatttaactattttctttcgtatgctaaaataaatagagatgcataggtacaccggtgcaaccccaatggttttgttagctagaataatttcttattagtctattttttttatagttgtgtgtaagttatagttatttaatacattctgtaaagaaattcagaataatttacaatataaaattcaatgttcaaacagtttatttcatatgcgataacatatataaaaaagttacgtgtataacagattctttaaacttatttttggcgtgttaaatttttctaaattttttaaaattttgcaagatatcttaaataattacaatgtatatgattataaaaaaaaaattggactatttttttttagataccgtaacagacaagggtagataagggtgtattggtgtgcactacaaaaaatcttacttttagccacaacaaaatttatgattaaaagtgaaaaaattatgactaattataaatcatgattcctatgttgtgactaaaagtccgtggctaa

SEQ ID NO: 311325 - DNA, 1815 bp, Cannabis indica
gctagttcgatatgggcccgatactggtccgatatggtcccgatgctcgtttgatgtcattatatttttcatataagaattttgaaaaattgtaaggttcaattagcaatatcggaccaacatcggaccattatcaaccttaacataaaattttgaaaatgaatggtgtaattagccatataagaccattggcccagtatcgaacatcccatcggacatgtatcaaacctaacaaaagtttttaaaaaatgtattgtaatttataacgaaccattagacttgcatcagaccaaaatcggacaagcatcgagcctaactgaaagccttggaaatagtacaagtgtaatttagccatatagcataatcagaccctacatcggaccaatattgggactaacaaaagacttttgaaaatgtacaagtgtagtttagccataaagaatcattgatcctaaaatcggaccaatatcaggccagcatcgggcctaacaaaaagctttggaaaaaataagtgtaatttagccatacataaccatctatcctaaatcgattctacatcagactgtatcgggatgtaccttagaactttaaaagaaaatgtacaacgaaatattttacagtaagtataatttcatctaatggaaagaatattagtttgttcgaaaaatacaataaaagttaaggtcatcaaaaaatataataaaaaaataacatagttcatgataagttctggtacaataaatctacaacccatctctgtctaaagagcgacatatcatcattattcactccatcgaatggtagatccaaaatcttatgcttgatatgttttatcatgtatattatgcaatcggcactgcattagtagttaaacataacaatttattaaattatagtctaacattcatgaaaatttaatttaaatagtaagcgtattcataaaaatcttgttaaatcatctcatttttatctaaggtacaatcttgtcacctaagatatcccaaatgaatggctgacttggctttcaaaggctgtcatttgagggaccatgaccatataatgggtgttaaataaaccagattggtccaataatattgtgaatatcttgcaccaaacatccatctacgtctttaattttgcaggggtcaagatttcaatactagaatcgaagacgaacaactttcacaactcaaaatttgcctctagagccacccaatgtttctatgcttccaagaaaacaaccatgtacatgcaatccttattctaacaagatggaaagaattggacttcatccccttgaactaggtccaaggtagactcatcccaaacaaagccagcgtggtcagcatttccattccaagcatcccatagaccattcaacaatgaaagaaataaagcaggcattacaatacactgacatttgtacagctctaggaaaaagtgttgtcaccttcttatcagatgaaataccgcatccatatgctacacaattcatacaaataatttagaataaggaaattcaaagattatagaaaataaaacaaaaacagaagtaaacaatagtaaataatacttagtttataaactttaattgtcagaaagccattccctcgtcataagcagcttctggaaccaagtcacgccgtgtagaccagagtagcactcccttggatacttattcccaatggtgcctaccaacaaattttggaagcttttgagtagcttcttatcaatggggcgaagtgggtaaacattcacatttgcaatcgatagcttcgtcttcttcttcatttcggtgtactcatcaaaccacct

SEQ ID NO: 311326 - DNA, 2057 bp, Cannabis indica
aaaaccacgtaaaaattttggtgttatttattattattaaattttgtagtatatttattgcaaaaaagctattaatttggttaaaaaaatttgcgttaacagtttggtgctttcattgagagccttggtgataaaaactcagaataatcactccttataaacacaaattcaaactcatattaaatgactggtaacaatcaacacagcagtaatcgtcctgaggaaacaacccatcgtcttggcaaggaacctatgggatcttaaagaaccaacacatctaaccgcgttcagggaggaatgatggtaatttcaatgttgctagggatcaaatcccaaaaagaaggagtgaggacgcctatgatcctactagatacgtgccactggtagaattagaaaataggcaacttcgacaatgcctggctgaatcaaaccaatgaaatgctgagttggagcgagaagcaacaacgcccagggcaacacaatgaacgattcctcaaaaccagcctgatccaacaataaggagaccacgaggaagacctcgggttccaagactatgagacaagagaataaccaagggaatcccccaaatacccaagaggagcaacttggggatacaagggatgtcccaatggataatcaacctaacccaaatagtacaaggaattaagaacatcgatgagatgttccacgaattcccatagatttgcgaaccaagggaatgaacgaattgacatgccataatcatcttgcatgaatgaagaggtgaggcaaccttgaccaggggaccatggatttcctcgtgataatgagagaaaccttggaaactaacttaggtccagtgatctccctccgaaacatccgcaacacccatctcgcgcgaatagggaaaacatgcacactttcttgggtaggggacgtgtgtctaatctcttccaaagaagaagaccaacgcgagatgaagcaagctcaagtacagggggattgcgatcccacatgcataataggttgagtagacaaacgggagatggaagtagatctcgacataattatgcagaccaggagagtataagtaactcacgaagttatttgtcggagagctactcagagactaggtctgtaagcaactatgaacaaaggcatcacacacctgatttgcgtgagagattaaactgaaggcaaccagaccttcgcgagcacttaaattgaaatacgcctgatttgcataatcaacttaaccaaaatgcaaatcagcaacctgtggatcccatccaattacgagtaattcaattagaggacaaatttagaaaatatcaagatggagaatatggcaagttgccaggatacgatttaggcgaagaaactgagccattccatcctgatatcttaaattcaaagtttcctcagggatttaagaacccacatgtatcgcaatacgatggaaccacaaatatggtcgctcatttaaacaattttaatactattatgcgagtaagtaatgtttcaaataacttgcgttgcattttattcccaacctccttaataggagctgcgggtagttggtttgataaattcaccaatcattccataacatcctaggagcaattattgagggactttaaaaagtagtttcaggctgcaagagaccgttgacccaaagcataatctttgaccaacatataacaacaacctgggaaatctcttaaagcgtatttgagtcacttcaatacgaccactgcaaaagtcagaaacctgaatgatagtattcaactaatagcactttaggcaggaatcacaactgacttatctacagcagggggtgagttatgagatgatcttcaaggtcgccatgtgaggaatattaacgagtttaatgaaagagcacaagtctttgtgtgtaaagaagaagcgaggattgaaataaagttgttaaagactagctcgggaagtaaacccaacacaagtatggcaacaacgagcacagtcaaaacaaaagtaggcaatcccgatggatcaaatataaaaagaaaagatgagtcaaaagaatcatccaagaacaa

SEQ ID NO: 311327 - DNA, 2536 bp, Cannabis indica
gaggcatcctgctcggcatgttggcgaacagatgctctaagtagagtccacgtgtcaccattctcgtgatgccacgtcagagtgccaaatttgggataacaaagggactgtaatttgtcgagcagctattccactcaggttagccggcacacttcaattcagtaacgaggtaagatttatatattgatatcatatgcatttacatgttaagggtgcatgttagttaagcctattagattacatcataaatgtatgttggcttatatactactcgacagtatcacatcggtacgcctagagtattactagcgtactgggtataggccgatattatgtacaatagtactgccgtacgaacgttgtagactcagcatcttgtaggacacgaggatagggttatgattcggggtatgggcgtctgatcataattcaggttatagctatgtcattatgtatgcttttcatactgagtctgttgactcacagtttctatttccatttgtagataaaggcaaggctaaggctgagcagccgtgagagggagcagatggagattgtacatgtcagggcagttaggcctggagcgtacgatctttgagacatcagggcttattttctatagttgtaaggtgatagacttttttatttgaatagtgaaacttatgtaaatgcttttgtaaacgggatcccttaattttatatgtatgttatttcatgtttataattacttaagcaaaattttaattaatcacgatttttaataatctcattgactagcaacgagctacacagtaagttaaaaatcactttcacatgcctaaaatagttagagtgttacaatttggtatcagagccgttaggttgtctttggaatatcatcacgacatgtaaaatcatcatcagcaatcaactcatctcacgcgtcagtaagttaaaaatcactttcacatgcctaataggaagcatgttagtagcctgatagttgaataggcgcatgttataaatttcaaaaataagcggcaattagtaagttttacatgatcatgatctgatgagactagctcttggttacgcaacatgttctaatagtatggacgtcaggcgaaacactaggaatcaggggtaactcggtcaaatctagtggtttgtagggagttcagatttcccaaaatgttcgtggccgaggtagaggccctagaggcagggcacgcgttcgaggtgatgttaacccgccgcaagctgcataagctacccaaaaatgggaaaataggtttgcagaaatgcaagccagaattaatgaacaagacaaggaaatctgacgcttgagacaatagggtgcttctgcaatccctgctctagaaatgcaagtagctcctgaccctgctgtgcaggcaggaccagtcgctgcagtgaaccgaatggaaccactgtatgaaaggttctgcaagcaagcacctccagcctgtctgggaggtctcgatgttgtgaaagtcgagcagtggctaatggttattactagaattttgaatttcatgggcgttaccggcattgacagaggggcctatgccacattccagtttcaagatggcgctcttgtattgaaggacatggtatccctgacccaagatgttaccaagatgatctgggaaaagttccacaaactgtttaatgcaaagtactataattaagtagtcagaagtgcaaaacgagaggaatttactcagctgactcagaaagcaaatatgagtgttactgaatagacagctcagtttgaccgctccgcaagattggctttgggaatcgtgccaaccgattttagtaagaaagagaaatacctggatgggtttaatttgaagataaggcatgacctaatgatcaccactgatgacaacacctcctatgctgatatggtggggaaggcactgcgagctgagggcaaagtggagtgcacctaggagtctcgagggactcaggttgttagtggggctcctactcctcctacctcaggctttagtatgggaggtagtggctcaattactaaccagaaaagaaaggaacctactgcatctggtggctcaagtctgaacaagatgtttagagggaaccaggggtgaggcaatcgtcagagtagctctgaaacccaatatacttacctaaatgccccagttgtaaaaagtatcatctgggtgagtgtagagggtaagggtgctttcagtgtggtatgctagggcactataaaagagactgttcacagcttaagaaagaagaacagaagactggagcaaaacccgctctaactacggtgtttgctctaactcgggctgatgcagaggctagccttttagttgtaacatgtcagctctcggtcaacgaccttatttctctatgttatttgactatggggccagacattcttatgtggtagccagaaatttcagtaaatagggcagaccgcaccatagttatgattcagggtttggaaccctactgcctggcggagaattagttatatccaaaaggtggattaggtctatgc

SEQ ID NO: 311328 - DNA, 851 bp, Cannabis indica
gaaacttgagaaagcgaagaaacagagaaagagcagggaatgttggatcagcaatttttgacatacgccaccattgccggagaagacgaagacacggcaaggcaggagaagcggaagcgatcaggatcagtggtgggaaagcacactttcccgctctgataccataacacgaaacagagaaaagattgtttattgaattagaaaggttttcaggtgattacaagagtggcagaacacaattatatatagtgttaagaaccgacataaggacttaactaattagctaaaacataactaacagactatgaaacagttaacagttaaataacagaattaactgtattaggacaaagaccaaaacagtgaaatctaatatttagtttatgtaataatagcattttatcacctctttttattgtcttatcgagaatttttttgttagtttgtgccttttgtttggtgggtccctaacttagttcttagaaggtgttggaatactgatacgtatttgtaagattttagaaaggcaattaatcttgtgtaattattttgtcttggcttatataactccgaatttaatttatgtttaccttgtaggaaaggactttgttttggattgtttgctcgattagttgaatctcacaagctaatttttttctttaagattttatttttttgaatttaatttatttcctacttaaaagtttgatacttacattaatttatatctctatctctttatagaaaaggagagacataagatggtgacatgacactttaaaatgataaaatctctctaattaacattatttgtttttttttaattctctcatttttaatttttttttaga

SEQ ID NO: 311329 - DNA, 3522 bp, Cannabis indica
aaaatgtaaaaattaagaaagttcttaaaccgcagcatggccttttgataccgtggcatgcccctttacagaaacattgaattttcaaagtttgtacacgggtcgcggcaagagattgttaggaaggaaattacattgtatactttattttatttgttttaatttgtacttctatttttatatccttttagatatatctactcgatttaagtaaattgttgggatgaatttgttttatatactagatttaagtagagagtgaaggtatattgagaaatccactcgaaaaagtgggtatatattaataaaatataataaaaatatatttttgattaatgaatataaaaaagaggtatttttcaacttatcccgattactgggtcgtaggctgcattacttgagctatccaaaaattacacaggccacggtatggcattacctgagtcgcagtccccattacttgagttgggtagaaaattgaacacaagccgcggcccacgtcccttcagcaagagaaaaattaggttttcaaaagtgtagttacgattttttaagaggcggatttagagggtgcaattttagaggctagaagcaaactgtggagtatctcaactcactctctaaattttttttcttcttatttattttgaacccaatgtttattttgattattattgtatttttagaatgaggattatgagccaaatctcttttaaggaattttaattgaatcacactactacaaaaagaactattccccatcggtcctcaaattgatttttgtcgaagaccgacgctattaggattgtgtgcgccggcttaaaactgacagctatagtttagtagtgccatcggtttaaaaattaattaataaataaattattctctttacttttcttttcaaatcgactactgagtctgagttcatgccactactaaagttactcaaggacaaaggaacaatttactcagatagtttgtcctcaattcacaagtgtaaaaatcctgtctaccatgagaagaataattaatagaatagcaaactaaaccaattaatgcagagttagttggaactgactacttcagctcaatttaattaattagtctttttcttttatgagcttatatgctgccattgattggtgagaattgttagtgggcagctatttcaatcgatccattgttgttgttgttttttttttttttttgctgattttttacctattttgatggaattaaatcaccttaagccaaaatcaaaaaaatacagtaaaatattgctatactaagtaaagattcattatcattattagtacttagtgagttgtaacctcaccattttaaacattaaaaactgatttctacactacaaaactttgtggctgttatagtgttatttcaacaatttttgaccaaatgataaaaattaaaccgaattgatcgagtaagtaaaaaataaaaatgcaaaaaatttaaaaaaaaaacaaaatatatttaaataatagatgaaatttgagaaggccaccatggatgtaaaagagacatagcacgcaaattagtagcacacactttagatggaagacgacaaagagtttcaatgtgattgtaattttggccaagtattcgacattgaaaaatctcgatattatctctaattctattactagagcgcgaaaagaagaacacatctccgtcatcaggatgaagagcaacaaggcaaaagaaactcataggaccatcaaacctcatcgtcatatgatcatgattatgcaccaaattccaactatacgtctcatcgtcgtcgttgtcacccccatcaattagttcccatgctttaaaaacaaacgactgttttttcttatacgaatagaattgtgctagtcgcaccttcccacgaaccaccccaatatgaaccctataatccaaacaacgccaatcacgtcctaactcctcccgaggcaaaccaatcaaacggtatcgttttgaacaaagattcaacgaaacaataccttcatttttatttgaggaaccatatggccaatatacaattccattacttccaatgatggaagagcgataattggatccatacaaagcttcttttggaaagtcaaaagttgaatgactccattgtcctgtttcagaagaaaaaatatctaaatcaaggggttgcgaaaccctagttaaaaagtctccctccccactaatgttcaccacggtatacttaaccctaaggctactagtcctagatactactaaaactcgtctactatagtatcgagagatattcgaacatcttggaagcgcaatgtactgccttaaaaagggattgcatacatacaaacaaggactagtgcatattacttcaactagcaacaaatcctcgaacgatgaccatatataagcgctatcaaagtctaccttccaaggtaaaaactgtaatgatggtgttagtccatcgtcgagaatcgtagatcttggagagaaatatgcaaatgagaatgaagaatccgacaaacaagtggcagtgaacaatagggcaaatggaagaggtgagtcgggagaattattaagtcttttttgacggtgatagtgattgaatttgcgactgaaatatagtctagaacaataaataactgagaaccaatgtttgcatacacaagcacaatctattatagacttaaaatctgggagatgaagtagtacctctaataataattcatcactaacaatattgaaaatttgtggcattgtctttaagcactgccgattagcactcgttaacatttttaggtatacataaaccctacaatctcttctcatgaatctatatattcttaaaataattcgtgattttttttttatatataattattatttatttaaaaaaaatatatttgaatcgtatatattttaagtgtataaagtttgttgagagtgcggaattaatggagaatcggttttgtgaataatagtttatataaatataaatatatatatatattaattaattacgtaaagctgtggaaattggttgaaaaagaatgaggatttaaataaaaataacatataaaaaagaagtgatgatagatatcgtatagttgaatatataattgttaaaatattgaattacgtaattaatatctatttctattctatggatatataacacaattttaaaccaatttacttttggttaatgttatttttaaaaacactaaccaaatgtgatttgtattttaaaaacttcaaaaattattttttattcttatttctaaaatcaattttttgaaaataaaaaaaatagaaaacaatatcaaacatgctctataagtcaccttcttccttctctcccaggcccctgcctctcttcaccttcaaggtactattttattatatcatgaatctcataaagtcataataagtccattcttaaaattcttattagggttagggtttgatactggttgatttgaaggcaaccttacgcctctttttcctttttcattctctttcttactt

SEQ ID NO: 311330 - DNA, 905 bp, Cannabis indica
agtttttaaaactttgttttttttaagagtaaatatcattttgaactctgtgttttacaaaagttattgattaaactatttattttgttgaataacaaaatagatcttgtattttttaaaatagtaaaaataggacctgagcttaatttttgataattttttttttaatataactaacttgaagacaatttctaacatgaacagatacataaaatgtaaataattttgtcataacacatttaaatcgaattattattaaattttattttgataaaaaatcagttcagggtcttatttgtattattttgaaaaatacagagttaattttatcattcaacaaaataaatagtctaattggtaatttttgtaaaacacaggtccaaaatacctttttttttttaattgtaattggtattattattatttatttatttatttttgatactaggagagaaagtaatggaacttgtgtctcactctttctgagaagatatgtaataccatctaggacccaattgatcaatttaactaacacttttttgtttgtttgccaaagatttattgcataccttttataaaataattgaacatttctttttttttttttgatgaaaaataattgaacatttcttggaaatttatattaattcaatttttcttatatgactatgtatgtatattgtaggttatataatagacatttcaattgttttagaagattaaaaataatttaatgtattgaaaaaaaaaaaaaaaaactacaaatgttcgaacttggttttttgtgtcataaattattttaaattttttgaaaaaattatgagatgcctaatataatattataattgtcatataaaaaaggatttatgatttattttaaatactaataatatagatgtctctac

SEQ ID NO: 311331 - DNA, 693 bp, Cannabis indica
ccttaaattcatcaccacaaaggctatatctaaaattaataataatacatacaaaaaaaagttagaatttttgtcctataattatgttttttaagcttttttttatcgttaaaaattcttttgtctaatttcattgagattgttagatttcagtacttttgtctaatttcattcgatcttactaattcgatgattgtatatgtactaaattatactccaaaattttaatatttatcaaatcattctctgaatttttatttattttagactttctaaattaaaattggacaaatctttaaatctaacaattttaatagtttaagaaatataatttaatacatgttaaaatttaagtgacaaaaatcttaattagcattaaaaaaaaatataaaagttttcccctctagaaaactccacattcattgaattttttttttaaaaaaaaatccacgttttatgataattttggaaccactagcttcgccttaaatcagaagaataaaataatcatcactatttgagtaaatgtcacaaataatgatgcacttttttttttttagaaaataatgatacactcgtttacatatttagtatagtaattaattcactatcacttacattacctaatatattcacacacattaactgtcacatggtatacttcattattaatgttaagtttgaattactttt

SEQ ID NO: 311332 - DNA, 3283 bp, Cannabis indica
gtttgagaatgtaattttagtacttttcctacaaactcttgtaattatttttaagtgattttttttctattaatttgtatgccttttatttatgtacttaatatatactacatttttagataatttttattataaatacaaatattttatattattatataattttcaattctaaataaaattaactttttctttattatatttatatatatatttgtatatttttttttgtgagaaatagtatttgtgttttatcatttactttttatttttcttggataaaagcacctagtgaaaaattgtcccacacctactttccaaaagtttgtacctttcattagaatcacaaaaatgcctaaccccactttaccactcctcttcaaagagatggatgcctttttcatagttataatctaaatcatcaaataccaaaagaaaaaaaattatatggacaaagtgagcataaataagtagtgacatattagtgggttaggcaagtaccatccacatttacaatgtggaatataccattcactataaagcatttcttttttcttttttaattttttaaaatatagtatttatttttttttatcactatgtacaagtaatttttaattttttccatgcaataattagttagtaattattttatatgataatatataatataaatataaggaacatcccgcaaattttataaaatttcgaatgatttttaaaatatgaaaatgatgattctatagcctattgtgtttgcatgtaattttttgaaactaacatgtatgtaataaactatttgaatcttaaattattaaaatttttcagaaaaaaatcagcgaaattcccttttatattatacattgtagttaaaaaaatataacttatccatattttatatatacttaatatatagttttttagaacttattacttgtttattattattagtttttttttttttaaaaaaaaagaactatagtggacaataaagtgcccataaaaagtttaaagtctaaacctttcttttattcaccaaagaaagtccattaattaaactttggttaaattaatgaaatttattattattttcaccaccatgatatgcatgcataatctatattagctagatatgaatactatttaataaaatatttatttaattattttaagagtattattattagatattagtagtgtttaattatatgacgacatagaattttggaaatggttaataattttttttctataataattattaaattaaaatatataaaatttaataattagttatactaattgcgatataacactttataatgttgtaagatactattgataccctttagcattttatttgtttatttacttttttactgtaatattttacttattttaaatatgtagaaacataattataaatagagtaatttgcggtcagattctcttatattttaatttttgtacacttaatttcatgaatttttttctatgacaactctcttaatttcgctcttgtttgcaaatttgagacgttaattaaatttgatcattaaatgccaattgaaactgtcactatataaatatgtgtacacatgatatatttctttgtaacgtcctcgcttcatgtttccattaggcatttacaccaacaaacttaatactcttatacacaggtacatcaatttagttgcttcttagaatgacgactgaccatacaaatcaacacaagtattttcagtatgcgttgtcactcgcatgatcactggaaacactttccaggaggttttccatcccaagattattcaaagtcaagcatgcttaattttagagttcttaagtgacggactactagaaaacaaaaagctcattattaatatgggtagtacctatcaatccatttaagtcgtattcaactgtgtaatcaatacttacacagtcttagaattatcacacttgaccttccccaaacgatgtgagattgcacaactcctaatctttccttttgcggactacgtgactctgactgtcacatttttcttggtccaattaatcttaattattttttatgaattaatattaattatttaaatatcatagaaattattataaaaacagttttaatttaataattaaatttaattaatgtctcaaatttgtaaacaaaaatgaagttagaaaagtattgccacaataaaaaaaaaaaattaaggtataaaaattagggaatatactcatttaacaccttgtgttttctcgaaaaaatatatatgatactatgtgtttttaataatacttatttgatacattgtattttaaaattgtgcgtatttagtatcttaaaataaaatttaattaatgtagtttgaccaaacaatttttagttatatgtaatcaaataattaattttgaattcagagttcataaaattgaagaaaatttgattatattgataaaattttatcaaacaaatttatatttacggtactaaatatgtatgattttaaaatacacggtaccaaataagctttattaaaaataaatactaccaaatttgtatttagataaagagtttttgacggctaaaccctataaactatcgtttcacttgcatttaatcttttaagttcaaatttttacggtaaaaccttccaaactattgaattgttagcaaatttgagattttatccggttaactaccactatagactgcttatgtgtattctcttgtatgtgtgacacgtttatattggtacacttaatattattatttaataaaattataaaaattataaattataaattttaaataataatattaagttgactaatataaacgtatcgtgtgtacaagagtgtacacataagcagtctgtgacagtcagtagtcccgtgatccgtaaggggaaataccgagtaagctgtgcaatcctacatcgcttggggaaggtcaaatgtgatgattttgagactgtgtaagtatgggactacacaattgaggaaagcttaaatgaattgattggtaccacctatatcaacaaggtgcatcttatttttccatagcccatcacaaaagaactccacggttaatcgtgcttggcctgaagtaattttaggatgggtgacctcccaactagagtgatgtattcgtgtataagagccattattccgtaggtgttacgacccagtgaaagcttgaagcggagacgttacacagtctattagtagttaaatataaaaaataaatgacactttaaatttactaacaattcaataattt

SEQ ID NO: 311333 - DNA, 623 bp, Cannabis indica
aatggtatttacccttatttaatcacaaaagttattctatcatagcctactttattttttaatgtgattattttaatttaagaaaaatatatcttttcaatatcactaaaaaaatgattgaagcaaaaaaaaaaaaaataataacttttagtttcttttgactaattaaccaaaaactaattaaaattatcataaaattaattatttacaacaaaaaaaaaattccaaccacatcagtaattatttgggctcacaaattaactatcctgatgtactttttaaagtgatttttttaatatgtgagaagtatatatttttttttactatttttaaagaagatgataaaaaataaatgtcaatattaagtttttttatttaattattgtagaaaaaatctcccaaaaaaaaaaagagtgtaacattaaaaatgttaaaaaaaacaaaaaaaaaaactaatattttgtaatattaacatcaactttatggatgacaccatctagcccatctagttataccttgatttgagcccaatttcgctttgggcctcctttagaggtagcacatgttctgaataaaagggataattacaccacatattagaattttaatttttttttactttt

SEQ ID NO: 311334 - DNA, 1303 bp, Cannabis indica
taatgcaatttgttttgtttaaattaagctaaagatcgagttagatcaatataatagcttttatgtaagttcctacggtaacaaaaatgttccaaccaataaatgaataaagatgtctatttaaattcagattgtgtcaattctattagcaagttaaaaaattaccattaaatgcgtacaaaggtcttctcggacccaaagatccgaacagacaaaaatcatacttgtgaattgcaagtgaccaagagtcaaaatctgctcggtcactttgagggaaactatactcatacaaagcatttgtaacactaaataacaagcacgaaaaatacaaaacaaacactattgcacaaacaatgatcataacaaggaactgtattcattaaagataacaaatcacgaaaacccaggattaaagtctggccggttagccagttctcttaaaattgaaaacatattccaagtttaaaaactgcttggccggtcattttatctcaaaagaaggcctattggctgaacagacatatatgaacaaaagagaaagacattcagacagcaggagtcccagactcttgctatggatcgatttggtctgaaggggttagaggatcaatagactgaatgacaggaccttcggtgctctggtcggcaagagctatagaggtagtcgcctcggaattttcctaggaagaaatcaagatacataatctgttggaaaatattttactaggatatagatttactaccacgtatgttatttaacatcctaaatatgaatttctaaaacaatgtaatttaaacacataaagtttgagaaaccttacagtggttgcagaaaaattaaatgactccttccgctcagatctctaacccttgtatccattatgtagcagagtatgaccgagatctaagcccgaaactccttccttgtgtttggattcttcatagtcttacacactatgattgagtaccacttgatgtgtgtgggcacttactctatcactatagggttcaaaattgaagagagaaagagagatagaaggattcgaaattggtagagaagatggctcaagattttgactgaaggaaagtgtttgcatgcatacttcaatttaaggccatcactatctatttatagggaaccacctaggtttaggtttgaattattttggcattaaaaaaaataaatggtaaaaatagagcagtagtgggcggccataggatgtgggcccccactttgcaatttcgccatttttcccactatttatcttattttctcaaaatgctatttttccaattcaaccac

SEQ ID NO: 311335 - DNA, 1028 bp, Cannabis indica
ttggtctccaaaaaaagaacaagtagttgttagattaagtattaaaagtaagttttaggttcttgctaatgttgttgcatagttgaaatggttggtgtcttttctctctctgagctttggtttacactctcataacctccaattttgataaccaaagtgcaattgctcaggcagtttatcctgtcttttattctcggtccaaacatatcgagattaccttgtattttgttagggatcaaatattggcaaaagagttatatctatgttttatgttctagtattaaattaagtggttgatgctcttactaaggctttttccacaatcatgtttatttatctaaactaacatagtaattagttgacaatttagttagttaactaattagatatatattagttagtttgttaaactttgttgagctgtaatataattttcttgtttctgtaattgtacaaacaacttgtctataaataaaggttagcatcatagagaagtttaagctttgattaacaatttctttctctcagtttggtttctaccattttctctcttcgtttatatttatgcactgttgagtttctagagtttgcaaccgcgattgatattctttattaaacttaaatctaaatctcaatatttaataataattacatatgttattagtgatgtctaacattaacaatggcttataattaattatattctatgatagttatcaaataaatgtaaaattcaatacttaaataaatcaataataatataatatctttagatcgtgcaaaatccaaaagtattattctctttggaatatgagaacacgaaggtagcaatatatgaccgagctagtcatcgtacaaatatattatatatataattttatgaatattaaatatgtaaaaagaaaataatgtataattatttagggatgttgatcaagccgtacaaattgctcgcaccgcaccacactgtaaaaaaaaaagcagtttgaaattttttatggtgcggtcgcggtttgaatttttcttaa

SEQ ID NO: 311336 - DNA, 2197 bp, Cannabis indica
agcttaagctaatcacattagccatccaagatgtgctcctagatgcttaaactaagcaagaaaagaatccacagctcaaaaactggttcaatcaccttaaggatgtgttccatgatgcggtggatgtgctcaatgaatttgagtgtgaattactgaggagacaagttgtcaaacaacatgcctcttttggtagaaaggtatgccgtttcttttcagggtccaatcctgttgtttatcattttagtgctgttcatcgagttaaagagataagacaacaattagatgagactgctaagaatatggaaacgtttcatttgatcaaaactcagctgaatgtggaacaaatctctctcgtgttagagaatagagtgatgactcactcctttgttaacccttcggtttattggtagagatcgtgaaaaagaagagatcctagatatgatattgatggatgataacaaaattgagaatcaaattcctgtggtatctataatgggaattgggggtttaggaaagacttcacttatcaaattagttttcaatgatgggaaaattgatgaaaagtttgatttgaagatttgggtttgtgtatctttagatttcaatgtcattacactagtgaaagatgttattatgagtgcaactaataatgaagctgagattagtaagttgactaatttatagtagttgcaaagacccttgagtgagactttgaaggatgacaagtttctacttgtgttggatgatgtatggaatgaggacccttttaagtggcaggaatttgcagagttgttatttgtgggttctaaagaaagcaaaattatagtgacaacacgaagtagtaaagttgctttaatcatgggtggaacagaaccttatgaattgaagggcctacctaagaaggattctttgtctctgtttttcaagtatgcatttcgaggtgaagaagacgcatcaaaatatccagaactcaaaagaattggtgaagaaattgtggaaaagtgtagcggggttcctttggcattgaagactttgggcagtctcctttggttgaagactgaagctcatgagtagaaaacagtaagagatagcaaaatttgggagttagaacgagaagaaggtcacagtttacccgcattacggttaagttacaatgcaatatctccatctttgagacagtgttttgcttattgctcaacttttgaagaggatagtttgacgttgagcattgatttgattagtatttggatggcacttggaatccttccttcacctaaaaacaaagaggacctcgaagttattggtgactcatgctttgcagagttgtgcaactgatctttatttcaagttgatcctgatgaaaattattttgaaatgtggcaagagtttagagggcatgatttaattcacgaccttgcatgctcaataactcaaaatgagtgctcaattgtaaattccaacgacgatagagagatttttgatacggtaagatatttaagagttgttatcaatgagaataacttaaaaaagttgagtaagctaaagaaactaaagattattcatgttaagcgtactggagatgagaaggatgaagttgtgcagttattcctttctacatgcatctcaacattcaagcacttacgagtgtttaatttgtcagatttatcttttaaggtgttgcctaattcaattgggaccatgaagcagttgagatatcttgaattgagagataatataaatatgaagagactacctgattccgtttgtaagctgcaaagtttgcaaattttgattcttgatggatgtgtggagcttgaggaaatacccaaggatatagggaatttggtaagcctgaggactctttggttaaccacaaaacagagctttttggcagagggtggaattggatgcttgaagtctctttgtttattggttattggtgaatgtaaaaatttgagatcccatccgcatgacttgatgaattgcactgcattactttctctcttaataggtgattgtgatcaactcaacttggcaagtgaatttgttgataaagatgttcagttgagcctccacacattgcttatttttgaattactagagacaacagatttgccccaatggctccaacaagctgctaactgttggaaatattttaccaggatctagatttactaccaagtatgtttcattaaca

SEQ ID NO: 311337 - DNA, 1720 bp, Cannabis indica
tctcatatactatttttttaacttttttttttcaaatttgcagtttgagtgtctaaagtggttgcagcgctagttgcaataggggtttctatacaattttttgttgcaatttaggttgcagcgctagttgcaataagagtttctatgtagaatttcgtaaaaatgcatagaaaattgttttgaagtgtaaaaatgaaaaagcccatatttattataatacaatatttggtattgacttgtattatttgattgtgtaaagttataatatattttcaatacactcgaccccaacaacaactacgggttcggtcccaagttccgggtcctaggtttaggttcgagttggggtcccaagtcggggtctgggtctcgagttggggtcggggttagagtttgggtctgggttcgggtcagggtcggggttggggtctgagttcgggtctgtttctgggtccaggtcttgggtcctaggtctgagtctgggttcgggtctcggtccggtccgggtccgagtccaggttcaggttcttgtccaggttcgggtttgggttcgggttcttgttcgggttcaggtccgggtctgggttcccgagttcgggtccaggtccgggtcccaagttcgggtctaggtcccgagtcctggatccgagtccgagtcccgagtcccaggtctgggtccgagtccaagtcagggtccgaatttgggtcgagtctgagtccggggtctaggtcttggggtccgggttcgggttcgaggtctaggtccgagtctgggtctggggttcggctttgggtctgggtctggggtccacgtccgagtccagggtctgggtccaagtctgggtacgggttcgggtctcgggtcccaggttagggttcgggtctcgggtcccaggttagggttagggtcggagattggtgttgaccccaaattctttgtaaatattataatacaacctaatacggaccatttgttatgtattaaataatacaacatacattgtattaaaaattttggtcgtaataattaatacaatacattgctttatccaaacaaagtgttatttattatttaatataatacgacccttatacggcgtaccaaacgagccctaaatgatttatgccctacttctcttcttctcctcttctcctttaatttttcgttatgtttttgcttattgattaaataattaatatttttactctctgaatttttaacattacttaatcatgtcatttaaaattaacatttttattgtctgagctttgatcaatacgaaattttgtcatattttaataaataaaattaatattaaaaattataattttctattaattttgaaaaaattaaaaaatattattaaaaaactaataaaagtagtaaattaataaaaaaaaaataccaagtttactttaaaaaaaccctaaattattcttaaaacaaatatttttaaactttatcttatttataaacacgtattttaaaaatttaaactaaaattattaaaaatccaacaaataactaaaacaactaatatttaccaagatttttgcaaaataataaaatataatagagcaaaaaaaaatataaattattattttgtccttaagaatttatttctatagaagttaattctcactccaaatttattcatcaaataaaatcttcccttgtacagtgttgtgtagaggtgactttgttggatatattttacca

SEQ ID NO: 311338 - DNA, 549 bp, Cannabis indica
ggatcaaatacaaatacggcttacaaaaatagacgaagaattgtttgcaatgaaagaggtggttactcgtcattcgttctgtccacattggaagcatccatctatagagactctaaaagtccgtgatcttcaacaagaatatggtaaaaaatacattgaagcgattgagaaggagcagagttattggatgagaaaaaaagtggagaattcactagaacttatttatcatgaaaacttgttgtactcgttcctaggatatgtggtgtaatctatttgatgatctaatgaatttattatcccttctggctaagcttctaaatttgtcttatttttacagtttggataactattgtataaaaaactttttttaatgaaaagttctatttaaagggtttggatatcatttgtttaaaaaatgcacataaaaccttaaaggaaattttaatgtctcataactattgtagacggtctttctcgaactatgtgtagacggtctttctcctagctatattgtaacaccctaactaatttaggcgtattacgtgattt

SEQ ID NO: 311339 - DNA, 2260 bp, Cannabis indica
aaggggatcttgagtggttgaattgagggattcttatattcgaagggatatttcgaacctagctggtgaagggattcatctagcttactcaaggggatcttgagtgttggaatcgagggattcaggtttatatatgtaatcttctgaggggaggcaaacactatcttcattggaatgaggccttttgggaaggtagtcaaaaacaaatccgtgaggacttaggcccaaagcggacaatattataccaatggagaaatagatggtatcaaacggtccttacataatgtttaagaaaacacaattcaatctaaaaccaatcacaaaatcaaaaattaaaacttaaattagacaagaataaacttagcttgagaataaacgaatcatggatctttgttgattaggaataatcagtagtacacaattgaataagtccaagattacaactcaacacagtgaattattacaaagaaatgtctcacaatgaggtaaatcacttcaagagtgatactctcattacatcctccacacacactcactatgatattggactctctctctaaattacttaactctgaatctaaagtatgatgttggtggggctcattttgagttggtgacaaagccaactattataactaacagcaactttctctagattcatctgataagagaaaagatagacttactgattttggcagattaagtgagtttaatcccaatatcttattagaaaatacttaatattttaacatttaatctgtgtgattgcacatcgagtgggtgttgtcaggcttcgagttttcagattcgaatgtatagattatgtgtaccaaacccactgtgtgggtggtcgggttttcaaattcaggtgggttgggccaaaccactttttttttaaatatcttttttttaacattttttcataaaaggacacaaaattttagcaacttttttcactttaaaaggtcctttttttctatcatacatacaatacaatccttaattacttttaaattaatcttaatctataatccaagtccaacaactataaaaaactaaaatccattgtccaaaaaacaaagtccaaagtccaaacaaaccaaaatccataatccaacgatatatatatacataagaaaaaaaaaattaaacaaactgggttctcaagcgggttttgggtgcgttgcacgcgggttttgaaattcttttctcctacccaaacctgaccactaattttttaagctcgatttttttgggtttgggtcggtcgggtttaatttccttgtgggtgggtttttgattgaaaatattccgcccctccattaagatggtgactattttttattcagtatcatgaaatatgtacggagttacaagtgaccatttgctcacctatttggattggtgtagatggaatgcctactagctaggatagggataggactcttaagataccatgacaagagttatgcacaatctaataaaattgtcaccttcttctaattttcacgtacaactaccatatatatgtacatccattattttccactcaaaacaaaagaatgttattgacaccatttattgatgcggagaccactctatacttagggtttccactacaaaataggatagctaatatttctatgaaaatagtttttattttttatttacaaattaatggctcctaaatttttttataacactattttataattaatatcacatttttcatagagccctcctatataatttatgtgtccacattaacattagtataatagatatgttccataattaagtttaccttttatttataattaggtctaaatcactctagctattcatttccttaattataactaattattaattaatacgtatataatatcatcttatgttttgatcacatgaattaatttaaaccaagttcactttaaagttgattatatatataaatttcaacaagaattgatgaatgataccatcaattacaacaaaatcaactaaatagaataatcaaactaaataataataataataataatattgaaaaacgagttggtaaacgtacatatcagaatcatatcaaggattataaattttattgacttcgaattcaaatacacaaacctatataatatttttattatttaaagattcatgatatatatattaataataatatctcggaacttaattaatacgtaatatatactttttagtactatacaccataactatcgaataatttctaaattac

SEQ ID NO: 311340 - DNA, 1637 bp, Cannabis indica
caaatcataggacttaaactttttaacatataaccatgattatattccactgtgttgatgacactataataatgaataaatatatgttctagacttaatagaatttatacattaaacatataatcatgaaataaattatgtgacccatgcaacataaaatgatttttgatcctttattaattaataaatctgattatattgaaatgagttttatttagggcagaaaaactaacatatatcacattgaccatctggtcaaatagaaaagtaatttttatcattattgtattatcatgaataatttaggtaatcttccttaccttagtgataccactactcgccataacgttcttttatacgttaccctggtaacgtcccagcttcaagcctctattggacccttatagtcatagagtgatggctcttatacacaagtgcgtcattctaactacttcctagactgacaactggccccagagaccaatccaattgtttctaatgtgcttggttatggctcacacctgggaaacttaaatgaaatcaccctaggtaaagaacacttaaccgtggagtcccttcatggcaggctaccaaaacaagatgcttctcgctaacataggtagtcccaagcaatccattcaagtcattaaccactatgtagtcccacacatacataatcttagaatcattacatacaacctttccccaggcgatgtaggattgtataactcctagtctttcctttgcagatcacgcgattctaactttcataacttgactcatgcccccatgatctcactcttcccctagtaatgaatagatccaaccatacaatcatcgcctttaatttacctaaaatttcgaacaatactcataatatgtcccacttatactaacactagatcacttctaaacaaaagattcttttctctgaatcaattaaatggatgcctccattagctactcatgtcctatattccacttatgaataccaataaatttaactcatattgtcaattccttaatctgtctaccccgtcagatgagttaccactaactaacatacatgcacagtccattccgatcttttcatgtcccctcattgagtatacaatgtttagtatcgatatcaattgaaatagaaattataatattacccatgaaattctaacttgagtcgacaaaaggactaatactcgagtccccttcaatcataactggcacttggacaggacccgtgcactttcctcctttaaccaatctttcttaaccacgggtaggttctttttagatgacccactaccccacaataaaataagatttggctctacattggctcaaatggcgcatttttgcatcttaaaaacttaagataaggtcaccatttcttattctcactttgaccagtatcatggtcgccctttaaccttttgttctatcccctaattggtggttcatttagtttctgcctactgatctactcgcaagttgggtttatatatttcaccacatccagtggtacgacaggaaatgtcggttattataagaatagacacaagacgagcttattgttctctcagatctcagatcttcttccccttgttgtctaataatatcatgcatagcagaatttacat

SEQ ID NO: 311341 - DNA, 1725 bp, Cannabis indica
ctaaccaatcgcaacgcaacatgtcaagaaggtactaggcaccactggtgactaatagcaatgttcaagaaaaattgcccatcttcatttgttgtagatagacggcatggacatgaagaccaaatgaatgacgcgtggcaactcatggttgggagaagataagaaaaatggaatatctatttgaatggctctttaattttccttaggcacgcgcatggaataaaataggagccactgattgatatgaaaaattttgcaattaatgaagatcaacctctgatatcggtaaacaactgttaggcagctcatatatggcaaatgactaaatgctatctggcacgcgcaaataaggcaaagaaataagctgatggcgtggactgggcctaagcaattgggctttttccttgcaaaatatcacttttttatttttcttttctttttatttataccataatgcaacataattcctgcaaaataaattaaattaaattaaatttaaaataaatattttcacttataaatatatattcaatagatttcatgaaaatatcaatttaaacttaatttaatttaacatttgaaatcgatatgtacatttttttaccactaatcacttacaaatttaaagtcttcttctaaaactcattttttggctacccctgaagagtggtataaacttagctcttttatactaattcatgtacggtgagttgtacaggagacgctactgaagagtagtgtctttaagttggtcactgatagtactttctgagatgtttccccattccagtaccttggtaggagaactaattctatgttctcattgtatctgcccatcttgtacgcacctttacttcttatctctgtcacttggtacggaccttcccagtttggcccaaacactcttgttgcatgatctttcgtattcaagaatactctttgaagaactaagtctcttatgaagaatttcctctcctttacttgtttattgaagtacctgacaactttttgctggtaggcatgcagctttaaggttgcttgttctcttctttcttctaatttgtcaagggatactgttagcaggtgtggtttacttcttggtcataggctgccctcctatgggatgttggttccagttcaacggatagcattgcttcatagccataggctagcgcaaagggtgtctgcccagtggtcgtcttctcggtggtcctgtgtgactaaagtacctctgggagtaagtcggccaattttcttttgcctcttctagaaactttttcataattatttgagggtcttatttatagtttctacttgcccatttgtttgagggtgcgtgattagagaaaagcttttaataaaatcgtgtctgttgcaaaagtcattgaacatatcactgtcaaattattttccattatctcacatgatcttctgtgggagttaaaaccgacatatgatgtttttaacaacaaagtcgaggactgtcttggaagttattgtcaccaatggttcagcttctatccacttagtgaaatagtcaactgcgactacggcatattgtacttctcctttctttttaggtagttgactgattaggtctattccccacacaacaaagggccaaggggactgcattagtgtgagcttgtttggtggagctctcgggatctttgagaatctttggcacttgtcacattttttgacatagtccattgaatccttgat

SEQ ID NO: 311342 - DNA, 842 bp, Cannabis indica
tggtaaaaccaagtttgatcattacatgataggtttaggagaaattattaatatgatgtcttattcaatgcacaattggtaaaaccaagtttgatcattgcataatgcttattccttagggatagttgaagatatttttgtgtagactaatagacttgtcactccaggtgatttctacataataaagatggaagatgagtgtgatcagaatcctacatcaactatatttgggagacccttcttactcactgcaactaagaagttggatacataagcatggatacttaaaatggaatttgatggtgaaataatcaattttaatgtgttagattccattgctaggtacataaggtatgagtctttgttagaagacccaacatgaagatcacatgagcacaacatgcagtcgagctaacgagattaaaacaaagcaaacttacatgagtttttcttacctttttctttttattttgcctaaattttatttgattgagccttgaggaaaatgcttttattaagtgtgaatgggagattaactgtcgtgtctatccattttttcccttagttgtttagttatttacttatttatttttatcgtttttattttattttaattttctctttaattgtggtgagtgtgggttgaatgaaattctgttgacaatgattgctcatgtttgatatgtgtttttactttgatgtcttatgcatggtcttgtggaatataaataattctaagaaaataatagattcttatgatttgtgtgcttaacttataattaattactgctcaagcttgattttttttaaaacttttggacatcagttgaattatcatattt

SEQ ID NO: 311343 - DNA, 1296 bp, Cannabis indica
aaaccagctaacaacttctaactgatttttaacagactacaaaaacttcctaaataacactacaccttattagcaaactttaatgctcccccttaaggtggagtgtagatattacaaattctcattttttctttgagaatttgaagctgattaggaagaaagagcctttgtataaatttcagttatttgttcgttgctagaagtgtgaactatttttatggtcccttcttgaactttatctcttaacaagtggcaatcaatctctatatgtttagttctctcataaaaaacagagtttgcagcaatttgttgagcaactttattatcacaatgtaaaatggtaggttctctatgttcaatttttaattcttgcagtaaggaaagtaaccaaaccaattcacatgtgatatttgacattgctctatattcagcctctgttgaggaccttgaaactatgtgttgtttcttacttttctaagacacaagagagcttccaagaaacacacaaaaaaactgttgttgatctccttgtatcaacacaagtagcacagtctgtatctgtgtatgcctcgagctttacctctgaatcagtagagtagaataacccttgtcctagagaacttttaacatactgaagtgccctttgtgcaacattcatatgtgaaactttgggagtgactaggaactaacatagtttattcactgtataagccaagttaggtctagtgattgttagacattgtaactttccaattatccttctatagagtttgggatcagcaagcttttcttctccatcttagctgagttttaagttgacttccattggtgtgttagcatgtttgcatcccaattgacctaaatcttctagcagttgcagggcatagtgtctttgggatatgaaaatgcctttgttggttctggcaatcttaataccaaggaagtacttcaattcaccaaggtcctttaatttatatttgttgttcaaattaagtttcaatttttccaatgttgctatgttgttgctagctaagatcacatcatccacataaactaaaagtattatgatggttgatccattatgttggatgaataaggagtgatcagaagttgaatgttgaaaaccttcttcaatcaaggttgtggagaacttttcaaaccattgcctagaagcttgcttgagtccatatagagatttttttagcttacatacaacattaggtggtaactccccattaggactattgttggaaatattttaccaggatctagatttactaccaagtatgttttatt

SEQ ID NO: 311344 - DNA, 1837 bp, Cannabis indica
tgtatacagggaaataggatcccttggctcacatcaaatattttgagatccagatggatttgcaaaattatggtaaacaatacctattgcaagattttccaagcaacgctgtctgaaactgcacaatagtagtattttaagctgtctccaggaagatttgattcctagaatgctttcactcttgagtttcacacacagttctcatcttccaaacaaacactttataggctggaagacttagttgaaatcaaacaaagacccagggaacctctgaaagactacctccaaagattcatgcccaaggctacaaaagtcaagaatctaatagagaatgggaggtacacatccatcatgagtggcatactgtctttgggtgatctatggaaagatatctatcgacactcaactcgaaacatggccaatttcctcgatcaagaagaaggctttattaagcttgaagaagctgtcttacaagcccaaactagaagataggcaagtgtcggacaaatccagaatggcgaataactcttagtatcacccagcacacctgccaacatggacaatatcgaccagccctccaacagtcaacataatggaggcaaacgtaacaacaatggctctggttggggaaatagaaaaaaaaaaggaaatttagaaatcccctacgccacaaaactcaagggagaaggaggagaagtttacatgtttcactatcctaacatgacctcatgaaatagtctacatggccacacaatccatagttccactacaggaagcctcctcccacatgaagaaggacataagtaagaggaacacttccaaattctgttgatttcacaacgattttggccatgatacaaatggaatcaaaattcgataagcagaacctagtgtagtaggccatttatcaacttgggggcccttcgaaagttttgtttggtccccagaaatagttgaatcttaatctttactaaaaacggaaaagatgcccagaaaagttctcggaaaacatcattggaaccgaaccagcttgataaaatgtcaacctgggcgctggaccttgtttctagcacctaggaagtgctgtttcttccctaaaagcacatatttccccatttttaatgaagacacagaagatgcaaaagtcgaatcatcaatttgatacttggaagtttttcagatcgacaaattttcaatctaggcaccaagtgctctaggtgctcaaaaatgaaattttctccaaacctaattttgatgcctcaaatatgtttgtggtgtctctagtttatgtcccgatgcaaattttgacccatttgtactaagacgatcccaaaaactaaaaccctaattagggatgtcaaccggtgttgggtgaaaccctaggtgccctggttgcctttcggagtgcaagttcatgtaatttcagctcccgaggccttgattggatgcttcatgtcttcatgatacataatagtaaacgataatgagttagaaataacttgacggatttgaacacccattctaggtcgatttgctatgattcgagactactcaactttgagatgttttctttcttgccacgtgtcaaacattgatatccacatcattagagctatttttagtgcaaacaaaaagtattttactttttaataaataaaattacattgtttaattaattattattattagtaattttatttatttattttaaaataaataaaattactaataataaataagtaattagacaatgtaattacaatattattatatactagaataatttatttaagttattattattttttagtaaagttaaattattatttattatatt

SEQ ID NO: 311345 - DNA, 1336 bp, Cannabis indica
cttatccagataaaaaatgtgcttaaaacggcttaaagattcctgccatctaatcaaacaaatgttaatggctaattcatatcgtgaaacatcaagcaaatatgtagaagaaattgcattagaaaggttttcaataaagtgaacctgtagtaccaaacattaataccaaaaagcacacaagtgatggcacgccaacctattgaatacatccagaaaatctttatatgcattgttttatatggtatttgcattgtgaaaacatgtagctaaactatcctctccaataaggtgataataataaaataccgatctgttgggcaagcaaaatatgctctttagtccggggcatgggcctatcaggggcagatacaaccagaataccaccatccatctgtgctgctccagtaatcatattctgcacagtgattatgctttattaaatagtcccattggtgagcatgagaatgttcagcggtatgacattcacactgaattacaagtttaaacaactaatggaacttgtaagttgtaaaaacaaaaacacacataatatatatgtgatttttgtcagaaagagtttatagtcatcatatctcaatttttgatcctcgacatgagtaacagttgcatcaaaaaaaaaactaattgtaaaatcatatacatttcagttatttctagtattgagcttaccttgacataatcagcgtgtccagggcaatcaacatgtgcataatgtcgcttagaagtctcatactccacatgggcctgtaaaatggaggaacacacatgttgcaagagaaaatcaattacagaaaaataaatatgtaaaaatataccctaatgtctagcctaaaaaaatggcagattcatatagatgatatcatcatcagcaaaacagcatgctatgctaaccgttgcaattgtaattcctctctttttctcctttggagccttgtcaatttcatcaaaagcaatagccttggctttgcattcttctgacagtacctaaggtaaatcacatacacatctcagctttttccatgaaagggtgaaaatttaaaactaaaaagacgactcacaaatgcaatccacctgttgatgatttacacaagtaacaacgcacatcacatacaatttgacagaccgacatagtaatactatcacaaacattaatagccaaacctttgttattgcggcagttagtcaaacctaagaattctgcattagcaaaggaccaccatgacagcagggcagcgttttactattccttgacaccatctctcaaaactcaaaggggtgagattctcaggccaatttgtcaacaggaaccaaaatc

SEQ ID NO: 311346 - DNA, 817 bp, Cannabis indica
ttgttgttttcaaaattcttgttttttataactttgttttctgaaaactgttttcaaaaaacaatgccaaacacgccaaatcaattttctgtttttaaaaacaaaaaacaattttttagttatgatgccaaacatgcactcggtctcccccctaacaaattttttaaaaatttctctctttaagcgttaatggtagataggactaaaagagaaagagctcccttttttttggcgtagatggtagcttcaaatttgctcaacatcagtgttgggaaagatatcttcattctttgcgactaaacgagaaaacttatttgagattttcaattttaaaattacttttcttcaaatttaaatttggtttttgagctttaatattaatgcgaacaacactgatatttgttcggtttagtttttctagaagaggtgttgtgttattttatttttataatgttgtaattttctgttatcccatatttcgagtaacaaatatggtcacgacacgtgttaaaaggttcaaaaacgaacgtgctcgaatattgaagaaataaatatgttaaataactcacctcggagaatacaaattgtaaacgtatttaaatctcttcctaataaattaaggagagttataaataccgactgtcattttgtaagaccaagaagttaaaaaaaaaactaagggcccgtttggcacagctttttggaaaaagctaaaagctgcttttcaaaaaagctgtgacaaaaaggtgtttggtaagcagttaaaaaacagcttattgaagaaattatggaaaagctacagctaaaagctaaagct

SEQ ID NO: 311347 - DNA, 1417 bp, Cannabis indica
tccctgcttttttaatcaggttcaataaattctcaaaatacaacaacaatatattccattaatttaaagggtagaataaaataacaactttgaggtagaaatagaatttaaaaacaaatttcaaatatcaaaattaaattattgtccaacttaacctcaaacaatggaacattacaataatagataaagaaaagacattagcaatacaaaactatgcaactacaaaatgttggatcatttactgacccttcagcaataatcaacaaaatggaggttcacccaaaaacaatgctaatatattttcaatgacatttacaaaaggcccattcacaaaggcaagaggtcaccgcttttttaatcaggttatacaatcaaaataattatgaaaaccccatcaaaacaggtatgattcttatcactaatttatcatctgattcggcctaaacatgcagcaataaactaaaagactaactaaatcaaatatcaatgcaactacaaaagttgcaacatttaatgaaccttcagctacaataaacaaaacattggttcatccaataacaacgccaaatgactttcctgacatttgcaagaggcccattcacaaatgcaagaggcccctgcttttatcatcaggttcaacaacacaaaaacaactactacaacagctcacaaaaccaagaaattcacagcaataacaataccaatcaacccctaataaaacgagctagtaccttgaagtgaactctgaggtcggaacctcttgccttgcaggctgcaccacgcaaaatttaatatcagcacacattaaaatcaaaatacgaatacaaaatcgattccccataattaccaactgagtgtgaaaacatcgaaatgtgggggaaacaaaaacaaatgtatataaattcgagttaacatcaacaaaataacaaaaattcagacagtagaatagggttgcttacacttggtgatattatcaggctcttttgagtatttcacctgaaacggcaatcgatgaagttttattcagaacactaaagataaagaaaatgaacttgttcatgtatggaaagagaaagaagagtatgtaaagaagtaccatggctgccggcagtgtgcagcttcaaacctcagtgaaaggttttataaactccccacagcagagagatcaatggaggcggtagggtttgaacttatagtaaaagaacagataaaaccctagacacttgaccagaacttcggccaagttaatttaagcccatcatcgtttatgggctacacagccttgttgacggcccacttaattatgtagacacacttaaaagggatatgttgaaagttgcttaagacattaatcaaatataatttcaaaataattttaaaggataaatactcttttttataattaaagtaccaaata

SEQ ID NO: 311348 - DNA, 1596 bp, Cannabis indica
tttatttaaaaaactatcaatatgtaatatccatttaaaaagtatatataatatatatataacattttttaatgggtattatccatgaatgtttattaaattttatttttaaaaatattaaactattaaattttgatgtaatgacaaagaattaaagagaaatttgaatttttatgcttagttttactacttaagtaaaaaaatatcaaaaaatattttttttacactatatcaaaaatatgttcatatcaaaatatctaagtgaaactgatcaacttttacttattgttttttttaattttatttcaatcgatagaacaatcttagcccatatgatgtaaaaataagaaattaaaacttaatttttctaattttacctattcataggtaatacccatatctaaccgttctagaaaattaatttttgaataattcttttgtcactgaaggtttggataaaagaaagcagtaatatggagttgatttcttctatagaagatggtgaatgttctaatgatgagaacatcttgaattttctcaacgcggtgaagtctggcaacaaagcccgaatacaggatctcttaaaatcatcatcatcatcatcagctctaattgagaccgagaacaaagataatggggacacacccttgcatgttgctgtaatgttagggaattttaaggttgtagaactcatcctatatcacatcaataatattgagattattcgtcgtctactacaaaagccaaataagaagaacaatacggtgttacatgaagctgtgaagaatggtaacttggatattgttaagcttttacttgaaaaatattcgagtttagttaattcgaataatgaagatggagaatcaccgttgttcttggcggtcgatagagagctttatgaaattgcttctcacattttaagtaaaattgaatatgtgggaggaatattatcggaagagaagggtagttggtctggaaggaatggtttaaatgttatgcatgcagctgttatttgcaacaagggtctaaccaatattaagaaacgtaataagatcaaaggtacgtaccttcttcgaattacaaattgttttttgttacaaattatagggtaaatattattttgaaccttgtgttttgtaaaatttattgattagacctttaggttttttaaatgataaaatagacactgtatttttaaaaataatacaaataggactctaagttcattttttttatatataaccaacttgtaaaaataattcctaacacgaacagatgcaaaaaacgtaatcagttaattttgttataacacatcaagttatattattaagttttatttttgaaaagaacatggtccatttagttatttaacaaaataaatgatctagttggtaacttttctaaaatagtattcaccccaaattatattattattgtgaattaattccctaataaatacaacaaactgtacatatataggtgatgggatgattgagaagctgttagaaaaatatggcaatgatattttaaaagggaaagatgatcatggatggactcctcttcattatgcagcacacttgaatgagtttggtttgg

SEQ ID NO: 311349 - DNA, 1034 bp, Cannabis indica
ttatattattctatattatttattataacattatcactattctctccacttttttttttcttattttatacttttttggtagatttttaatcattgtcaatatgatttatttattcttaatctctcactcataaaatatttttttataatttggagacataccaaattttttttatgtcaataacttcaccatcttcataacttcaaattattcatgaatatttatccattagagtggattttctattagtatttcttttttctctatattttataatatatttcttgttagataactaattattgtcaatattctctctatttttttttatgttatatatatagactcttaatatttctttcactcatcaaaatatttctcaataatttgggcatatacacttttctttatgacaacttcacggttgtcgataattttaaattattcatgatttattcaataatataaattatttgatgttgaaaaaattatttttttgatgataagcttttgggattcgtgaaagagcataaaagggttatcggaataaagttaggatggaggcagtgccataacatcataaacgacactcaatactatttttttttctaaattttttctcaattttaatctacattaatttttttagaaaaaaaatctatattaataattaattgaaaaaaaaaaatagagcataatcaccaatataacaactaaaatccctaactaatcatgtatatagtaaaatagtaaattaatctcaacgtgaaaccttattaattatttgtaccaaatattttaattttaaaaaatcaataataatagtaataataaaatatcaatcaactaaaaaaaatcaaaatattagcataatccattaatatatcaggaaaaaaataggaaaattctaaaaaggtaaaatattacaatattactatgggccggcccaatcaacatttatacagcccacattgaaaaaattacaaaaataccacctggtctataccttaagccgcacgtcacgaacggagac

SEQ ID NO: 311350 - DNA, 1478 bp, Cannabis indica
ataggagggaaagattaagattcacctaaataattgtgtatatttggttgctttattagcaaatttatttattttgtggttatcaaaataatgtattttttttttcttgtaatttaatatctagtaaaagttaattgtgtaatttatttagtgaaagtccaataatattctcacttttatagaggttatagataatgttagaataataaagtaaaccctgcttaaaattatggaaagtcataaaagatgaataaaaaataatttctaaagaattgataattgaaaaaaatatgtgtaaaatctgtagagaagaataacaaaatatatttataatggttgagttttatttttttattcaagagaaacaacactgtaatgtttgtattttgtatttttcattctagctggatccactaattggattgtctattttttttgtagattatgtatctatggcattttcgacaagtttgcggtgttcatgcagaaagtatttattttctatttaagaagatagtaaatggtgtaaataaatattttaaaaaaaaatcttatgattgataagtatatgtatattaattatttaaaattataatatttttttagttgggtaatagtatatgaaaatgttttctctaccatatctgtgaatatgatagtatttattgtctttctgttgtcattaagttcaacatatgcaattgtactaaaaaatgcatattaaaattgttagtgtctactatataatttaaacttaaattgtaaatttttttttttgtattgaagttactgtgggtaggaaatccatcatgttgccattttggattgtgaaaattgcgatgtgcataaatatccaaacaccaatatccaactttgtcggaaaagaaagaatcaataccaccactttaatatgatattaaaatttggtccgtggacagagcaaaaaactaatccaataataataataattataataatgaacattcaatcaacaaaagttgcatgttttgagttggtaataccctaggattatgaaatggaattagcaatcctaattgaattaattatgtattaatgtagaattatattattaatatattatataatttaatatgtgaaactatgctgtaaatttgcattttaagaccccgttggtatatcaaggatatttttatagttttgacctgagaagggtagaattgtaatttatatgatatatcgtgcttatggactatattattatatagtatgtttattctgtctatcagtaggtgttttttaacaagtcggcgcggtatagtaacaattgagtattttgggctgaaccaggttcggagcccaaaatacattttcgggatttagggccagtttggcacaactgtgatgtgggaaaaagcagctgtagctgtgctgtaagaaaaaacagctgtagcaaaactgtagaaaaaagctgagctgtgtgtttggtaaattataaa

SEQ ID NO: 311351 - DNA, 822 bp, Cannabis indica
tgcaaaactacgtaaaaaaaccctgtgttcatatttttatttttatagctttgttctgtgtgaaatcaatattgtgaggctcaaatttagttaacaaaaatctgcgttaacaaaatccatgaaaaaatagaaacaaaaataaaaagttttagatttggtgcggacggtatgcaatgcataccatccgcgcgtagtaatggatgcatggtcgagaaatgccagcgcaagagggtgtcaacatgatttacgcacgcataggggaggcttcagacaagaagcctgtttgaaaaatctcggacactccattgtccgattgcgcatgacaccgagtatcactcgggtgtgcgcatgcgcaggggatgcttcccctttcctaatttttttcaattttcaaaaattcataactaatttaatttaaattgaaattaagttctgtaaaaaaataaattgcttaattttttccatactatccaaataaaataatttgagatcgtgaatctaaacattttacgtaaaaaaatttgtaaacgtcaatcaatcatcacataaatacatagatcaacatgaatcacatccaaattacacactcatcgttttaaatccatattttgtgaaagtaaatcattaccatgactctaaggctagttgttggaatatattttactaggatctagatttactaacaagtatgtttattaacaccctaaatatgaattctctaaaacaatgtagataaacacatataaagttcaagtaaccttacattggtggcaacaaaataatatgtctcatcccacttagatctctaacccttattccttt

SEQ ID NO: 311352 - DNA, 1119 bp, Cannabis indica
ataataaaaaaaaatacaaataataaaaaaataaaataaattaataaaagcataacataaaaatatataaaataccatattttctatgtataaaattatataaatcgtaaaaatatttaaattttcatataatcataattttataatttttttttattatttgtatgtatttgtaaaataatctccaaccttattaactataatattacaaaatgaccataatcatctttttacagtcaaatattataatttattatattttttcgattaaacatcattattttactaataaaatattattagaaaattattttgctaatgaaatttttgataataactatttttactaaacactaacctaaccacctgagaatggagctgaacagcctcgttgcgagccaaagcacgtgcgcaggccttcagagcgaaggagcacgtgagcgcgtcgggtctggcaccggcggcgcgtgacatggtcctgaaccatgatatggcttcggtaggttttgggctctgagctaagccacgaagaacggcgttccagtcgttggtggaaggaaattgaatgtaggggaagatttgtaaagcgtaggagaggtcagcggcggagggtgaaatagcgatgagttcgatgagtttggtggcggaagttggccggagatggaatattccggtggttaataggtgggaatggagttgcttgaagtgagagtgagaaagagagagagagcttcgtctctgtaacaaggtatctaagtaagccattcctccatgggagactgtttctaaaacctcaaaacccttctttttttcccctaaagcccttaactattttaatttataagcttagtccctaaaactctttaaaattatataaaagccccttgcttttatagtatattacttaactctcctctttgcattcttcattaattcatttcatttctttttttttttttggttatttagaatttttgtcatcgaattataacttgcctgattttttttttatcatgtattattgacagtgttataagttgattcttttaaccgtgtaattaattttaaaagataattaaagtttttttttttaaaaaaaaatttaattttacttaactt

SEQ ID NO: 311353 - DNA, 1897 bp, Cannabis indica
gagaatcgggctcagatcttggtgatactctgctacagaaaggatacaagggtttgagtggaaggagtcatttaattccactgcacccacagtaaggtttctaataacttttatgtgtttatttcattgttttataaatttatattaggatgttaatgcaacatacatggtagtaaatctagatcttggtaaaataattccaataataccctgaataggcacctataaagcttacgatttcatgtccatccttttctttcagtgcttgatcatgctctttgtccaacaacctcattttttactggacgggactgaaatctagatcaatatttagagcatgagacatgacagtggagtcagttcttaccatattctcatgtgaccaggcaaaaaaactctaggtttgctcttagaaattttattaaggctaattttatttcaagcaataagcctttactaattttaagcttcgtggttgggatggctggattaatgtttacttcttctaattcttctactagcataacatttgcatttttttcaccaagtcggagatccatatcttcgtccctgccttgggaaaattcctattgggcaatgcttttccccttctctaaactctaatcggaagaattttactttttgaccttagatagagcaaggttataatattcttatgcaatccttgaatttccctttagacaaccaactccacttttagttgggaacttaacgcacaagtgaaatattgatgtgatagcttataagtcatatagggctggtcagcctaacatgatgttaaaagttgaaaggacatcatcattaagaattgtgccattaccgttatgcttgtcagagcttgtcccattgtaagtggtaggtgaatctatccaagcgaggctatgctctggctagagaacccgtagactagatgagtgtaaggaaccaaatctttaagctggagccccatttattcatatgtggtcttgaataaaatatttgaggaagcttcgttgtccaccatagtgcatgccaccattttgtttgcaatctgcacctcaacaaccaaagggttgttgtgcagaaaaatgacgtggctagaattagattcagtcaatgttatgattggttctccaaaacgtggtaatttgggctttctctcttccacagcaagggctgcatcattttattcatattgcaaggctcagatatacttttctctagctttgctcaagtctccagcgagatgagggcccccaatgataacctgaagatgtccatccactggtggaggcattagctagttttggttattatctgcctgggcgaccctttattcttagtcagccttgatatacttttgtaagtgcaggttattttttctaattaggaaattgatctcctgcttcaaattattacattcatttgtatcatggtttagtccgcatgaaaatgacagagcttggttgtgtctcttttgcttatgtccttattcatgggattgggtttcttatatgacaccatagattgggtagttgcgtagattgtttttatgttttctttaggactaagaaagtagtgaattttgagacattctccataggaagttgtttggagttgccattgaacttgattttctttccattgccttgtctattttcgttgttctacctctttccattttgattcgaactgccaaaatgctgtgaaatctaagcaaatgtagcaactgtagtggtgtgatgttaatttttcttctgtcccactgtatctacatgtcgtaccgcttttttgagtttaatgataacaaatcaaagaacacaaataacactcttgagattgaacctaaccatgtcaggattgagatcttttgatctaagatctgttgggttttatg

SEQ ID NO: 311354 - DNA, 705 bp, Cannabis indica
caaaaactgaaaccctagttaggactgtaaacttgggcgctgggtgaaaccctaggtgctcaggttggctttgggggtgcaggttcgtgtaattttagcttccatggcctgaatttgatagctcaatgggttcatggtacagaatactaagaaatagttagttggaataaagttattgaagcccgaatttccattattgagttcccgaagtcaacatgggctcaaggctagggacccctcccaggtccacttgctatgactcaggactactcaactctgagatgtcatatttcttctcacatatatcaaacattgatgttcatgtcatcagggatacttttggtgtaaacaaaaccctttatttaagacaactttattatcatattagtatttagtcttaaaataataacatttattattttaattggagttaagacaacttctatcttaatacgattataagtttagaatttgaatttgaatttcaaatctaaaataaacttatttgaaaaaatagttaagataattactaacttatatttgaattttaaattagtagccttaatatttattttgaattcaaaattaaattttaaaaaataaaaactcaagacaataattaattatttacattaaataattatttataatttaagtctatatacagtgtatatatattgttgaccgaggttttcggcaacgaat

SEQ ID NO: 311355 - DNA, 947 bp, Cannabis indica
acctctatataagaataattacatcttaataaatatattacatatatttgtaaatttatttatgtaaaaatataatttatttaaattataatacatttatgaacattatatttactctaaaataattttaatataatatagtattaataattatttattgttattattatttacattgatattttttagttttttattttttttttctagttataattctatttagttataatctctcaattaaaatataatttacttagtccaagtgtattcttagataaagattgttctatatatgtttgggtgggtaatatatatctatatgtatatgtatgtaatagaatatagatagatatgggtgttttgatatacttggtaccaccacatgtgggcatcacatcacatgcatctggattggccaatggatttgcagacattgggttcggttgtgaagtaataataaaccaattacgttaattatacataagaaagaaagctatttttttattagagcattcttattctgtactaatagtattaatacatttgattaaacatattttttaaatattaaattatataaaattagatatttaacagcactaagagttatattaacacgtaagaagatatttattattagtgcttaatatccttttcaatatcatattattattaacagtgatggactcctaattgagaagccgtataattttttaatttagaagataaggataaaagtaaatctaaaatgaaaaaaaatattcttagtaagaattaaatcttgacttttatcctatgaagttaatattatacctataaaattaatattataattaattaaaatggcatatatatataatatagggcaagactatggtaggacttagcataagttccctaccggtagggaagtttttttgaccattgattttagatcctgtggt

SEQ ID NO: 311356 - DNA, 1025 bp, Cannabis indica
tttattattattattttattaatttatttatagttaatttatattattgttaaattattttctttagtttttttagttgttttttctaatatttttttagtttttagaagtaaaatatattttttttaattttaaaattttaaaatggtatttttgggaaaaaattatttatataattgtaaaatatatatattcatatttacatatatgtcgtaaaaatatgtaaataaaatataaaaaaggtattgtaaaagatgtattggaggaccaaggcaactatttttgttaggtgggaactaatggacaactatttttgttaattctattggacaagaatttagtttgacttagtgagagtttactttgacttgaatcatgcctaagttacaagacttggacccactccatttcatttatggcttaagatcaacaaaaatagttgcttaatttaactcacattctgaaattataaaatagcactagtgccatacgtgggatacattttttttgcctctctcttctctctcttgctacaatgttatttcgtggatgtgacatcaaataaaatcataaactttaacctctaagtttacaaaaaaaattaaaattaaaattatttggtgttctacccctaaaatgaggtaagcatcccctaaaatgaggtaggatgtacttatttgtgttttctgacatttataattttaatattataagacattgtacaacataactattttacacatcgcgtttcaagcttatttttggtgagtgatatttttttttaattttaaaattttatagaatatcttataactatgttatataaaaatataaaactaatatcaattggatgtcaaaaacccccccttttgatagatgcctcataaaaattttcaatattgtattcccaaattatttatgttttttctttgaaataaaatagtgatatttacgaaattattattaggggaattactttatataatattttttttattttttttttaaattttacagtttgggtt

SEQ ID NO: 311357 - DNA, 2287 bp, Cannabis indica
aaaactagaaaatctataaaataatctagatgtggtcgcatggctccgaacatcaaattagtttgactccgtgctccctagccaccgtagttatggttgggcgtttcttcgtccctcgcgaggcgataaaaaccccagccgtcgaaggcttgatcccggcaacaataataatcttctccagttggtgggcacatgtcagggtcgagtgcagctcatcagcctcctagccattggaccggctggtgtgtttctcatggaccaccgggcccttcatcacttcttctaaggtggccattttcttgggcaacttatctgaagattttgctccggttgcggtggggacagacatggtctggacttggtgaaattccaagatttcttagtcaaagccaaaaaaaccatggttgggaagatcgtgaagaacctcactcatctgaaaagaaaaatccaggagttagcccccaaaccaaaccctaagataaaagaggggaatgggggtcccctaaccgctggaaagaggccccctccagatgcctgcccaaggtaggaaatccaaagattctcctaggcaaacatcaggtgcaaatatccgaaaaacaaaaataaaaaaaaaagagggaagaaaaggatagaagtatgaaaatcacttcaaacgttcgacagcatctaagcaaggaaatcattttctagccccaaaggaaaaacgatagtaatcatgcaaaaaactatggcgtacaacggttctcgccgtgaccaccgtaccacagaaatcaaatgcgaataaaatgagaaggtcgttgttctattttttgccctaacatgtagaaaaaataataaaatagaaaaggtgtacacatagacttacacgaaggtgacaagcgagaagttgatgtcgctccgtggtaaaaatggactggccacggaagaggaacagcagcaggaagtaagggacttctggaatttttcaaatatgctagttgggtcgaaaatggcgaagtggtgaaaataatccagcaaaaaaaaggtgctggcttttataggccggaaggggtgcaagttagttgtgattagacgccatcgtacggtgggaatttgtatcgattcgcaatctgtgatctagcggatagggtgaacagacgtaatgaggagaaaggacgcctaaaatgtttgagtacctctctgacaccagcattaatctgaaggtctatcactagacgggaagcgaatcgttacctgtaaaaggaaataaaaatcaatgatgatagtcataaatgcgacccacgcgcctagggcacgtaccactacatttattaagagaccggaggccgcatacaagcctcatttaccagttactaaatgagacttggggggtaaatgttgcctaagatttttcccaaaatacatggctgcggctgcgtgtgacacgtggatctcaaagacatgtcacccatgaaattagctaagtcatatatagacaggcaagtacagttcaaggagtgagcccccggagaggcacataaagcgtgtctctcctctccgggagatagaaatacaacaaagcatctccgggagaaggagaatctgttcgaacagtcactttgcatttcatgcggcatgggggaaacttcttgaaacacttataagaggacatgacagatggcgtaagcctcgtttacgttgattgcacgataattatattttttaattaatttatatgcgtaataatattatgtattgaacaaaatcaataatttaaaataaaaaaatttacaacaaataatattcttttctttgttaaaaacaataagagtttttaatttaattttaaatatttcacaaagattgaaaaacataaaaatatgtgtcaataaataatataaatattaaataactcacatatttgacaactgatatgaaaaactaattacataattttttattagtattttaaacttgacaaagattaaaaaatacaaaaatatattttacattcacttaaaaaaatacaactaactgcgcaagattaagttcatcaatcccccacataaaaaattaataatactaattttgggacaaagaaaaataaaagaataatgatctatataacgtaaaagtatattacaaacaatggcttctaaactatgtgagagcttttgaaattaactcttatattacttgttaacgtcgattttcgttaactatatttgagcctaaatagtgatggatttgcacagaaaataaaaccagtaaaagaaagatatgaacacaaaggtttttacgtggtttt

SEQ ID NO: 311358 - DNA, 2009 bp, Cannabis indica
tttgatcctagtttcgtccaatgcgctaactctgtacccgatcccgaaggaacaaatagagaacctcttttctttgattgagcatatgaccattgattaatgaccacacgagctgaaagaataacatctgccgcagaagaagacttttctcaccaaatcactgagttctaagcattccacatcgcccaagccaccattgctgcctcttctctcaaaccagacgcagtagagtgctgctgcaacatcttgccaaaccaatcatgaaaatcttgtccatttacgttaccacaattcacgattgaaggggaccaacaagatcttgcaaagtgacagcttaccaacaagtggaaaattgattcagccgcctgattacacacagggcaagtcatatcaattagaacatgtttagacactagttgaaccttagttgtaagacaaccactaagagcacgccatagggcaagtcatatcaattagaacatgtttagacactaactgaatcttagttgcaagacaactgctaagagcacgccataaaaattgatgaactttaggagaattttttaaatcctaagcaattttccacaaaacacctcatcattatttaaaagaagaacatcatctttatgaaaaaatttattagcttccttaacttgaaattgcccatgaatattcatagaccagtaccaactatcttcagcaacggtatggttaagataaatgttgtagatgagttcttgatctctctcattaaacaagtctacccgcaatgatttcagaatcctaatttcttgagtctgccatcataagatctgaaactaagcagttatcaagatcaattaaagaagaggtaacaaagggaaaagaggcatcaggaagccatggatcccttagaacattaatgtttgaactatggccaaccgaccgacaggctccatctttaatcaagtcttgagtttcaaaaatgctcttccaaataaagcttggattatttccaagagttgcattaaggaaggaaccctaagggtagtaacgggctttgtaaaggcgagcaaacaagagaagattcattcgttaataggcatcaagactgcttacccaacatagacaagttgaaatctcgcaggtcacgaaagccaaggccaccatgatgtttgtgcacgctcaattgatgccaactaatccaacttactccacgactttgagtcgagcttgagccccaccagaattttctcatcattccttccaacttagtacatgtttcaactagtaacaaaaaaaccgacatagcaaatgtaggaagagcttgagccactgttttcaatagaacttccttacctgccttttataacaatttgcctttctaactttgaattttttttttccatcttgtacgtctttaagaaaaccaagaataatatttttgtttcgacccattgtacaaggcaaacccaaataaagactatttgcaggagcttctatcatacccaacgttctacacatttaatctttagtgaggtcttcaaactagagaagatacttgatttggaagcattaatacactaaccagaagctgtcttaaaaacttttaacaacccgataacattccttgatttccgttctgtagcttttgcaataagtataactgttattcgtaaaaaaaatatgtgataaataacaggagcaccattacacattcgacacccatgaggataaattaatcgtaaatattgataatggtaatgataaattgataatagtagtagtaatataatagtaatggtaatggtaatgagaattaatgaatattggaataaatgataaattaacaaaattgtcttcacatccttcaaacttttaagggataattacataaatatcaaattttgaattttttttacaattttacgtttaaagttatttctttatatttttacggtattttacaaaaactacaagtaaaactacattaaagtaataagaaaataacatcaaaacaacataaaaat

SEQ ID NO: 311359 - DNA, 1612 bp, Cannabis indica
ttccgtttagatttttaacccttgattctttatgtcgcagagtataatcaatatctaaacatggatcttcttcaattggcagatttctacacaatcttccacaaaggcatgagtacttaattgttatatataatttggttagtatagtatacatatatatattagtaattttgatatataatttggttagggcataaaattctaacatttttctcttgcacgaatttggagaagaatgcaaagtcaattgttgaaaagatggggacatccaccaagggggattttaattttttctctctcaaaaaatttgaattcaaagtatgaaatgggaaaaagtggtgaactgaagtgcttcaccctattaatatgggaagaggtgacgatctatgtgccccaagattagtggctcaaattgcattttagaaaacacaagttaatccaaaggtcttggaatggaaaggtcagaatttaatgtggcattagaatcaaggaattctcaattgtaacatccgcctaagtacgagtgctaacatgattcagccgtcaacatgctaccctaggcatcacgtgctttcccaacgtgcatgaagttaacagaccaagaagttggtgccacatgtagttcgctagctaaaattcaaaggtccatagttatccacaactaaagaacgcaaaagttggaaagataatcccttttctaaatttcccacgtgtccataaggatcaagatagaagactgcaagcctttgcaactctcgagttaaggaagcttgggggtaaatattatatgtatttctagaagggaggcacgtggcattttcaatccaaaattaattgattaaggcctaatcaaaatccctacagaagggaggcacgtggaatttccaatccaagactatacagagggatgggcctctaaaccatccgagatataagatatctatgcccaaaatcaaacgtctctagatccaaaaaggctcgtccgccccacataaaatgaagtagtcaagacccttcaagtacgtggaattttcaatccaaaattaattgattaaggcctgatcaaaatccctacggaagggagggacgtgggatttccaatccaagactatacagagggatgggcctccaaacaatctgagatataggatatctatgcccaaaatcaaacgtctctagatccaaaagggtacctcctccccacataaaatgaagtagtcaagacccttcggataggtgcttggaatacatccaaaagagctttttaagaaattccctagaagccaagctgaagctgacgtggtgatcctttaacattgaatcccactgtatcaggaggttgtcccctatgtcagaccctgggagtgtgcgtaccaataaagggaacatctcctttgtcctacgaccactattctgacactatagtacgcaaaggtggcgcacacacgacacctgtcaacctcaagtggtcccctgtcttacggagcataacatccccacgagttgggcctgagtccgtgggccccaagttagtgtattttatttatttacttcgttagtgggtcatgtttacatgcaaaccctagtggggatcctagcctataaatactac

SEQ ID NO: 311360 - DNA, 991 bp, Cannabis indica
tgtgaggctcaaatttagttaaagaaaatctgcgttaacagctgagatgaaattcaaacatggcttccacacaaatttttttatcttaggcagaagattcagctgccaaagaagtttcaaccaccgagaagaacctgcggagcccgaagcttgaccccaccccaacctggacacggtactccaatatccactctttaccaaaaaagaaccattatcagaataataccaaataagcctatcttgacaatcaaacaaggagcacaagacagacaaaatggcagaagcctccctctcatcgaaacactcctcaacaagagaagaattccatcttccagaatcaattttgaggtcactaaccatttgtaggtctgacccacccgaaaagaaccattatccgaaaaataaccattatctgaaaagaaccattgtccgaaaaataccaaataagcctatcttgacaatcaaacaaggagcacgggatagacaaaatggcagaagtctccctctcatcgaaacactcctcaacaagagaagaattccatcttctagaatcaattttgaggtcactaaccatttgtaggtccggcccaccccgaaaaggaatacgtccgtcccacatgatcctttgggattcaagcgtcttcatgaaatctgattgactccctggagcccacacgccaacgataacaatccttccagagatcacgaccccataagatacttttccaaagaaaaaaagcacgctttgtcactttaacagttattagggggccattacagaagtagaaccttttcattaccctggccgccagagagtcaggcaagttatacaactgagcagcctatatagctagaagagactgattaaacagaaacatgtcctgaaagcccaaacccccatcattcttatgccaacacaggcgaggccatgtacaccaatgcatctttttcttatcatcatccccactccaccagaaagtggcacacatac

SEQ ID NO: 311361 - DNA, 1641 bp, Cannabis indica
tagtgacaacttgtaactaaattttatgtttagtcaaaaataactctttttttgtgactaaatttagccactaatttttttttttgtgactaaaaagtactttccactaaaaatggccttttttttgtagtgtattattggcgtgccacttcagctaaatttgacgcatatgacgttttctgatatttttcgattattttttcttattttcctacatttttaaaactaacttttcggttactaatagtattgataagaaaccaattagttacatttatataaaaaaaatatatttctaaatcatataatttgggatacattttggttatattatatctaaaacttatttgtatacatcttagtaatttattagttatttttaagttataatataatagattatataatttaacatacatttaggtaacttcaaaaatcacaactagaaaaataggctttagaggaggttttttggggcatacaacgtcaatttcggtaaaattcattatcgacgccgttccagtcgacacagtaggggaaaaaataatttatacgttaagaattctcttgtggtatgctttaaatttatttattgttttaggcttcttatatttttgtttctatataaattgttagttttgtttaattggctatataatgtaactagttcctactacattttgtttaagaaactaggttttatgtttcaatttatctaatgtaacttgtttctgcaatttaattgttaattttttttcttaaagaaactagtttttatgtttcaatatatcttttgattgttttaattaggttgtcttggtaacaggtttccctatttagttattatttttgttgttttatgtaattgactctaacattcttgttcttaattcgatttgattaaataattggtttctcaattatagttttaactaggtgaatattgtaagtgatttcagtatgtcaaattctaacgtctaacaccagtgacaattccaatgtctaactctggtgacttttctagtaatgaacacaattctggtgactttttttaatgatttttgatgacggtaacaacttcggcgagtattttcattctattttcttctttttttgtggctaatattttattttagtagataatgactatttttggtagtgtagtaggttgatggttaagtcattgagcttttgagaagtttgtaattattttaattttggtataatatttgatttattcaatattccatacagtgtttaaaatacaagtatgtaaagtttatttataatttttggtatcgataagcattttttttttattaaaataacaactctagcaaatatactatcattatattttttatttcttttgaggctaatatcatgctttagtggatagtgaatgttttggtagtgggttgatggcctagtagtgttggaatttctgagaagtttgtaactagttttaatattagtattattttggtattagttttggtaatgggttgatgatcaagtatttgagcttataagaaacatgtaaaatttatatgagtttgcatatttgtgtagctcgatttttaatgaaagaaattattttcttaatttattgccttaacaaaattatattactattatttt

SEQ ID NO: 311362 - DNA, 2169 bp, Cannabis indica
catgccttagctttcttctcagagacctataacaaagatgaaaatggattgacacactaagaaacaactgcaaaaacacattctagaataacaaaacctaattgtaagtaaaaacagagcatcagtacattgtggcataaacacaaagaagataaaaatacttaccacccgactgtttccaccatcaacatctaccttgtttcccaacacaacaaatggaaagttctcagggtcggatggactagcctgaaaatcaattccaaaagccagtttcaactagtgctccaatatttagataatatttacagattaaactaatgaaaattacctgaatcaaaaactcctcccgccagttgttaagattttcaaaagatttcattacattcacatcatagacaagaacacaacaatctgcacctcgatagaaagccacaccaagactttgaaacctttcttgtccagccgtatcccaaatctacacaaatcagaaactattttagtaaaagatatcccaaattttacttaatgcccttctaaattaaacaaagcctaatcaatataccaaagatttgtaaatcaatcataaaagatctaacaacaacagttcaagagaacaaaaaacctttctctttgtggcatgatctgtatttaaagatttctgtcaatgcttagaaaactgcgagtacttttcccatcccaaaagtataatagataaaagcagtattaaacggtatacctcagccaacatggcgtgaaaagattagaaaactaaatattcaactttagttcatcaagggcataagggaaaagcttaatttccttcaatttgctaaagcttaatattcaattcaaatcatcatagacaaggaaagagtcaacactaacaaaaataaaaacacctaaacagatttacagataaacatcccccaatcagaacaagattgctcaccaatctaaaactcaaaattgatcaccaaagaaatgtattcaaaacaaggaagagaccaacctgcagtgtgaacagcctgtcttcaaactgaacctccttcgtcagaaaatcagccccaattgttgccttgtactgattactaaacttacgattcacgtacctaaacatcaattaacaaatatcgattaccaaaacaatccttcaagaaacaaaatttaaccagaaaagtgtacgatctaggtttaagaaagtactgattcatcagcgatgtcttcccaaccctggcaaaagaatcatacaaaaccatatgtcaatacgataatcaaccattcattatttcaaatcaaaacacaaaattcattcaaaccaatacaaataatcaagaaaataataataatttacccgctgtcgccaaggatgatcacctttaggagcatacgcctacgagaagccatggatggaattaaggttttatgaaaatcgaaacaaaaatgagagaaaagggggtttgaatttgggattcaaaagttattggagagaggaaattttggttatgagaccgtaattttgtcgatcgaggagggaggctctggttttggattttggtgagccaagccagccgagccccaaagaaacgacagcctggattggatactcatcatttcattatatttttattatttttaagttaccattaaaaatttgatccacaaaaaaaaaggtcaatgttgaaaatttaattattataggtagaatttttttagaataattcactcgtgaaaaaaaatattaaagcattaattcatcattttattgttcaaaatatttcataaatttttttagtattatttttttgattgaaaatttgatgtattattaaatttacaaatatgctaataaaatagtataaagttaagttgggataaactttcattgaagtaacgatcttaaaaaaaacaaacagcataagtcaaataaatagttattttgttcgtcgtttaacaaaaatgataaaaatattatttataaaaggaaataaagacctacaatctaaaagtgttaacgaattggtttggtctaaattttcaattttttctaaccaaactattattacgattttttaaaaatttaaaatactaaaccataccaatgaaatgatcaaactaactaaatcaaaccactcagaacggattgattggtttgaaccatgatttgtattt

SEQ ID NO: 311363 - DNA, 1948 bp, Cannabis indica
ttccatttctgaatgtctctaaggccaagtccaccagcacttttggatttgcacatatgctcccatgccaccaaaccaggccccatcattgtttgattaaccttccataagtatgatctacaaatggctataagtacaacattaatcaatgttactcttcccatatatgacgaattccgagagctccatcctctaattttactaaccatcttctctaacaagatctgacattcagaatgagatattctttttgaagagatagggattccgaggtacctgaatggtagagagcttcttttgaattgtgaggcctcaaggattcttccaacttcagtctctggcatgccagaacaatagatcgccgtcttctgctcatttggcattaaacccgaagttgaagagaaaagtttcagccctcgtagcatcaacatgactgaaatgaaatctccatgactgaacaccaacaaatcatcagcaaagcacatatggttcagtttaaatgatgagcatctttcatgatatttaaagccaggcaaatcaccaattttttgaaggattcgtgataggtattccattcctaatacaaagagaaggggagacataggatctccttgtcgtaaccctctctttgcattaaaaaatccacacatagagccattaaaaaggagagagaattttggggtcctgatgcagctcattataaggtcaatgaactgaatcggaaacccaaaaccatcaagcatttcctctagaaagctccattcaatggtgtcataggccttcctcaaatctattttaatcatacagcttggtttacaatttttcctcccatacaacctcaccatatcctgacacacaaggacattatgagcaatatatcgtccatgaacaaatcccccttggttttcagcaataagatctggcaataccttcctcaatctattgcagagaaccttggtagctgtcttatagagcacattacaacaagagattggtctgaaatccgccacatttttgggacaagctaatttgggaatgagagtgatagtggtgtggttgatctctttcaaaattttctcagtagtgagaaaggataaaatagcctttgtgaattcagttcccactatgtcgcagttatcctgataaaaagcactaccatacccatctggacctggagccttgataccaggaattgaaaacgaagcctcttttacttcttgttttgtataatctgccagaagaatagttttatgcaactctgtgatcttggggccaagattgactacagatcgcagaaccttccttctataatgcatactagttcccaacagtttctcataataactcagaaatgcattttgaacaccatcaggagagtcaaaccatgttccatgctcatcttcaatcgagaagatcttgttttgaatccttcttgatttcagagaagcatggaagaaagtcgagttctcatctccataggacgcccaatttagtttagcttcctgtgaaaggaacatagaaaaatctttatgaacttcattataccttctgttggcttcttactcagctgccatcagttgtaatgagagcggattcttggtcattgcatcttgggctgctattagttcattccttgcaatcgtatcagccttttgaatctcagagaagccctcttgatttatctgtttgagaatcggtttcagtcttctgagcttagacaccactttgaacatctttgtaccaataatgtctccttgccaacattgtcttacttttgcattaaaatctggggctagtttccacatattgtagtagcgaaacgacttcttccccgagttccactctccataaatagacacaagtatggggctatgatcaaaagataattcaggaaggaacacaacttccgaatcaggcaaagcactactccatttcgaattaatcatgg

SEQ ID NO: 311364 - DNA, 1958 bp, Cannabis indica
aattattagacttccaccaaaatctacatatggcactctgaatttgatgacaaatacccacagggagaaggaacaaattcatagtgtaagccggcaatgcccgtaccaccactttaataaggacctccttaccggctctagagagaaacttattatcccaagtttgaatcattttctgaaccttgtccaccacaaaactgaacgccgcagttttattccttcctatcgaactagggagtcccagatacttgctattctcttcagcctctctaatactcaaacagttacaaatggtctctttcatatgactagtcgtattagtgctgaaaaaagccgaagactttccaaaatttaccctctgccccgaagcattagcaaaaatctgaagcatttgttggacattagcaacttctctctcagtagctttgcaataaagaaaacagtcgtctgcgaatagcatgtgcgacacaataggagcaccattagccactttgcacccatgaataagcttcctttcctcatagcgttgaataagagctgacaatccttccgcacaaataagaaacagatatggagaaatagggtcaccttgacgaagcccctactaggaataattggacccatagtatacccactgctcacaatattatatttaaccgaagagaggcaggcatcgacaagccgaacccatttatcactgaatcccaatctagataacatagctgtcaaaaaatgccaatccactctatcataagctttactaaggtctagtttcaacgccatacaaccgtccttcccactctgcttccgcttaagataatgaagaacctcataagacaccataatgttatcagtgatcaatcttccaggaataaaagtactttggttcaaagaaataatcccagtgagtaaaccttttaatctattagccagcactttagtgataacttttgcaacaacattacaaagggaaataggtcttaactcactcatttcatcaggctttctcttctttggaatcaagacaatgttagtatcattaaaaccctccggcatctcctcagtcaaaaagaaattctgaacacaagctatcacatccgcaccaacaatgtgccaatatttttgaaaaaaaatttgggttcattccatcaggccccggagacttattcggatgcatttgaaacaaagcatccttgacttcttgagcttcgatgggtctgattaaaagatcattttgctcctcattaaccttgggagtaacacaattcaaaacttcttccaactacaaggttcggtcgagaatatgtttgagaaataatcaagcattaattcacccaaaccggaatcccaatacttcaacactcccatggcatctttcaaacaaacaataatattattacgtctacaagcggaagcttttgaatggaaaaatttactgttttgatcgccattttttagccacaatttcttcgaacgttgacgccaaaagatctccttctggttaagtgtttcaaaaagctgaagcttggtgtccgcatacagttgtttcccctccctatcacgcctacacttaagcattttgaggtcattgttacactgcttaatccttgctgaaaaattcccagcaacgttactcccccaagcttttaaatcctccccacattgataaagcttctgctgcattcgagtcccacccgaacgactccaactctcactaatgacagcctcacactcctcgaaccgagtccaataattttcaaatcgaaaagaattacccccagccggtttaacatgttgcaaaatatccaagaacaacggagtatgatccgaaggagacaccgccaaattaaaaagcttagctccaggatagcgagtcaaccaagcaaagttatgttaggttttatgccctaaataaaactccatttcaatgtaatctattttattcgacatcaataaag

SEQ ID NO: 311365 - DNA, 1495 bp, Cannabis indica
tgctggcatacatgcaatgtaattgtctcttcttaccaagattgaactttcaaaaaaaaaagttattggattagtggtatgtctcatttttatcaggctccactgccttgcattgtaacatcaacaatattgttgcttaattagatatgctattgattgagaacgccaatttcatggattagtgatgtgtctcattcttgaccccttaataattgtgcacatctctctaccataccctgattttaaatccatgatccgtaaacttccatattgaaagtaaatccagtgatttaatccatatatatgtatttcactaaaaatttttgagaatttacaaaaaggaaaagaagagaagacacaaaagggcctcaattgttgggaccccaacagcttaaatacatgactgttctaagtgattcctcagattgcttcaacttgtcatttctaaagttattagacaaatactgagaagttgggatcttcttggcgtgagaataggatctgagattggcttttgtgtggtgttgtattgatctcaaagtagaattccatctgcaaacaccttggtctttcaaagcttcaactactcctatacatgctgctgcaatccaagctctgcttgttgaactcattggtttcttagaaatatttctttgtagaagtgggaaagttcttagttgcttgttttgttggttgagttgcgtttgaattatgatgaagtacatatgctgttattatatagggagatatggataaggtttgtgagtgagttggcttttggtaaaggaataagacttgaaacgaaaaaacgtaaaataaatattgttttcccagcagttttggaaaaacctcttgttgtgggtgcaaaataccatttgctaataatatctcatgctttaaaagctggccaaaattattaggactgcgactaaagactaaagactaaagaccaatgactattttgtatatttatagtgaaagagaaaaaaaaaaccacttgcttatagaaaaagcagcccatataattgattacatacatgttaaatggatgagatgtgcgtatgttacttccacgaacctagttttcattttgtccttttctttaggcataaaatattggacaatgcttatgtaggatcttaggaaacgactgtatgtaaagtctcaagtttacattttatacgtgtcaccattatagaatatataggtcagtttaataaagttgtgctctaaggaaaaacagctgattgtgctgctgtagcataacagtagaaaaatggtaagctgagtatttgataaattataaattttaaagtgctgcgtgttgttatgattctataataataatattttaatctatttcattaaaatcacaaatatatgggtaaattgcggcataaatgcttaatatttcagattttatacacttaaatacctaatgtttatttttagaggcaaagatacctaatgttacaattctcttacaccgttacta

SEQ ID NO: 311366 - DNA, 1846 bp, Cannabis indica
aatggttttaaacggactagctagtgtgacgtctcgggaaatcggggcgttacatttctccttacggatcacgggactactgactatcacaatctccctctccctctacaactacctagcagcttaggcctacattaataagaaaagaaaagcccgccccattttaaccctaattgcacgagaccaaccatcttttcctcttccgttcattctcatccccaaccgcacacgaccagcaacaacagccgcacgagaacaccaactggagcgccccagtcgtccgctcctcctcaggcccatccctaaccgtcctctcctccaccaactcatcccgtccccaatcttgaaaaaaatggcaataagaacttatgatttgttcgatatgatgatggtactaagatttattcttcttttgaatttcatatatgttgtttgtttattgagtaaagaaaaccctttaacaacactttgacttttagatataatgtttgagacttttaatattctccatatatttggttgataagtatattaatacaataaaaaatagtgataatttttttacattttgacctcaaatttttatttaaacaagaagaaaattaacaaaattaatttttcattatttgattttttttttcaaaattgagaaatatatatttttagttttaaaataaatttagaaaatatttttttatacttttaaataattatattagtggatcaatataaatgtaccacatgtacatgatggtacacgtaggcagtccatgtcagcagttagctgaaataaatggatgacaccttaaatttgctactaatttagcagtttggaaggttttaccaccaagattttaagttggaaggattaagttcaagtaaaataatagttgagagagtttaaccgtaaattattctgtaagttcttgtgtcgatcatgttttgtctttcatacatatacatcatatattgtggtgtaaatttttgaatgttattttcttagctttagtagatattagtaattttcagcaacattatgaagtgtggttataagtatttactaattttttttatgataattattaaaatttaaatatataagaattcaagttggaaattatttttctctattttattttctaaaatacattattaaaagagtaatttgtagcatagatacataagtgacggtaataatacataagttatatttctgaaactttcataggtatctaaccagtaagtgttaagtcaatctccacgtgtcagtccttgagtggtctaggtcattaatttttactttttatttaaaaattaatttaaatataccaataagaaaataatatgaggataatgacttgtcacttaatgaacatgtacttatagaaatttcagaaatataacttaagtattattatcatcaaaagttaaatttatattgcaaattacttgtatcaaaactttacttttttaattttatctcaaacttttacattatattatacattaactttttaaaaatacatcactaaaaaatttacttttaattttcgaataaattacatattaatatatacacattcacatataaaaataaattttaaaacctaattaataaaatttgtttagaatagtgaatagtatttataaatataggatataaatagtaaacttcaaagaagtttaaaatgaaaaataaattttaaaatacattaacaaaattttactttttatattttacctcaaacttttacattttacctaggggtgtgcataaatcgatccaatccaatgagaaccgaccgatccaattacaaccgaccgccaaacattggatatccaattg

SEQ ID NO: 311367 - DNA, 993 bp, Cannabis indica
ataaaaaaaaaaattttaataaagtattttaaataatagaataaaaaaagctgatcaaacgctctaacgacactatagtaccattggttgatatgtctctttattttcattattttttcttaacaacattggtagaagtgttgtgtgccaacaatttttttttaacttctttcattaagttttttttttttcctttgaaagttaacttttttataaactttaaattaatatataatataaattccgtaaaaaaaaaatactgttttaaggtgtaaaaataaaaaaaccttaaaataaatttatcaattttaattttgataaatatccaataaaagaaatctagttataaaaaatcaattctaattaatttaatatggaagttaatattttagttatattttttttttacattaatattttagttattgataaaatattttaaccagttgtcatcattatcttattacctaattttatttcttaattaattattaatattctaacaattaattatgataaaaaccttaaattccagctatataaatgtagaataccaattctccaactcgctttttcatctaataatttcatcaaaagagttagtgagaagtaggacgtccgaatacatatactcattttgctcatattttattttataaatacgttttctacctacacaatttatagttatttcgtatacatataaaattattcatatgtctatagatttattaaatctaacactcatttcttcttaaaagtaagagtgcaaataacatagcatagcataggggtgtgctaaagtcatccgattaaatcccaaccgattcaatagaatcggatatccaatcataattggatcagatcggatgcaaattttaaaaatccggatcagatcgaatgttggatgacacatctgatccaatggataaccgaaccgatccaatccaatatcatctaatgtttatccaatcatatttaatatttataatt

SEQ ID NO: 311368 - DNA, 2741 bp, Cannabis indica
ttggtgtaggtacttcacctgaggtcttgacgaccaacagtacaaatacttcccttgtgtccatggatatgtgttgaacttgatcagtaatctgttcaattccctccgtacagtcactctgaggaatactattttaaaaggaatagtcagtaatacgagcgatggagcacgaagcaaacactcgagagacgactttctcatcatattggatagattcctgtagtttccaacaaggccatacgaccaagcaacaaccttaaggcctaggtcgatcaatgcctttgatcgacttggaagataaaagagcctacataacaatattaataggaagcggccaactgatacgcatatcaccacacatgatgtacgtagggctgaatttgatataattgtcgctctggttaagggtaacactacttcgaagtcatcagagtataagctagaataagagaaattttctcctctctcagatcgaatcaaggctttggagaccccctccaaattcaaaaatccaatgtggcatttgtacactggtaaagaagaccctgtctcctacatatacaacttcaaagtacaaactgacatgcaaggcattcgagacaatctcgttgttgaaactttctagccacgctattagaaacagcacaataatagtatcttaagctttccccgagatttgtcgattattgggagacacttaagcaagcaaattatcgttgattctccccgtcaaggcatagactaatcaagctcaacaatttggtctgcatcaagcagcaagaggatgaacctctaaaggattacatgcacaattcttagacacaaccaagcaggaaaactcactaaaaacaccaaggtcatagaaatggtagctggactaacaattttgagtccactcagggcagacttaaaactcaagtcagcagacactgttcaagagtttttagatagagctgacaatttcatcaagcttaaagaagctatcaagaaggtctgtagagttgctcaaacaaaagcaaccgaatacactttttatcctcttcttaaatcctaaatggacattgatgaggaaggtgaatgtaaagattgcttaattttaatatgaggattagcaaataattagagcttaattatgaaactagatttctaattacgatttatgaatttatgttgatatatttgaattctaggtgtgttatttactttatatatgaaattttatattttttatatgtttatgcccagcaacattagaacacgatgtttggccgatagaatcatattttcttatggtttagtattttaattttagcgggacaatataattagtcgttgaaaatgtcgagattaggcgggatattgtgaattgaccattttacgccttggccactttattagttaagttttatgtgagagacattttagtcattttatgtgttaagggttaggtggctccctctcatattggcagctagccacttagagattaaggtattaatgaattttttttagttggaaataggaagaattatcaagaataggaaaaaatagaaaattagatatttggcactatctcttgcttcggttcagctgagaaccaagggggaaatcaattttattctacaatttaaggggaaaaatagtaaggttttagtgattctaacccaaggtaagctcccaagcgcatccctttgtgattccttaagtttcaagctaagtttatgcatgattttagaattagggttctgtgatgttaaatggtgtttttggattatgggtatattacttgatgttattgcttgatttattcttgttgtggcctaattaggaggtctggaaggtttggtagcatttgtgattgaattgaggtatttgtgatatttttggtgtttcttgcactgaagcggtcgaccggtttagtgggacctgtaggaactagaattctggttggtccccaggttaccccacagaaacggtcttctagttggggagccggtctgccagttggggcaatttagggaaccctagtttttctcgtttttgcaatatttaaggtattgtcatgttatccatcgatagggaaacttttagtttcaattttaagtcttgaaaaagtgattcattacgaatattatgatttaagggcctataaatcgtcgagcagcagttccactcaggttgaccggcacacctaaattcagaaatgaggtaagattagtataatgatatgcatatgtgtttacatatttatcgcacatgtttattaagcctgtcagattacatcagtagcggtatcaatacacatagaattgtgttagataccgataaatgtatgtttagcttagatattgatcgaccctatcacatcagtacagctagagtatgactagagtacttagtataggctgatattatggtcgatagtattgtcgtacgaacattcgagacttagtaccacctaaagtacagggattggggttataaatgggtgtatggacgcctgattgtaatccaggttatatttataaatatgattatgcttttcttactgagtctgtcgactcacagatattgtttgcatgtgtaggtaaaggcaaggctaaggttgagcagccgtgagagagagcagatgaggattgtacatgtcggggcagttaggcctgtaggtaatagcttaagacatttccatcctgcctttacttatattctatgttagccttcacttttttgctagtttatta

SEQ ID NO: 311369 - DNA, 1481 bp, Cannabis indica
tttcagcattagatcatcaatcaaacggtaaaaaaaaaaaaatagcttaattgtatttttgaaaaaaaaaattgaatattttattattatttgaataggttctccttccctataaaatgagagctcctctacctcatttttcacattcagaaaagtgccaataaggtcagatcatctctatctagtttctctctctagaaatttagagctttcacacttagtcaattcttttataattctcgtgagaaataaaaacttgaagtaggcgtagctccattaccattgcgacaaggggagtgaactactataaattctttgtgtctctctatttactatactcatctcttatttcatctcgtcaatttagcgagcgagtgttggccactttttaccatcaacaaaagttcattggttactatgagaatcttaaaacatctaaatgcaaattttcttgggattttttacgctaactaatgaggagattcatggtatgtggttgtgcactggggactttaacaagattgcggggttagctaaaaaagtaggcggcagggaaagggcccaaggggctattgatgatttcaggaagatgttagatgattgtgcttttattaattttttctcctgtaaaatagagcttacttggtgtatgaacatgggtcaaatgggatcataaagaggcttgatagagctctctgtaatgaggattgggggagactttttgcgagggtagatgttaagattttacattggttggaatcagatcatagagctcttgtggtggatattccagtgcgggattcagaagataaatgtggccaagttaagagacaaagtagatttatttttgaagaggcgtggtgtgaagatgaagaatgtaagaagattattgagaaccattggaagcataagactgagattggtcagctggaggcttcaaaacaaggttgctacttgtggtagagctctatagaaatggaacaagactaaggaaaaaaagtacttaagggcgagattgatgaggataaaaagttattgaatgaactaactactgcccaacaacctagtacctggtagagatcaagaaataagatgttgaccttaaaaaatgatcaactgatagttgggtcgtatagatatgatgtttgtcacgcgttagagaaatagaataaaaaatgcaataaacacagggatttgttatagaggtttggcccccttgtgatagcgggtaatgacctactcccttttttattgtatttatactaagggaaatactatccagatcactatatgtgggatctgttatagcaccccttagaattacaaactatgaatcagttggcaaatctcaagtgttggacagcctacagtgttggacaaccttgggtgttggccagcctatagttggcgtgtgagagagatgaagaggagagagagagagagagaggagagagagagagagagagagagagaagagagac

SEQ ID NO: 311370 - DNA, 699 bp, Cannabis indica
tatgttgttaggaatctttcctcggactttcaaatgtaataactttgcttaaaagttaaaggaagaaatctaatggcgtccaggatacaatttagcttaaatcccttcaaataactcgttgtaatactgaaacgagtcagggttgtttttaacttctttagttgttggtcgaatgaaatcttcaaccatgggaatcatctcatcatcttaatcatctaaaaatggctcagcaactttcgttcgtgcaacaacttttgtttttggctccccatggtaaatccacttttgataaccactatcaaaaccccaattaaataaatgcgcttccaccatatgtaaaggatgaaactgagtattcatgcatttaacacacagacacctattttttccatcaaaatctttataagttgaagccatctcaaaaatggcttgtatgcacttccaatattctttaccacatttttttctaagttttccaagtcttatcaatcataatctaaatgtgttgtaagaatttatgagttttagcaatgtgagtaaaataattggaatcttctgctattttatgaaaatttgtttataatcataattatatatttctttatttattatttcacgatatttgtttattatttcatgatgtttattgtgttgggttttgtgccctaaataaaacccattccaatataatcagattta

SEQ ID NO: 311371 - DNA, 1429 bp, Cannabis indica
ttattgtatatatatattatattatttattatatatataatactttttttgacccggtcaaactgaggtcttacaaatagcataagcaaaactctaatagaattatggaatgggacaaaacccagtttgaaacatttttgcatttgaggttgtcctgctcatatttgtaaactaaatattgggaacttgctcccataactaaagtctgtatgtttgtaagatattcagaggaaactcgaggtgcctatttctatagtcatctagaaaacaaagtatttatattgacaaaaactacatttcttgaacatgactatatgaaaagtcataaatcatgtagtcaagtggttatcgaggaaataaaaaatgagcaaatttctgaactgtccactttcgtaccattatttgaatgaccaatagtggttaccacagttcttgaaaagaaaccccagtacatcgttatagtgggaggattgtgagacaacctatctgatatgaatttgaagcacatgttcttatctccgatacatacaaggacgatccattatctaacaaagaagcaatagaagtcctaaatcaaacaaatggaacaatgccatggatcaagaaatgtatttcatgcacaccaataaagtctgggaatatgaaactctacttaaggacattcactactacaaaaagcgctttttgcttcagtttttaagtgacatataaagaatttgcttcagttggtgtaaccaacgctataaccgtagacgcaaatagtgatattttttacttcagttatgaaccaacgctaattgattatttttataaccgaagcaaattgtttttttgcttctgtgcataactgaagaaaaaactagtgcaccgacgctaattgttttttgcttcggttataatttgtttgagtgctctggttagcacaattaggaaactaattatggttgataaagtaacaagggagaaatctatgattaaatttgctagggtcttggttgaaatggacataacatatgacccccatttgttatacattttgaaaatgaaaaaggttagattcaagagcagtttgttgagtacgaatggctccccattaggtgtaacaactgtaaaggatatggccataacatggcggagtgtaggaagactggtccgaaggtctgggccaagaaaagccagcaacatgtgaagaattttaaagacaaagattagcctactagtgtggaaaaatcaagggggacaatttggtttctgttgaagctaatgacacgattggaaatatgaagaaggtagattctaaggaagagaaaacttgtgcagagtctagaattactactccagaatgagaatgtatggaagggtggaagaccctaaaaagagtaggcaattcaaaggtgaaaaagatctcttggagtggttgagcaagctt

SEQ ID NO: 311372 - DNA, 2565 bp, Cannabis indica
caaatcaagatcctgaaatatgtttaaaaaaattacagtgaaaatcagtaaaatctacacaaaaaaaagaaaaaaaaaattcaaaggctaacaaactaaaaacatacacttgtttctataattataagagtacatatatcttacctgaccaagtataagtttgtaaaatgctgtggacagaggaaggtccaacagccgtccatcttgaagagccttagccataacacgcccaactaaccggaaatactcgatcactttaaaaaactgactcccgtcagaagtgtctgcatttggaggccatggacgagggaataatccaaggggagcttggacaaggtccccactgccagcagcgtaacgaagttcagaacgattgttgctttttccatgtttctgttcatcaatatcagtttccatagaaggtttgtccactgaaaaattcgacctccacatgttgagtccaaccttctgtaaatcatggctcaaaagagtataaaactcaagagtaggacccagcccagtgcctacttcgccaaagtattcaacttcaagcacagccttttggcttgaatacatttccattacttttgctgccgaatccaaaatgcggtttcgagagacccgaaccttttggcgttgcaatctcccaaccctcacctctctagaatttgctgacccatgcccatcagctccctgctgttgctgaaggcgatacaaggcacgagataatccaaatgcagttgagtagaaatactgtctgcgagtttcaaaaggaaacaagaatgggcatgcctttgtcagctggtagcaccatgagggaagacttccactacacaatgcaagagcatcttgaatttgtcgagctaatttgggagtgagcttgttgttaacaaactcctcaaaaggaacccgagaacctgtagaaatcatgttttctatatttgaaactctcccctcagcaaaattgtcagaaattgtctgagccctcaaacgaggtgcaagctgatttaagccctccaacacacgcagtagcgccaatatattgtacgtagaattagatttctccaaatcacatggaagctcaccctgaagaatactatccagcagcgacattctatcagaattagaattggaagcagaagccaatttggttgatttggatgtagtaatagagcttgatcctccagctgaacccctttcagcttgactatctgccctctggtatgcaatggtatatatatcactccacaacctgcttccatcacttgacacaaaatcactaccagtaaaacgctcttcatcgtcctcatccagcacaagctgtcgttgtatggcctgatagatagtcaaatgcctattcagttgcttcccaccagaagtaaagatcaattttggcggatcactagaactaccaaaaagaggacgcccatgtcgatctcgacctcctctaaggcctctaccattagcagatccaagaccagccatagcagcggcagcaaatgacattgcacccctagatccataggaactaccactcctatgatctgtggaatccgagcccctaactgcagcagctctactactagagccagatgcagggttagacaggctatcgcttgttgcttgagctgtactgctatcctcggctgcatcacccaatttgacatcatgaactttgtccggaatgggcatgcaatcaggtaaagaatcatctccaagaacctagcaaaaaataacaccaattttcagccaaaataactcatcagtcatcacatacgcatatcaggctatctcagcctatgctccgcccacctttcccacaattacaaaacaagggaaaagacagcaataaagaaatagataacatacatcatcatggtcatcatcttcatcgtctgagatatcatcatcttcaattaccaaagcctcatcaatctcaacaggtgatatatccaattcatcatcctacaaaagaaaacaaaacatgctatctaactgaggggaatatataatcatacatatatctgcatattttactttagggcatgaaaaaaaaaggaattatttatttatacatatatttgcatattttactttagggaatgaaaaaaacactaaaagaaatcctaccctagaatggtgttttttgactgacacaaactgataaggaatgccacaacatgatttgacttgaatagatatctatacatatcaaaattcagaaatgcctattgccacacataccctatggcctatgcctgtgttttttggctgatattggttaccaaaacatgacttgatttataaaatatctatttatatcaatttgaaatcctacagacttcatttaaaccccccaaaaataaaaaatcctacaaacctagatcagttaaccacacatccaaaaatcaaaaacttaacttgatctagtaagagcaaccagcttatgaacataacttatcaacaattaaagttccagcttcataatttaaacctgtaaactaatcctcaaaagcaagaaagaatacctagatcagctaaccacacatccaaaaatcaaaaact

SEQ ID NO: 311373 - DNA, 735 bp, Cannabis indica
aaagtccatattatgtgaaaattaattattcattagtggaggagcgcgcatgattagggtgaactaaggtgtttggctattaattagcccaattataaattaaaaaatgtttattatcaacacattgttaaatattttaagcacacattttgacttatacggatacttcttaaatagtttaaagctatgatttagctttacattaaataagctcttttaactttctaccttccgaaaaatttggcacacctattatgacttttactagggcatttaaaaattcttttgtcatagggttgttattataggtgactttatgttaatttgggtcttagacaaaattaaaaattggagcccaatgaaaatgtgaagctattcgggttttaactctcaacctcttacttggtaaactaatcaaattatcactaggctacaacacatatttgacattatttattttattactaactatattttattttgttttcgaaatagggcctgagcggtgcggggcctataaggcggccgcctccttcgtctcacctcaggggcgccagccttgataggtggtgtggattatgaccaatatttttttttcaaattaacttgtgtatgtagtttttataattttttaaaccgcaatcacactacaagactttaattaaatcgcaaaaattaatataatatgatacaatttacactattatcattatcaaaataaaaaataaaaattaa

SEQ ID NO: 311374 - DNA, 1296 bp, Cannabis indica
aaagagttttatttagggcataaaacccaacactaccgacagtatcacatcgatacgactagagtatgactagcgtatcgagtataggctgatattatggtcaataataccgtactgcttgacgatatcacatcggtacgacaagagtatgactaacgtaccgagtataggctgatattatggtcaatagtactatcattgaatgttgtggactcaataccgtgtaggacatggggatagggttatggttgggtatatgggtgcctgattataatccgaattgtagttatgatatttattatatttttcttattgattctgtcgactcacaaatattgtttgcatgtgtaggtaagggcaaggctaaggttgagtagccgtgagataaaggacatgaagattgtacatgttggggcgtttaggcttggagcgtacagtctttgggacaacttattgtattttgtctagtcgttaggcgacaacttttgtattatgcatatgaaatatttgtaaatattttgtaacgagatcccagtaatatatatatatgtgcgtgtttatttttctatttataagtaattaaataaagttttaattaatcacgcttttttcaataaactcgttgattagcgacgagctgcacaactaagttaaaatcacgttaacatgcttaaactagtagggcgttacacactttttgctcaactttatgagaatcaaagtaagtaaatggagggaaaataaaatttttcccatgttctaggtgttcttcttcattccagaatatattcaacaaaagtttcaaaataactcatttcttcaccaaatttcatcaaatcaaagataaatctcattaaccataacctatactacaaagcccaagcatcaaacactcccatttcatcaagaaaataagaaactctaatgattatatgtcatttttggccatggcaaaaactaccaagaagaagttttaaaaagttcacaaatctaaaatttcaagcaagaaaatacaatgaaagttacgaaaaaattacccactatgaagatgaagacctcaaagcttccaagaacattatgttgctataaataatttatttatttctctttaaaaatatttagattatttctcttgtaaataacttatttttccttataatttatttctgcttgtaaaaggaaacttattgtggggatgatgatgccaaaatgcgaaaagtgggagaattatttttttgagtttggaatgtaaattactcatacatgcatgtgttggaatttattttaccaggatct

SEQ ID NO: 311375 - DNA, 2020 bp, Cannabis indica
aaacatacacaagtgaatgaaaaattacttctgttactttattgatatagaataatctggattccattgaaacagagttttatttagggcataaaaccccacacgatccactatagcgacggtttaaaaccgtcggctatactataggccatggtttaaaagcgtcgactatagtatagcagacagttttaaaccgtggcctatagtatcgactatagctgacggtttaaaatcgtcgggaactcttttataataacatctttccactgtcgcctattctacccagtattcgtgatgcttgtataagcaacagttttatatactgtcgggaattctttacctgacgttgtaaaatgtcgagaattttgggttttttaatagtgaaagtctaaaaaattacatcgtctccaagccatgtcttcggagtatgtagctggaggaaccaagctgaattgtgtctaccggagaaatactccctcaggtacttgttcccaatttggcggagaacccaactatgaaatgtcgagagaaggtttcgatcaacaactataagtgggtccacattcacatgtgtcttcgatgttgtggacttcttcttcattttagtgtattcatcgaaccacttaggttgttttctctttctctagttctccactagttcttgagctatctgtaacacctttatcttagaatcctgagtatacctaatgttggtgaccttcgtgttgtcaggtgtacaaaacatatcatcatcatccagtctatagtcatttgggagaatgatttctttttccggtgactgaggctcttcttgtggttatggctgtggctatggttgtgtatctagtgtcggccttccaatcttgcaggagtctcattatggttttcaaatgacccataatctttctctgtcgtttttacagagcgttttggcctttccccaaagtaattttctccttctccacagtctccaaccttgccgaaatggcatagtatactagttcaggagccttgaggttctgggaatagatgctgacaggccaagaagaggatcctctaatggtggagatggtgcaggtggtgtactgtctctaaatattcgggcttcatgggcctgctcatctaatgttgaggcaagcttctgagcttggctgcgcacagcatcgtgagttggttgtccatcgtcgcccaacactaattcctccaagtcaacaaatattggcctctcactgctggtgatagtcctcacaaactcttcgtcattttttttagggacataacatagattaaactatcaagtgaaaataaaaattaatgtcttattgtacggaaattagaataatatatatgactgcaaagcgtaaaaaaacttacattttttgaaaacaatcttataacttcatccttgccgagtgtggtcttctccttactctctcagttagccattcttggaaagtgatgtgatttcctcactgcatattcattgcccaactccaagatggcctcataggcctaatactgcaacgctgcaatatagctatatgatgagtgttttgcctccttttgagaaactcccttctcaatcttcttatgcatccgattcttaacctctaaaaaatctttgttgcatgtttccatcaacttgttgaaggagatctctcctcacggatactcataaaagaattcgaggttatcaaccattctcacgacaaatggaagaacaacattcttctcctccttaccataacaaacaaggccatcccctacttgtacacatcaccagcttttgtgtaactctcgaaaactttgtgcacttggccaaggctaatggatgaatcaccattgaagtactcaacaatcgactgtttcgaatttcctttccattaaatttcgttctatgtaggcccgggtaaccagttcaaccccgtcaccaatgcaaactcgacctgactgaatctgcatctcttctagctttcaaaaaaaagtgtacctcgtccgacttctcagatttgatcttgtg

SEQ ID NO: 311376 - DNA, 944 bp, Cannabis indica
aaaagttaattttaccaagtcttcagctttttttagtaccaatacatcagcccaatctagaaaccgtatttgtcagatgttgggtattatggaagcagcagaagacagcaagtatctgggcctatcatctacactttcaagaaacaaaatagttgtgtttggatatttgaaggatagagttcgaaaaaagattcagagttgggatgtgaaattgttatctcgtgctggaaaagaaatccttattaaagttgtggtataagctttgccatcctatgctatgaatgtttttcaactttctcaagaggtgtgtaaggatatcgaacaaaacatgtgcaatttttggtggcactctaagtcggctcagaaaaatggcattcattggttgagttggaaaaacttgagtaagcataaaggagttggaggaatggggtttagggatcttcgtgactttaatctcgctttattgggtaagcatggatagagatttctcactaatgaagatagtttggtgggaagaattttcaaagcaaggtattttcctttaggaaattttcttaatgctgaattgggagcgaatccaagctttatttggaggagtgtctttgcctctcaagatttgattaggaagggaatccgaagaagagttgggtcaggtttaaatgtaaatgtgcttcaaggcccttggcttatccatgacagcaactcgtacatctcttccatataccctggtcttactaacattactgtcaactctcttatgagagttgggatgagagaatgggatagggagattctggaggatgtattaaatgagagagatcaagcgttggtttggagcatacccctgagttctgaggtaaatcaagataggtggtactggtacaaagaaaaatcgggttattacactattaagagtggttactactcttgggttttatgcccta

SEQ ID NO: 311377 - DNA, 1677 bp, Cannabis indica
ttacggtattttctaaatactgtacatgcttttgctaattaaatagtttattaaaaaatgtgaagaattaaaactttattatgttactccactttcataattaaacaaaataatttacataatctgggattattccgttttaaaagttacaaatattaaacttcaaaagttgtcatctggcgacccataaagtgagccaaactgtcctggagaccctgaacacttcaattctaaccatcttaatatgtacaatcttcatccttaactttagactctaactggttcggttctagcttttacctgcacacacaggtaatagttgtgagtcgacagactcagttaaaaagcataatcataaacctaattaaacatatatcgaggccgtaaccaagtgcccatatgtccaggattaggtccggggtaccgggtccgggtccgggtccgtgtccggaccaggtccgggtcctaggtcccgggtctgggtctgagtttgggtcccaggttcgggtaagggtcagggtctaggtccgagtccgggtctgggtccgggtctcggatctagggccgggtcaggtcccggtcccggtccaggtttgggtccgagtccgagtcccgggtccaagtttgggtccctgtctaggtctgggtctgtgtccggaccaagtccgggtcctgaattctgggtccgggtttgggtcccaggtcccgggtcgcgtatcccggtcccagtccgggtcttgggttcgggttagggttagggtccgggtcccgagtctggggcctcgggtctcaggtcttggtccaatctcgattctcgggtttcgggtctagcactacaacaaagatgagcaatagcggcggaggtaataccggcggaacttattaggccggtaatagttgggttattactggcgaaatacaaaatctacagctaataagaatttgaaataaaaaaaaaaaaaaataattaatactggcggaaaataatttattaccggcgaaaataccgctggtattaatgaggaaattaatttgcgggaacagtctcgcctaacaattcaaatttttttaaattgagtattattatcggtgagcttttattttgaccggcgggctccaccggtattgtttatatatatataaacgtttagctccaatattaattctttcctctctctcaacttctattaggaaaaaaaataaaaaaaaaatctcatctctctcacagaaacccttcacccttctcaccgtccaaccccactactaccctttttccggccattgttgaagctacgtcctccgcatcgttcccaccctcgtctcaatgaactgcctgtaagttactttttatttatatatatatatgtatacatacatgcataatatatagctcaaatctagttttgcacagtaattcttttcggtctccacaaagcccctacggacgactagaatgaagaagaatcccaagaacgctggtttgttgagtttatttcaatctctgaagctttttgaagaggttgaaacccgcacgagcctcaccctcattttttacatctttttattcattccttcatctttagtgtatatatatatactagcaaaaaactacgtgcgaggcacgtatattaaattttatgcttaggttttttttttatgttatttgaaagtgagatt

SEQ ID NO: 311378 - DNA, 1062 bp, Cannabis indica
tttgcttataatatcattttcctttcgatattcatggatcacttaattacttaattattgaattaagaacttaataactacaccacacattaaattaaagtattaacaatattataaatatttaaatttagtttttggttgctaataaatacttaaatttaatatttaacgataatatactataaaaaaaataggcttatctcggtggactcgcccctccgttattgttctatctcgacgggcgcagcccgccgtgaatttaaatgccgacattgagaaagggtcattctcaacgggctaggcccgtcgagatagccaggcaatctcaacgggcctagcccccagaaataggtgaacaatctcgataggctaagcctcccgtgataggtcatttttttattaaaaaaaatacaaaaattaaaattcacttattgctgccaatgttatacatctatgctttcacccaaattttagaccataataatcactgatatagagcaaaaataattttttacacaagtatcaatacataattataacaaagaaatttcaccgaaggttttcctttgaattgaatgaacattccaatcaagaaattccaacaactactaacattttttctcaatcatgtgaaccatgcaacataaactaatttatgatcttttattaattagtaaatctaattatattgaaatgggttttatttagggcacaaaatccaacaactggacctagtgttgcagtgtgtgtcctccttcatgtgaagccttgtgcaaaattcttcacacgggcctcgacactacatggtagtgttgcgacatttaaagcttgatttttggcagcaagcttcctagtgcgacgactgataatattttcttcataactatttcaatattgctcaaaattagattattcaagattataaatttaaagtgaggcgttatatgtgattttcgattagacgacaaatctagctttggcaatgttagaatttggggataagatgaatggggttccatctcaaaaccaactagcaatgagtggagtagctcatattcttat

SEQ ID NO: 311379 - DNA, 539 bp, Cannabis indica
tattattattattttttgagtgtagtcgtgatattacaatttattaataatgtattgaattgttattaattatcacaacttttgatcattgtcaaaaaaaattcaaccttttaaactaatatatgtactaaattttcctcacacatctatgatattattaaaataaacatatatgtcatgagttacaaactaattaaaaattttaaaaatttgcttggtatcataaagaaatgaaaagcaggaaaaaaaaaagagataacactgatggaaaaaagtatcgtacgtaatttcttgaataattgaatgttattttgcttcaaactagaacagaatcgtgtacatatataaaggaaacatatatctatacattgagcatttgaaaatatgaaaagttcataaaagaggtatttcattttctatatttttcctattcaaaacttattgtatataggtagatcattttctaacatgaaaatatatatatattgtatacatatataggtgttttgcacatacattacaggtcatatggacacagt

SEQ ID NO: 311380 - DNA, 1224 bp, Cannabis indica
ttctttttttttctctctctctcgtttcgtttacccaaaaatggccttttggccaattgttttggacgaatttgtcccttttgcgttggaatttcgagacatcatatttaaaattataattaataattaattattgttagaattagtactaccattaaaattatattttacaacacttctaaataagtattatttattgattattacttaataaattttataaatattaatttattttttggaaatagatttcattaaaaaacagcctcactattacaatatttttcaaagcaagaggagcattcagctcattaaacaaacaacctgacaaataacaggatccccggacaagacagtaggcagccctattagcagatcgataaacaaaagaaattaaaatattctttaaattggatacaatcaagcgacaatcctccaccaacaaaccaaactgagacgtcatatggacagagctattgattgcttaaaccacaactaacgaatttgtctcaataatcacatcctcccaacctttcttctttatccaactcaacgcttcctttatgccaactacttcaacaattttaggcaacacagcaccatctctagaatctgaaattgcttcaataagatgaccattttgataacgggccacacaaccaaaaccaaacctttactgagcttcaaaaatagcactgttgacattaaccttgatcttattaccaatcggtttgctctaatggttactattagaatacacaccatagcataaacagatgctggtgatttatttttagcaaccctccattgatcaaggaccgtccttaccgacttaaccacatccaaagcaaagcttgttttttgctgtcaaaaaacttcattacgtgtcttccaaatgctccatgataccatggcagcatcaacgacaacatcaccttgattaccatccaaaagctcgaaaaaccagttgctaaaattgtccagaccagaaattatagcagcagccgagaaaaaccagcatgattgggcaaaacgacacccaagaagcacatgaaatattgtctcataattgatattacataaagggcagatgagatcaacatttacatgcttaaaactaagttgtacctcctggaatatattttatcaggatctagatttactaacaagtatattttttacatcctaaacatgaacttcttaaacgatataaaataaacacat

SEQ ID NO: 311381 - DNA, 1680 bp, Cannabis indica
gacaatataaataataaataatctaaaaaaatggacattttgctacaaatgttgaaatggagatatttactaacataatcatatgattttaggtcatttactataattttccaatatttattttgtaattttttacatgagattttgttataattataatatcttttcagtaaatttttcaaaaattttaaatagtttttcgtattaaaaatatgttgaaggtttttgaacatgtatggtaaattagaataccaagattatgttatcagtactgttatctcaaattttgtccacctgacgtattatgtttacatggtcaaaagcagaagacatgtggagaacagctcatcactaacctgcaaggttagtgttgtgcaccttctaacctaccagattactattagtgcctgcagccttccaactgccaggactatatgttgtcactacaagaaatattgcttttacaccggcaaaagtatactatatgcgtcgacatacttttaccgacacataattgcgcagtaaaagatgtcagctattgttggtcggtgaaggaggttttcccgacacaattcaccattaagctggtaaaacatgctttaccagcaagaataagcgccgaaaaatgtgtacactagaataaacaaaggccctaatcttccaatagtcagcataacaaaacttttaccgacgtattaatgcgctgataaaagtgtcgggcgctttttgactgattggcacgaagggttttactagcgtaacattgctctggtaaaacattttcacgccaagatatttttggcccgtattaccttttatctgcacagtaatgagcccgcaaaaaggtaaacaaatttatcctgggtattttatggggggttttgcaagtgcaaaaatgcaccgacaaacttagatttatttagttttatatatttatattatattttaatcattaagtatttataataatataataatattaattataaatataaaattagattttaaagaagcataattaaaaaataatattcatattggtaattaaaatgtattctgatcgaactaaaatacaaaaatatttaatttgtgctaaaattagtatgtaataaaaagttctatggttaacaataaataaataaataaaatattaaaagatgtttgaaaaaaattaagatctaaagttaattacaaaatatatattgttccaaagacgggtaatgtcatcgtcgttgttcatctaagtcttgagaggatgcgatgacgatctagcaccacctggagtggagaatggtagaagatccataagaggcaagttgaaaccaggcacaacccgagataagtactcaaactgatcttggaattggctgaggtagaatttttgtgtttcatactactgccttgaataccgagttgcctgctctgcatcctccacttttttctataagccctcgtattattccatagtagcagtctgtggggcagaaggagttgtggcaggtgctcttttggccccatctgccttcaatctcgagagacggccaaagacctctcagatattgagattgctcatccagtacttgtgtcataacaagcaagtctcggaggtactaggtagatctacaacagtctcatcaagttgatccttagtgggcactggttgatttgcagtcaattcaa

SEQ ID NO: 311382 - DNA, 1401 bp, Cannabis indica
gaggtatatcattccaatttattatagataaaaaaggtaatttgaaaatcaataaattttaatttgtaataaatgatacatattaattagaaataatattaatctcatatctacctatttgtatcataagttaaagaaaaaaaaaaaaaaaaacaactctgtattgctaatttttttcacaaagatacgattatatagaaattaattcaaattgaataaaaatgaaacatttgagcaatttgtcaaactttgagagttaagacagacaatttaactactaaaaattgaactgctttccttaaaaagaaattaaactgattgttttcttgttattgtttaattatgatattgattattatttgactattacgggaattactatctaatattgtacataatttacttattaaatttttttattattagttattactttcttctattaaaaagaagaataaatatatattttatattctttttgttagtgtataatgtgtactattttcactatcatgattctttttttttaataatatatagtacgtatattagtaataatccttaaaaagtttagatatatgaatgtatacacgtatcttttatactcttcatcttataataatttaattattttctgtataaaaaattatgaaaatataactcatattttatctgtttttgttaataacaaactaatacctatccttaatttttttttattttatcagaatacctatccttaattagtttcataaatctcaaagaaaaatttcttttaattttactatactcaccacacctctttctcaattaaaatcataaccaattttcattggtaatcttaattaattagtctcatactcataaaataaataaaaaaataatataaatttaaaataatatacaataatatctgaaaagtacatcaataaagaatttacctttctagttacctttctagttatataaaaatacatttttagtaataggacattgaaagaatggggtcaatacatggtgatgctcccacattaatgctcgaagattagaagatttgtaaaactaatagctagattgaaaatttagctatgattgtgaagttgtgatgatgagtgatatcaaagaaattagtacaatatggcatgaaaggtctttgctgataagaatggtgaaggaaaaggagaaagaaatgtattttgatatgataatattttttttgttgtgttttggtttcatgatcaatttacaaaattatatatatactaatatttttttttttataactaataaaaaaaatactaaatgttaaaaggtatatgtctttttgaaacttttttctataatttatactaatcataatttatatgaaaacctaagtaataattataacatacgtgcttt

SEQ ID NO: 311383 - DNA, 2220 bp, Cannabis indica
ggaactggaatttcagttgggaagcagtctggtggttggaacaatttttggaaccctagatttttctatttgggatatagccttgttattcatcgataagaatatttctagttttgattttaagttcctgaaaagtgttttagcgtgtctctcaccagaattagaaatgttgtgatttaaggccctatgaaacgtcgagctacatttccacttaggctgatcggcacaccttaccacgaaaacgagttaagatagcataaagtaaatatatgtgaatgaatgtatgctattatctgttacactactagcattgctaaatgtatagttttaagggtgttagtactgtgtagggttttaggttagttacagtgttaccagcatgagtaccagggggtacgtgcatgtggtacaacacttagtaactcttgggagtacaataagggccctatcaacacgagtacagagttgatactttagtgcatatggtacagtagtcgtacttcttttgagaacattcttaaccatttggtgagctcaatggttggactcagaacaatttaagcataaagtcgatatatcattgttatatatatgttatgcatatcttactgagtctattgactcatcagttatctaccttgtgtaggtaagaagaaagctaagctggaggagcagtgagttggagcttagcagggattgtacatagcgcggcagtgcaacttggagggtttcggtcttatagtattttgaattatcttttgtagttgccctgtattttgtataaaaaaatattataaggttttatattagtaaatgtaatttcaactatgttttacattcgggatcccgacctataagactatataaatataataaataaaattattttcagtttagcaagttttcaaatacgggcgttacacagtgacccatactttggccgacggttcaaaaccgtcgggtatagagctaaaaaaattaattgcacctctcgactcactcactctgtccatctctctcgatctcactcaaacccgtcagacactctctcaaaccctggctcctccaccttgtcagatcacactcactcactccctccgtaggtccattaattgttccccaagaacaacaaatagaacccacataccaatcagttaggattctcttcatacttgttccttagcacatatacaaagtagaaagtatggaggcttcgtttttttgcgtcgtcaatctgctattgagcaacgacagatcacaagccatcgatgttccaatctggtgccctattttatttcttttatcgagacgcggtcattggatgtcgtagcacccattatttgtcaagataatcttagtcggaatgtgcactttctatcaacactgtagtagctttttcgtctccgagtccgtcgagcgcctagtcgttgattgctccaagtcaaagaccatgccaaccgagctttgccttgaatttagcaatcgattttcatgtacatgtttacaaagatatagttccactcacattcttaagtatctttcgttcatatatatttcctagattaggttttctttcatgcataaatatttaattattattcttgaactgacatttcattggcagagttactttggagattttcttcgaatagatgtgcattttgatgataaaaaatcaattttcttgttgagttattgttgaataatagtggtggatactgaataaatttggagaattttagttatggtggtttgggtactaaatttatactcattcctgtgattgctttgttgtcttttgcactgattaaaaataacaaagtctcacaaaagccctttcggcattacagttgagcagacgactactggacggaagtcggcataggcgatcggaattgtgacggccaagacccaactttgaaactgtgactcgtattttgctcttctcattagttattgaatttttttttttattagacttagtcccacattgttaatgtgtggaaataaattgtgatatataagatgaatgggctactcctcctattgccaattggttttgagatggaaccccattcactttagtcacaaattctaacacggtatcaaagccacttgtgatccattgtgagcccgaatttccaattgtccaaaaagccgtttgtaattcgttgtgagccaaagtgccgcctgtccaaacagatactttcgctgtctccc

SEQ ID NO: 311384 - DNA, 662 bp, Cannabis indica
tgcatagacataggaaccttaggataataaccataattcacgtttttattaaattatccacataatatacaaatatgccattacactataatctatgtgcaaggttcattttcttgcctaaattctaaagtaagaggagaattcccaattcacaggtgatctcgagcaaggtaccggtattcctagtcataaatcaatacggtttccttgctttggtgaagctaggttgcatgaaccaacctaccttgaaacatgataagactgagttgtatggtgaaagtatgaaaggatgtttcagtggcagatatgatttggattctaagcgtgcaagtggtcttcaagcgatacataacttcaataatgtttttgtttcttaaaacaatttatatgaagcatttctctttaattttacaaatttcatataatgttttccttaaattatacttaagactatttttcctttttttttttaactactaaaactttacacattagtttcctttcaataattttactaatattttgatttttagcttcattttcatttctcaaaacattaatgatatattacttaatttttttaaaatactattatattttctactcttattactttagattaaacattatttatttttaacttacataaaaattttattttt

SEQ ID NO: 311385 - DNA, 637 bp, Cannabis indica
aaacctgagttgttcacaccatagtgcccatgtttctggttatgcaacatgtcataagcacttctaatcgtaaagacacctaaatactctccaagttacacttaaacaactaaaatgaactcttatttatagagtcttaaaaggacttaaaagcaaaataaaaataaattaaggtcttaggaataataaaaataatattaaaataaaatcttatttattaataatattattattaactattttgttggaagatgatatttcttttcaatgccaagctaggggtgactcttggagagatgtagacaaaagagtttacatgattgggagaagaataaggaaatatgatatatatttaacttgacttcttcctttctttgtgcataggataaaacaaaagttctcaagtgctatatattgcaattaatgtaccaagcatgcatgacttcatcatgatggagaactatgggaaagtggagcacttagggcccgtttggtatggggatttattagcatgggaatagtaaaatgaaatccaatttgtatttggtattgttttttcaatttttttaccggggtgcttggtttgtcatggcttaagatgtacattgatttgggggtaatgtctactccttccaat

SEQ ID NO: 311386 - DNA, 560 bp, Cannabis indica
aataggatgtgtcctttctgttattttgggaaaaatgtttatgtcccaccaactcaaaatcctctggtgggataggaagcaaatcacaatcttctatcataacatctcctttcagatttaaaagtgatgaaagatcagcaaaacgaaaaaaaggcaagattatagtccataagtcccttttgttcaaatagttactccatgtgataatagttgtttacaattatgcgtacattttaattggtgatttttctatatccagtactacgagaagctcgaagagaaaagaaatacagatgaggctaaaaagaagtgtcaaccgaccatattccagatttgtagcataactttactaccaagtggtcattccatgcttatttgtgttccaacccaaaatgtggctttacttggcctatcttgttaaaatgagaaggataagggaaaaagagataggaacagtcacaactcataaatgtagatatgcattgaggggttttgtaacaccctaactaacataggcgtattacgtaatttttaaacatgttgtgctgctcgttgctaat

SEQ ID NO: 311387 - DNA, 1575 bp, Cannabis indica
aaacaacaactacaaaatatcagtctaattgcaatatgcaaatcaatatcaattgtttttatactactaagttttttttactaagttctgacaacttgaatatcattttgtactattacgttattttcttcttaaagttatttgttacagcttcatacttctttactcttttttattcttctttttgggttagtgatagctgaaatgacttattttttacaaataaaattaatgattacattaataatagtgttgacgctaaataatgatcaattccatataagcagtagcagctaaagaatgtatgaatagaaaataaaaagagaacaccccaattatagtagttaactccccttatcgtgaaggtatgtctacttagagtttttatttttacaaaaatctaattgccttacaagagaattcaagaaaaaatgactaagtctggcttcacttcacaatttctagagagagaaagtccgaagagagataacctctcaccttgtagaagaaatgtaaagtgtgaataatgagctagaaaaactctccttatatagtgaaggaggtccaatcaaattataataaaataatagaaaattcgcacaaaattcgttgagaaatcctgtggtatctcgcgagtcaattttgatgtccaaaactttggaattacaacgaagatgtgagacacacttagatctgtcttgaaaatatatttaatttccagttgaatcacgtcatttggatgaaaattgagagatttatggcctttttacttagtagtgtgcactgttgaaaaatgattacaagatcaggctgagttttaggtgcccaggttgacaactggtttattcaaatttaggcatatttggagatgcttgaatgatatgatagctatccttattttatttttttttttgaccttagggaagttctcttggagattttacttgatatgcacgagtgatgcccggtgaatcactagtaacaactaggtgacacccgggtgatcactagttcacataggtatcggtagacttgcgcgtgacacatggacacgaaatattgactcgcagaagcatccaaatcttatttaggggtaaaataagattgatgcccagagctgaactgttgtttgaaggacaaaacaatgagctccaggataatgtcagcctcgacagcaagtgtgcttgcacactggcgcccggtgatgccttagggctaagtcactactagaactgcaagtatgtttgatttttgtatggttgaaataaaacatgggactaattcggtacaagacctagtatggaaaattatataagggaaatagtatgaccttatgtgactctaaagtccattattttggatagaaaactgaagttcacctctatgttttaataaagtctacaaagggccatgagtacgaagctaaagtttagtacaactttttacctttagatggctagtccataaggatgaatcacatactgaaagatatgttgcaagcttaagtgatggattttaagaattcatggaacaagtgtctgcctttgataaagtttttgcacaataaataattat

SEQ ID NO: 311388 - DNA, 1540 bp, Cannabis indica
caccctttttatccttttgttggtgtgttggatggtgattaccaatgggttgacgtgaggatacctcacgtgttttgtatcttccttcgagaacacaatcagaggttcctccgtcttagcttttttagaagattccaaagcaaaaggagactactcgttcttaatttcctttacatatctcttttgggcattgttactttccccaggaatatgtggccctctcgagataaccagaatatcctctccttcaagaggaggaggttgtaatctctggttgcatggtttattaggtggattaggcttgttctatccattgccgaaagtgacctcgcgtgataagactttctatctcgtcttttagctgacgacactcgtctgtcgtatgcccaatgtcctggtgatacttactaaattttgttgcatctctcttatgtctcgcatgcctcatgggctcaagcttacgaatgcaagcttgtcctcatgtgcgagatagatgttttcctaagtttcattaagctcggtgtaaaccgtgtatattggcaaatatttgtcgtggttcttctattttttcttgtcattggctgaatccttagagttatctttcctcttggaactagagtcccctggattgtcagccttggtcgaggcggtgcttgtcgagatagtgttgggtatacctctcgagctagtcttgaacaacttcatctcttttcttgcttcctctttttaaacaaacacttgagttctttcattgaactcactgatgtttttcactggccgaccctgcaagccatcccatagctggcctccaatagtggtaagatcagtcgtgatccatgcttgaggagcagtaagctagatacaatcgtccaagtttctaaccgttgcagcagctgtgctaaaagaacttaagtagcccttaagcgtctcgcccggttactacgttatgttcgtgaggaaggacagcttaggtcatctatcccttgctgcttggaactgtttcttgaagtctttagacaactgttcccaaaaggtaattgaatgatgggtaattttgttaaaccagctgctcgctgccccaactagcgaggtagggaataaaatatcgcgtagattattcaccacattgctggctatcataatggtattaaaattattctagtgcacgatcggatctgtagtcccatcgtatgacgagatgtgagggttcttgaatccatgggggaattcaacactcataatgtttggatggataggctcgagttcctcgtctcagtcgtatctagactattttccatatttcccatcttgatacctcctgaatttgtcctccaactcattaattcgcaattggataggatcctctttcttttgaatgagttattggagaaggttaggttttttctggttgaaatgattacgaagttcaggctgttgctggtcatagttactcacaaacctcgtcctactcatggacctcctccttgagtaatttttcgttctacttgtgcctgtagtctctcgatcagtactgcaacga

SEQ ID NO: 311389 - DNA, 1208 bp, Cannabis indica
ttaaatatttaaaattaatattacgtggaccactaaaaatttaccacgtgaacagtcatttgatttttggacggaggggtacatagcaaaacaaaatgggtgttcagtagattttgccaccaaaattttggtttttgtggttatgtgttacaaaacgtaaagttcagatgatttaccgccaatatccctaaataatataatgaatgtctataattttaatgtgttactaaaaagggcataaatttccttaaactatttcttagggtaataattaagcatttttcaaacaaatcataaatgtataataatttaaaaatacgaataataaaattataaaatgtaatgaatatgaagaaaatctacaaatttgatcagtaattaccggaaattcaaatactatggaaatcgatgatgtttgagaaaaacactttaggtactcaaataaaagaatcaaaatttgaaagaaatcgtttataaaatcccagtgaattttttggaagaatttcgtaataattatcgaaaacaagccaagaaagaccaacccaatgtgaaatggaagtgatatgggatggaggggagggcgaacctgaagttcgatgcaatcgtcgaactcgaagctatggttgtgttttggagcaagagcaaaggtgatctggagctgtgacgaagagaaactacttttccagtaagtgcctcgtgcgatgaatagagttagacaaagaaaatggtgtttaatgaggaagtacaaaaaagaaagagaaaaaaaaaggagattttttaatttttttttcaaaaaaaaaatgggaaattaaatggtaaatataagagattattagatattatattatagatgtgaatacttaaaatatactatttcggtaaataccaaataccaaatgagtatcgcttagaggaactaactattaccttttttaatgtttattgtagggtaactctttgaattaatatgagagcattttattctattttttgaaaaaaagacataattcattgaactaaatccgttgttacagaaaaactcaaaaatcgtggacaagcatccgtccaaacataatttcctaaactagcaatagaggttgacagtgtgtgggcaataccattcgccgaacgcggaacgacgatgcaagaaccaccaccaacagcagctaataaagaatagacatctaataaaataggcagaagactaa

SEQ ID NO: 311390 - DNA, 2034 bp, Cannabis indica
tttcaatataatcaaatttattaattaataaaagatcagatttcatgttgtgcttaattcaaacttatgtccggtttgtgaggagaaggaggaatcccatgaacatctatttttttagatgtctgttgtctcgaaaagtcacggattcaactttttcgtggttgagttttagggcttggccaatagcttacattggttggtatgattgggttattttgacaggtcatgctaggatatatcggctcaataccactatcttggtggctgtaatctacaacatttggcttaacaggaataactgtactgttagtaattattctagatcagtttgtggtttagttgatgatgtaaacagttttattaagtacagattacaacttgtaaacaggcaaaacttgtcaaagcaggagagagactacctattgagattacaagataggtagttgtgtttgtcttagcttgtcttggctgggttgtaaggggcattgtgtgtggcttggtagcttttgctaactgttgtattttgctcttttgattaatgaagctttttcttcttgataaaaaaaaaagatcagaaatcgttttatattgcatggttcacatgatttatttcatgattatacttaatgtataaattctattaagtccagaacatatatatattcatgattaacaatatcgtcatcatagtggaatataatcatgattatatgttcaaaagtttaattcccatgatttgtcagttcacaggatttagactgacatgataatcggcgataaggtatacttacaccttggataagtgttatgtcctttccagggcattggcaaagtttcccagtatcggatgtatgaagtatacattggattggaccgatattgaacttggataagatatcataaacttactgttatatatttctaagtcaatatcactggttgatcttaggtctattgatcttaatattgctatagttaggttcagtttagttgtattatttatgttcttctttaccagctttagacagaaatctcgtctccaaactttggatcttcttgatcatcttatccttgagcaatcctagtatagcattcttactccttcccatggtacagggtaaacccagataagagttattttccaaagcaggagccataccaagtaacccacacaaataagatcgatcggtttgttgaacattgttactgaagaaaatcaaagatttttcaaagtttattttctgtcctgaagctcgctcataaatatcaaggagtcgaagtatactagccacctccatctcatttgctttgcagaaaatataactatcatctgcaaacaacatatgagaaatgataggagcatttctagctacacgacagcctgttaaccactgttttcgcacaaacatgttgacaagcgaagagaacccctcagcacaaataagaaacaaatagggagataaaggatccccctgacgaattcctctacttggggatatagggcccatcactttaccgccatgagtaatcttgtaagtgactgaagaaacaaaatacatgattaacgaaaccagtttactagagaaacccatctgaatcatcatcatctctagaaaatcccattccaccctatcatagactttactcatatccaactttaaaggcatagtacaagttttgcccattctctttcacttcaggtaatgcattatctcaaaagaaatcataatattatcggaataatctaccttgtataaaagcactctgggtttcagagataacacaaggcaagacactcttcattctattggcaagcacttttgagatgactttatagacaacattacacaacgatattggacgaaggtccatcatggactctggttgtttcttcttaggaataagcacaatacaagtttcattaagcaaaggagaaaaataacctgtatcaaagaacatcctgacttgagaaacaacatcaccacctgataactctttgaaaatagagttatttatatctttttggacattaaa

SEQ ID NO: 311391 - DNA, 652 bp, Cannabis indica
tttttttttaaaaaaaaacaaactataaaacaatgatgattttatatattattaacgatattgttgtcgttgataaaattatcaatgacgacaatattgtccgtaattatttcatttttttggaaaaaaaaaactgttcaaaagagccttctaaaagcatcacttaagctcagccttttattttagctttttatttcagcttttcattactaaaccattctcaacccctctctaaaacccatatctggtcctaagctcgtcccacttcttaggcagttctgatctcggtcgctccttctttgccacatcctccaacatcaccggacgtatcttgcaggtatggttaagatctggctgtgtttttttattttttgttgtattagttttcctcttgtacttatttttgctttgttttttcaagtttaattataaacatgttacattggaaagttgcacacacgtggctcctatgtcccaattatgtcttcttttttcctttaattatttttaaataacttaatatatatatttatatatatatataaatagaattgctaaaaaggtataattggtgcctagtaccttcttcggtgtaatattgctatggttaattaggatttttttctcccgaactttgacatgtaccaaagca

SEQ ID NO: 311392 - DNA, 1188 bp, Cannabis indica
aattggtgtagttggccggcaattgtcatcccttagtgagattgcggtttttgtgctagactgtagggctctttccctttgatcatccttgaatgaagtttccattacaaaaataaaaaaaaattaaataataataataaatccttatggttcgattgtaatgaaatagaatggaatgaaaataaatttattttattgtattttgaactattagaatatcattctaacaagataatttttctatcattttggagaaatgattatttccttcctacttttgaaaggaaaaacaatttcaatggaagatgaataaaattttaaaaattctttttatgcatattaagacaataacgtttttttttttaaaaaaaaaaatttcaaatcacaaatgaaggtaaaattttgttttttttttgtttgtgaaaagtaaaaatgtgtttcgtactcttttttttttttaagttgagataagagaaattaggccagaatttggggttcctgttgggagttgggggtcaaggtccaagtctggatttaggtcatgggctggaggtcgggatcctaaccaagagcttgagtccatggtatggggtttggggtctgacacaagtcagggacggagatcttggggtccaaattaggagcgagggctcgaggtccaagctgaggtcgaggttgaggttcgggttgggttgggatctggtacgggtctaggctagggactagggtcctagacgggagttggggtttaggttctttgttggggtccaagtcctgacaaagagtcagggactaggtctgggtccaaattggggtccgaatctgggttggggtcttagctaggcgccaggggttaaagtcaaggtctagttcatgatttgtgtccaggcaaaggtcgagatcctagctgggagttggaagccaaaaactagggtctgagtctagagtgaagtccaaggttcatgctcgataagaagtcgtggttcgcgggattcagggtttaagtttaggccgagagctggggtcctgggtcaaggtccaaaatattgatgaatgagaaacaaaactgtttaaataaaattttaaagcaacttattttagttaaaataaaattggaaataatagggcgtttgataacagttttgtttttaatttttttaatcataaaaattaaagtaaattttttgt

SEQ ID NO: 311393 - DNA, 1038 bp, Cannabis indica
aaccattgattaaagattctatagctttaatatgctgctaactgttttattcatagctaagtgatcttagttctataaagcaacaagtcacatcctcatatatgaataagatatttttttttttatatatttatataaattattcaataataaatattaataatttaatattcatgtacatatcaaaatgttcaactctttattaataatcataaaatttctttatatgcttttcaaggcataaaccctaacaagatttggggtccaggtctggattcgggtctggggtccgggtccaagtccggattcggatctttggatctaggtattggtcctagtccgggctggggtccgaggtctgggtctagagtctagatccgggtttggactggggtcggggtccaggtctgagaccagggttcgggtccggggtctaagtcgttgtcctggtctaggtctaggtcctagttcgcgatccaagtttagtatgtgagcaaaaaagtaaaaagaatatgttagattttttaaaaaaatagaaaataacactttaatgttttttattttcttattttataaaactcaattttttaaaaaagtattcttaaaaaattggatgaaacaccttctattagtttttaaaagttatttttttttgtttaaaaatagaaaacaattcttagattatgaagctaaacaacccacattatacatcggagaaagaaacatgtgaaaattattatacgagagttttcttaaaccttttttttaggaaagttttcttaaactcttagggtgcgtttggaaagccacaatgtaattagatttgtgtgtaattggaggtaattacacaatttatcatgtttgtctgaccatgtaattacactgtaactgtgtaatttgaagtaattgaggggttccaattacactcgccaattctcccctcatgagaattgaatgtaattgtaattacaaaaaactttccatttaaacattagctagctactaaaaaatattattttcccatgtaattactaacta

SEQ ID NO: 311394 - DNA, 1380 bp, Cannabis indica
tgaagacacttgctgatttcccaaaaaaatattagtgatgatatatgtggatgaagacacagtaattcacatatggattatgaagtaggcttggtaaattttgttgaataagttttttgagcaatgtgattctgttagtttctttatttttgactggttattgctgtaggtatgacaccaagtgtaaggattcaaattttaggtgaaagatatcccgtgtttgacttcactacttatgttgagattgttttcaggttaaatgggtgacaatttcgtatatatgttttaaaaagtgagtttaacactttttgatctttcctcaaatacgatccaccaaacaagaaagtaatcctctcatcgagtacaacatgattcacccaaaaattggtttcgaagctcttaattatgtaattgactattgaatgttgccgacgtttgggttcctctgctccctattgtggatggatgtggatgtcatagtctagatttctaaacccagtgtgagtctaggtaaagctcccatacactaatatttaattttcttttaattgtatatgtatgtttattgtatacgactcttggtttgaatttgtttttgagttttgtgatataatttttttgatttactgtgcatatactattgtttttgttcattttatctatttcctgggctgggttattttcttcaggtgtattcatgatattgattattgttaatgaattttcagtgatcttgatggttcttatacttttgtttgtttccataaaacttatttaccatgacactaattattgagaatgaagaaatttttttaactttaccaatcattatatgcatctattttacttttagtgtacgattataatcttcactatgtcatccttattttgttttattatttgaagtccttgtttcaggttatattgatgtatggacatcttaagctagaaatgacttggagagagggagctcgtgatttagtgaaatttaggagttgttgatgtacctgtacaagcattttggattatgcagattgtaaaacaaaataaagaaatcttctttgaagaaataaaagaaattggttgtatggacatgaatttagttttactcaatctttgtaaatgtattgatttaagtttttgttaggtgtttatttggatattttgtataaataaatttttattgtaatgttaatctgttattgatataaattaatgaaaagtatttataaaattttctcttatgataatgtctatatatttacattacaaaattccattttctaattatatgttttcttattagaaaataaaaaattaattatattaaaataatcatttaataaaaaaattaaaatatatatacgattttattataaa

SEQ ID NO: 311395 - DNA, 2321 bp, Cannabis indica
ttattattattattttgagaaatgtaacttctattaataaacaatgaagttatatttacaattcataatatttggaatcttaccattttaaatttctctttatctatccctaatacatattttacaatattatgagctttaacatttacatctctacatacatgaacaactaatgacagctttttcaaaaaatagcttttagctttttcaaaagctgtgccaaacggacccttagactagttacttttcagaaatcctatgtactaactttgtataaactaaccttaaaaaaaaactttgcatatacttttataaaatcctaattactttgtataaacttttgccaaatcctaactaatgtaattatggagagtgttaattacaacctcttaactttgtagttaattttgacacctgaaatcacatactagaataattttttcaatttttttatagcggcattgaaaacagagttcatgatattccaatttaccacgcgtgttcaaaaaacttcaaacctatatgtttttgaatataaaggttgttgaaaatagttgttgcggaaaataaaatgaacgaatttaccgaattaaaatctgagttgagtcgcggactaggtcgctctctttaagacgttcgcggcactgtctagaactgtgcaagccgactatcaacctcgtcgtccccagaataaaatagcccagtcaaaaatactgtatcggagctctattgcacgatagagaaccgtcaaaatacgacactcaataattgtactactgctcggaatacatattcgccagctcagcttagttagtcagacaaatggcgccagcgcgcgcgtgtgtagtggttcagtgttggagtcctcacccatgtgcacaaaattgggtaccccttgaggccccaacccaagttttaaatttgcacattatatacacttctaatgtagtgtttccatcacatgtgggactccattcactcacacactccgcttcttatttttaaaaaatttaacaaaatttcaacaatcccccacttgaaattttttaaaaaatattttctcgagcaatagtctatgaaataagatagagcatagacaaaggtatctttcgatttgaacatttgcattgtgtatacaacttagaatatactagagtaactcgtagtcttgaactctatctctaatgatataccacgcacaatctttcttgggtgtagtccaaaagcttgtgctttaatggccatgcatgtctagcccaatatagtgaacactctagaaatttgtccaaattttataggaagcggccccacttccacattcacgtaagtgagtctatcaagagtactcctgtagctcggtactctactccacatagagtatagatctcattaagagtttctattatatcaaccttatatcactttagaaattcatgcttcacatttcttataacaatagtatgatctcgttcctatcacatcataacttgttattacccattaagcctattttttgggatctccaatctataggtcgggttaccattatgagtgactcattattctaagggcagtagtcccatacctttcgaggttttaagaactttctctctagctaatcctttcgtcgaaggatcatctaagttttcattagtgcgtacataatccactcttactgcttctatagagaggaactctctaacaatactatgtttacgaagtatctatcttctcttaacattataataacagttttgaacttttgcaatagccgtggtactatcgcagtggatcaacacagctggtatcagtcttttctataaagggatctcaactagcaggcttctcaactgacctgcttcttcactagcagttgctagtgctatcatttcagactccatggtggactttttgtttctttgatttccaagaaacaactccaccagctatactaaaaatatagccactagttgctttggaatcatttgataaagtattctaatcaacatcgctatatccttcaaggacagctggaaacttttgataatgcaatccaagatttatagttcttttaaggtatctcatgaccctctcaatagcacgtcaatgctctatactaggtctactggtaaacctgcataataatcccacgacataggcaatgtcgggtctagtacagtcaatagcatatcaaaagttattgattatgctagcataatctaactgtcttactctatctccagtgttcttaaataattttacacttggatcatatggggtacaagcacgtttacagttaaagtaattatatttctttagaa

SEQ ID NO: 311396 - DNA, 1112 bp, Cannabis indica
cattttgagacttccaaattgaccaagagaccattaaagctgcccacggatcaacacatttaaaagccagtctccataattttctgcagaaactagtccaagtgatacaccagaccggtgccagaaagattaagcaaactagcattgaatcagaacatgcataattgactcctcctccctggagcaaaacatgcactgcagctgaacaggaacatgcttggaatgaagctgaagattggtagaaaggcaaccacttatggctttccacacaaaatgcaagaccttcaagggcagtttagttttccacaaaacacgccataaatccgattccatagcagcagaccagtggcctttagcatattgcagccactggtaactgcaacctgaattttcatggaaccaataccacttgtcctccaaattgttagaattaagaggaatacttaggataagatctctatctctatcctcaaataaatccttcacaacttccgcatcctattgattgttatcacataacattaattgattaagattcgccccaactagagtatgatgggagctggtgacacacagattaactgtgtcgggtagccaaggaaaatttaaaatgggaacagttaaaccattgccaattttaatacgagcgcctgctgagataagactttgtgtctcatggatactcctccaaataaagctaggattgttactgatcgcaactgaaagaaaagtcccatgtggatagtatcgactcttgtaaacccgactaacaaaagaagtctcgttaaagagtagacgccaagcctgtttgcccaaaagtgacagattataatcgtgcaaattctgaaaaccaatgccacccgagctcttatgtttacacaaacggttccaactcatccaacttattcccattgatttcttcgaattaccccaccaatatttggcaatgagtttctcaagttcgctgcaagtatcgagaaggataagaaaaacagacatcgcatagctcaaagagcttgtgccacagtttttagcaagatttctctacctgccttagatagaaatttgccttcccaactcaaaattcttttctccattttttcctccaagaa

SEQ ID NO: 311397 - DNA, 1721 bp, Cannabis indica
cgaaagaaagactactcttctactcaaaaagataaaatgtaagaaaaatgaagtaatggaagaggtaatacgaatggttgctctctaggctctattatagaacatagaaaccaagagcaaccacaagttcgaattagcagctgtacaaaaactttccaaaagaaacacgatctgctacatcagattcggatgctgacgcagcagatctgaccagaaacgggaaacttactaaaatcgggtccgatcttctatcaatgcttgattcctgccaaaaacagattagatattctgattgtatcaagatacaatcgaaatcaataaggaaaaggcaataatcaaagtttccctaaaaaagacaactttccaaaagagaattccttctcttttgagaagttttcaacaaaggaaagttcagctgaaagtgcaactttccaaacaaggaaaagggcaactacaatccgaatttataaggtaagaaatcgaatatgaatgcacaacaatcttaccataaatggaaaaattattttgtcaactaacttgccaaaaaaagactttacaaaaaaaattatctttttgttgtgagagcatattagagtttatctcacgtggttaatgtgtgaaaataaaataatatatatatgagataaatggactacaccttttactgtcagttggatttgagatgtaatctgtatatcttaatcacattttaattccaaatttaagcttggtataaaaaccgaattgaactctctcccttttaacctccatttgagatgggatcctctaaagtcgaaacacaatagggacagtgaccagtatctatcttgttggaattctaaattgacattttaagtttattctgtctttacttttagattttgtttgtgtgctattgtatattctacagtccacacaaaccaaacaattattgctatgtttggttgcactgaatgatcaaaatttatattgtgccattataaaatgacactacaatggtccttttgcaatcaaatattacatgatgcttcttggaatgtgtttgatggaatgcccaacagaacaattgtatcctggaacacaataatttctggatacccaaagtagggaatatatgagtaggctttgtctcttgtttccatgatgcaaataaggaatacgaaattgaatatgactcattatttaatattggtgctttcattgagagaatctcagcgagagatttcattgtgagctccgaaatatgagtgacgaagagcttcatcaattcgtagatctatggagttgcatattgaccagtattttaattcttagaggaagcaaatacacgctatgtttgaacgcaactgtccatcaacagagacaccttcgatttcgacatcttaggccccaactattgttctagaggtcgacgactctactaaaccagtgagaatcacaaacccagtggatgttcctgaggacgtttggcacatcaacgttaatatgactctcacagagatggcagtgaagcaccaccatgagagaatcacagttcgccagagctggaggagaagctctctgttccatcaaagatgcctctcatcactctcgatgtttcagcttgatttgatcaatgtagatcccaaccgattctggatcaatcaatgatggctcgtagagcaccgaagcagaaaagtgttgcgatatttcacgcaagtgtacgtatcgtttcaagtagt

SEQ ID NO: 311398 - DNA, 2685 bp, Cannabis indica
aataatttccaacaatagattccttgataggttctattgtgttaacatattcaacttctattgtttagaacgccacaacagattgtagctagactttccagctaacacaattctccctagtaagaaaaagtaggcagttgctgaccttctgttgtttgtgtttcctgcatagtcagagtcactttagccttctattatagcacttgcattttatctcttgtacaccaaacctactttagttgtagcaagtaagcatatgaacacccatttcatggccaactagtgaacttttcctagattttccatgtacttactaagcacagtcattgcatagcctagatcaagccttgtgcttaccatgaggtacataatagatcctactgtattagaatagggtacatctttcataaactcagtttctttctctattttagggcattgttctttagaaagggtactgacttgttataggttatttaacaaccttggcatccttcatagaaaatttatctatgatcttctcaatatagtcttcctgtctaagtaatagttttcccttatttctgtctcttaagatagatatcccaaggatcttggtagcattaccaagtccttcatcacaaactctattttgagtaagtttttgaccatatctaccttagacctttcctaacttataataagcatctcatctacatacagaagtaggtagatgacttcttgtatagagcttcctttgtagtataagcaggtgtcatgatagctcctgttaaaaccatgttttatcatagaggcatcaaacttttgttccattgcctaggggcctttttaagtccataaagagacttaatcaacttacagatcttgtcttctttgaatttgatttcaaaacctttaggctgatgtatatagattttttcttctaggtctccatgtaagaaagcagtggttacatctatttagtcaatctctatatcaaactggtttgctatagacaacataattttaattattttgtacttagcaacttgtgaaaatatctttgtgtagtctatgccctctttttgtgtaaaccccttagctatcagcctagctttaaaccttgtaggttcccactttgatttcccttccttatgcttgtaacccatttgcaagctatcattctttttcctttaggtcttaataccataatccaggtcttattcttctttagtgacactatttcttcatccatagctttgaaccatttcatagcattagatacttccatagcttctttatatgtttgaggttctgagttgattgactccatggttgccatgaattcataagctatgtcttcattcaagatgctgaaactgtacttaggattaggttttgatggtcttttctctctgtctctagtcagttggtagtcattaagagcccatgtttattgtgtatcttctatttccttttcttgttgttactctatgtgttctctttttgtttgtattttctgtgtgttccacctgaacttgatctagttcatgttctcttccagctggttgcacctgattgacatcaggttctccttgatcctctagtttccatagaataggatcaaactgtattgttcttgcaaggttactgtctgaagtatttgcaaggttagttttaagtaaacatggaaattcattttccttgaatttaacatctctgctaataatagtcttaaaacaaccttttcccttagccaaattctgtacccttttactccttcgggataccctagaaaaactctttttatggctctaggctctagtttgcctatactttggtgcacataagcactgcaaccaaacactcctagattgaatagattaggtgatttaccagaccacctttcctttggtgttttaaattcaataatactagagggacatctatttataagataagcagatgtcataacaacttttccccaaaaaccatgggacaaacaagattgtattaacatacacatggctttattcagaatggtttgatttattttctcactcgcagcattttgctatgggtgttagtctgacagtcatgtgcctttgtatccctgtttctctacaaaatatgtcaaattcattcttgtaaaattccaaaccattatctgtccttacgtttttgatttttctgttagtgaggttttcaacaagtgttttccagtgttaaatctttgaaagacatcatttttttaagtaaaacacccatacttttctagaaaaatcatcaacaattgacataaaataagtgttacctccacgaatatctttgttaggaccccataaatttgaatgaatatagtctagtatacctttagatttatgtgtacctattttgaatttcagtctatgatgttttccaagtatgcagtgttcacaaaattctaccttgctcactctgtcttttcacaacaattgttgctcactaacaatctgtaatcccttctctactatgtgtccaagtctgttgtgccatagcattgctttagcatctgttggaatttgcaatatcttgtcttgtccaactgtgttgttgttgtgggaattattttactaggatctagatttactaacaagaatgtttcattaacatcctaaaaagaaattctaaaacaatgaaataaacacataaagtttaagaaacctt

SEQ ID NO: 311399 - DNA, 1979 bp, Cannabis indica
gcataaaacccaacactatctccctgtgatctcacatctgaatctcaggctcaaaagactgagccaagacgtgatccaagcctaacagtgaaggttcaccaagcctattatgtgtgttatcatcagcattgtaggtacccaaagggcggttggagaggacaatacaagtcttgtacctctttctcttaactcgtgcggccttctcaagatcagactcagtatcgggacactcagccccttagtcgacctcaagaacctctacttggtcaacctctagataaatatcaacataaggctaagtaggctcgtctacaatcctgacccgactccttgtagccactctggctacatgggggtcgcacaaagacgctctatgacaagtcttctttgtctgggccataatcacatgatgactaagggacctacgcggatgtcacttcccttatccaacactcaaagcctcctgcaaagaagagataaggggaggtgagcaacttgacaaagctacgaacacattctagtaaacagttgctaagggtacactctaggtaaatcacagtgcacgagatcaattatcgaccaagtaccgcgttaagtacacttacttatacatatgataagtcctaagttatacaattaactataatggactcactatggagccttattaaagttcccaaggagaaccacgcataagactacagctgtatatgcctccaaggtcatcacgagaccctagccgaggtcagcagagggtaaaaaactggtcacccactcagagccttggccttggccgaccagggttccaagccttaaaggtcggccaaacttgatgacccagccaaaggatagcaagaaatccattttctaggcataggctagctaacctatggtgtatacccccttggctggccagaccccttaatagccacccttggctgcctaggaatccattttctaggaataggctggccagcctatggggtgtacccctttggccggccataccccttaatcgtcacccttggtcgaccaagtcttaaataagacatcattggctggctaagacttgtacggatccaaaaatgtgttttttcaagaactcaaacacattcctcatgttcttcgtgactcaaagagcctagaatcacaataaaggttagattcaactcattttcatctagaaatcacacattgtgtattctaaggctatcatgtggatcaaaataccaaaatgacaacaatctaatgtaggaatcaaagtatattcaaagcaaagactaatgctcatacattcatggcgtaaacaaccaaattaagtgaaatagcgggaatagaaagcttaccaactacaagaaatcggtgaggaagaatgtaggaagcttggatcgtcgaaattgcacaaaaattctaagagaatggcacttggtgggttcagccctctagagagaaggagtagactctttaaatgtcaatttctagtgggagaagtaaaagtaaaaactaaaaagggtttttcccccaaaagcacttatatagtacatgtggagccccttcttcagttacttcacctacgcaacaaagagagaaataacgcagttagtttactgcatcaaataagatcagatagtcaagccgaagcatttcaaaaggctaaaaatgtagcaacttttattcaccaaaggctacattagttccaaccgcaccaatctaattggtatgtccctattcgtacagacatttacacacgaacttgggggaaatattatcctgattttcacctacctaacgtggcattattgttgggttttatgccctaaataaaactcatttcacataatcagatttacttattaataaagatcagaaataacattttatgttgcatggttcacatgatttatttcatgattatatgtatataatgtatgaattctttttaagtccagaacatatgagtttgttaaatattatagtgt

SEQ ID NO: 311400 - DNA, 1751 bp, Cannabis indica
ttttcacctgcactccatttagcactttatgatgatgcgcaaaaatgatcattttatgagaactagagttcgagtccaagtttgttgcaccatctgactccgcaatgagtggatgaatggaaagccattcacaaaacccagacagctttgcaataccaagttcttgataagaaagcttccccgaactatggcaatccccaccttctgcaagataacagtggtgtatgaattgcattgcacaattgaccaaaaaaaaaagggaaggggggggggggggaaaaaaaggggggcatatacaaaaatgcacacaatcttccaaaaagtcaaatcttgcgttgctatagcaaaagaaaaagaaggtttttggagaatattggcttcagaaaaaattacacaagagatattattaagtaataatattttgactgtgtaaatatctacaagttaccatcggaatcatctatatccttcaaagatacgtcttggggattgcttctttcgtcaaccaccttctgctcaaccgcagcctttgctgcaactatgtcggatctcttcaacagaactcttataatttgcctgcgcttgggtggtaactgaagcatgacatgctccttcaaacgtctaatctagagtgaatatttgaggttcaataaattagaccactctcaacataacttaccagcattactgagacaaactgatattccccacatttcatattgtatatggattatgtatatgtcatgcagaataaatgacttgcaatattgcagccacattacagaatgacattaacaaaaagtagccaaataaagctaccatcaaacatcctgaaaatttagaatgaagtaatgaaccactaaggtggcgtttggttggagggaatgaaatggaatagaatggaaataaagcaacttttactctatttctttgtttggttttattttaacgtattggaatgtcattcttattctggctatgttttcattccttccaaccaaacgctacctaataggatgtttgttatgtgagtttgagttggagagagtagagttggagggagtagaattggagggaatatgaaactcatgtgtttgaggggattaacattaccaccattttaattaaaaaagtgagacctacttggaaatacaaaacccttgtcattcaaatttaacattaattttatattctcattctaatcaagtctaaacctcataccaaacgccccataaaagttaaacttacgttaaacctaacaactaatgttaatataaaatataaaaacttgggttatacataatttaaaaggacaaaatttcatgatactataatttccttattgtttttctgatgaaactcatgatactataattagcaatgatctagtctaccaaaacaagattaacatttccagactgcatctacgaaaaaaaagaaagtttgtacacttgcaagcatatcatgaacaagagtgtaccataacagtctgctttagtagcacattcaactcctccaaacgagtgccctttgagaaatcctgcagcacctcagagagtgtctcagattatcagatagaatagcaatcaaatcattgaggaaaacatttttatggcaacaaaagttatctacaattgttctttgaaaatatacatacataaatgcatatatctctattatattaaatgtggctatctaaccgaaattattggtttaacggttttttcttttttcctttaaagttaatggtt

SEQ ID NO: 311401 - DNA, 1596 bp, Cannabis indica
agatttgttaggaaaaatgatggaagtatatgttgagaatatgctcataaaatattaacatgagactaatcacgtcactcatctgaactcgattttcaaaatcctgtgccaatataagatgcaactcaacctgcttaaatgcgtctttggtgaggatctggaaaatttttgggcttcatggtgaaccaacaaggaattgaagccaacctcacaaaaattaaagctttagtagagatgtgatctcctattaagcccaaggaagtacaaagtcttacaggtaaggtcgttgccttaaatcgctttgtttcacgttcttctgataaatgtaaagagtttttttagattttgaaaggtaacaaaaagttttagtggactgacaagtgtgaagaggcttttcagcctctaaaaatgcatctggggaaaccccaatactctccaagccgatgcctggagaagtactctcacctcgcagtgtctgattatgcgattagcttagtgctcattcccgaagaccaaggtagacaatatcccctctattacgtaaccaagtgcttattggatgcagaatcaccttatccacagatggagcgattggccttttcctaagtcgtagcttcccgaaagttgtgaccttattttcaagcccatacaattgaggtattaactaattatcctcttcaacaagtattggccaagcctgatacatctagacgtcttttcaagtggtcgattgaactcagctaatttgatatgcggtacaagccgtgatcagcgattaaaggtcaagcctttgctgactttatccttgaatttccgcatgaacaggtggataccataaccaaagaacgaattgacccagatgttccagagggcataggttggaccttatatgttgatggagcctcgaacaatgaagggtgaggaggaagaattatgttaatcatcccaaataaattcaaagttcatgtagttttaaggtttgaatttgatgcctctaacaacggagctgaatatgaagctttgattctaggtttaaagcttgctcttgaaatgaaggtcaaatatcttgaagcatttaccgactcccaaattgttgtttaccattttaatggagaatatctagctcgaggtgggcgattagccaaataccttgcctacacttgtgagttgttatcaaaatttaaaaagctattgttagttgaataccccgtgcttacaactcctatgcaggtgctttggcccgattggcctcaacttgagaagttgaattactcgacataattttcatcgacatactcgacaaactcactattgatcgagaagaagttatgaaaatagaagttgttgaacaagtcacctggatgactccaatcattaactatctaaaaactggcaaacctcctgacaacaagcttgaagccaaaaaattatgatatcaagcagctcgatacgttacctatgacaataaactataccgtagaagttttaatcaaccactcttaaagtacatcggtggtgatgaatgcgactactgttgagttttatgccctaagtatataatatatgaattcttcttaagtccagaacatatgagtt

SEQ ID NO: 311402 - DNA, 730 bp, Cannabis indica
aaatagtctactcttccttttgctctagattttagcaaaagaaaatgtgagagtacccaaaatgctgcaaaatactacaaatacattttaaacatttgttttcttcaacaagggaacaaatagtaaaacagttcattcaaaagtaaagttctaacaatccattagttataccttaaatgactcaaaatattatctcatggtgtcgtgtgctggatttctcaaaaggaccatcctagtattgtgttagtttcttaacttaattaattataactaccaagttaatagaatcaattaaaacccaactacaaaatggaattctgtgaattgtactcttaaaccaacaaagaacagtttagaaataatgcaattaaacctaaaatagttctgcttaaactcattcaattaatcaacaaatagaaaatcaacctcagcaatgcaattcctcaaattctgggcagacccttcttctaaatcatagcaataatatatactcaacggattttgctcatatccaacactttcaggtattgtcaaaagaaacctgttttcacccaaacacaaacacaaacacataacaatcataaatccatacaaacaaaagggttaacgatttaagagttgattattacacagggccattagtggcagcaatccggcgagcttcatcggcggagaggtgatttgggagtgaattagcggaggaggcagagtcgaggtcaatgagggcgta

SEQ ID NO: 311403 - DNA, 672 bp, Cannabis indica
aggtggcttcctccaccttactgattctctagagtatcttatataaccaatgttatagtcttattttgaaggacttatctttcttatcgagagtctgcacgagttgcttctcataagacaagtctggctaaagttctagggcttcataactcaagatatgagtcgagtctcaaacatatttttttagcattgaaacatgaaataagttgtgtactactaacaatgctggaggcaaggttagacaataagccactaacccaactttcttgagaatttcaaaatgccatgtaaacctagggcataacttaccctttttcccgaagcattttacccctttcgttggggacacctgtaggaagacatgattccctacctaaaattctatgtttctgtgcttcagatctgcataatttttttgcctgctttgggaaacaagtattttgaccttgatcttctctatagcctctctggtccactaaaatgacttcgaacctaagtattttctttctccggtctcttcttagtgaattggagattgacactttcttccatacaacattttatagggagctatcactatcatactctgataaccgttattgtatgaaaactctgcagatacttgttccatgagccttcaaaacccatcacacagactcgtaacatatcctc

SEQ ID NO: 311404 - DNA, 780 bp, Cannabis indica
agatctatccctgaaccttcctaatgtttcatggaggccatcattccataggatgaaagtggggaaggttacgtgttccctgacagagctacccaactgttgaagcgctttgaccccctgtctgacactgggagagtggccaaaatggatcagctggcagatgcaagggaaagatctctcagaggtgaaggagatttgaggaggacatgaacaccagatagggaggtccaaataaggcctcaactatccgtaacccctagccaaccgcaaccgcaacaacgccaacgccaacgccaacaaaactaccaaaaacaacaataatacaaccaacaccaacaacaacatcaacaccaccaacaacaacaataagaaccaactcgacaactttctaccgtcctttcagccataccctccttgaattcaatttgcctctccttcccaaagaaaatgtgactgaggtctttaaaaaggtggcgcaggctaacctctgccttaagaagcaccgtgacttggaaatagtctgtacccaaaacactactacaaaatgccctttccatgtccttttttcatgtccaacaaaaatagtgttggacttgaaaaatatttgaggagttttatagtccaatattgttagacttgaaaaattgttgttctagtccaacaatgttggactagaaaaatgatagtggatgttatataagttgaaagattatatttaatacattttttattttgtcttcatttttttttcggtaaatactattttggaccctctgtttt

SEQ ID NO: 311405 - DNA, 905 bp, Cannabis indica
ataaaggcacatttataaagattaatctttacttggaaaaatatcataataaatcaaagaaagaatgaatgttgatacttaccatttatacacaagattttcttaacccatgaaacaagtcacacgcctcccaagattttcttaacccaagattttcaagaatgaatgttgatacttatcataataactagtcacaacttttagccacaaacatttacaattgttagtcataatatttaattatcaatttttataaattataaaatttaaaaatttgaaaattatcacgaataattcattgtgactaaaacattattagtcatgtgacaaaaaatacatttactcacaaatttttgttttgttgactaaaagttcacttttttttagtgactttacgataattaagtattcgtacgtattagtcaaccatgcatgcattgatgcattctttattattaatcaataaagacccattaataatttttcctcatatgcatgatcacattatttatttacatagatttttgtctcccattttcttagaaagtacccatatacgttaaattattggttggtgaatgtttactcgtagaaattctcagtacttgtttttcttgctttcaaatatttatatatatatatatttatatatatatatatatatacactcacgtgctccacatttatccatcattttcatgtaaatgttttttagggatttttttttttcggaaatataatggcgtgtttactaaactgtaactggaattaaaataatcaacaaaagaaatgaatcggtttaaaatagaatataatcggaaataatattttattatattgtttactaaattgtctaaaaaaaaataaaatcatattattttgtttacataactagaaaaagtaat

SEQ ID NO: 311406 - DNA, 2436 bp, Cannabis indica
ttacttatatatatatatattacgggcatgttaagaattaccattaatggtgtttcttactttatattctagtgaatttcatttcctgttgtaagaaatctctaatggagactataattttataagtcaattgtggcttctttttttttttttttgctttttttaatctcttttcataagcaacgggacttgtatcctacaatacaacgatgaaaaatttgaaaacaaaatatgtgtataaataaattacgaattgaaacaagagcagaacaatacaaacagtagactcgagaaaattgaaaaaaagtagaagacttaaaagaagaacagacaattgtatgacctagcttcggccatgggaatgggagtcaattctgactctggcttccaaacctggttgaatctaagatgctggacttgataatgacaaaattttgataatttatggcatttaccacaaaaaaaaaaaacaatacacgggaatcatttatttattttctttgaaaaactagaaacatgtacatttcccgcgattaagaactttgccacatggcttcctttctcgtggctctcactcgccctaaggaatggactagcctacccaaagtcatcacgtaaaaagtgtttatttttttcttttctttcattaccaaaatgaccttttatgggaccctctattcttcaattaattgctacattcctcatgtgtaagatttatttaatttattttcttaaggaagtgtaaaattaacaacagaatccatacatggcaattttctcttattagttatctctcaatatgaggacttggttttgtggatgaatagactaaactcaagtctagttagttgcaggatgtttgctatatacctataggtataggtttgagctgtaccaaccacgtcgaagctgtaagccatggcatcgatcatcccaccaccgcctacctagctagaaaatatgatgctttgttttgttttgttttttcttgttccaaaaggatatgaagtcttgaacaagaaagtgatgtcattctcttgattagatccgagtcgtacaacctatttgacgacaatcatatggtacgaatataaatcctctatttctataacaagcatactactaggctactagcacgtactatacgtggtttcatttactggttttcatttcactaaaatagctatcatacatagctgtgtaattgagataaaggaccttttctttaagaaaaagggaaatctgttttaactattggattttgactaacccagtacttgtgacaaatattgatgcctttttttttggagggggtaaatttgctcaaactcaaataggtacaattcacttcatatcttttgtttaacattccatctagatcttaccatatcaaaataaataaataaaaaatatagttacaattctttcataactcaaatctgatctatgcaactaaatgtccaaaatcaaatttccaaacaattctctatcacctataccaattttgtctagtttgagacttttaatcctagccccaataatctctcattctttttacaaaagctatgtacagtttgaacttcatgctcacatataatcttgtttcttactttccaaatgatgtatacgcaaacattgaagatcatgatgtaaattcctcttcttaagtcaattttattgcatctaatccagtttaggatcaatcctttcaaattggtattggtgagatcctagagccgccctatgaagacccctttcaacacaatgtttaataaacacacctaaaaaaaggattgtttatctctggttccgtgccgcaaatataatagttcattgcactcattattccttgatgatgtagtctatcccatgatctcaatcggttccatgttaccatccaggtaatgtatctatgtttagatatactttgtctcatccgaatcttatgggcataccatgttcttacctcctgctatcatatatataaagttgagtgaggatattcaatcgcaatcaggatacaactctgtcgatctcaatcttctcaaatatgccattataatattgacccctctgcatgtcatcatcaccagctctttcgtcatcatttataggaggaaagaaatcttcaatgacaccaaccatctcatccgcatcgacattgacgttagccttgataggttcatccggttatccatggtaaatctacctctcataactgctttcgaaaccctttgtaaagatgtgtgcctctgaaagtcctaattactacaagttctaattgatgattcttaacagagtaattctatgttatgaactgaacttaaaatcaatgaacacagaatttacaagcttcctctgcattggaaacacaatccaaccgagtagtgcttgggttcccttgaaccgggtacagtaactttcactaaacaatca

SEQ ID NO: 311407 - DNA, 713 bp, Cannabis indica
atttatacttttttaaagcaatttgactatatatttatttatataattaaatagaaaaaaaaaatctatctatgtctatattttaaatattttaacaaacacgaaattcaaattttaatttttaataatgggtaacctccacttattattttttgagtgaacttttataatattttgaggatgtatttttcaaacaagtaaaaatagtcaagtaaattataattaaagaaggaaaaaaagaaaaacttctattaattatattatctcttatctttttaaaagcatcatactaataaaaaccattaagtgaatcactaaagaatctaaaagtgattctattgatctgttattttttatgtttaaaggtatatcaagtaaattaattaagaactaaaaccaaactaatactgcaggaaaaaaaaaacaaaatatttaattagttagagcatcatattcttatttggcaaataatatgctattaatattagtttataattaaaatctctataattaaaagtatttatgattaattatatatttttttaattataaaaatcaacactaacacattttctaaaaaaaaactaatatctaattgattaaatttttcaaatacgtaaactatgaatagttaaataattaaaaactaactaatatttgttcgaatagaatgcaattaaattaaatgaagagaataaatgaagaaatcaaat

SEQ ID NO: 311408 - DNA, 1246 bp, Cannabis indica
ttttagccattttaactcttaaaaaccagaacaaaagattttcaactaagttttctcctaagttcttcgaggaatttataggaatcttcttgacgataccattcgagcagagcaagaaagcttcaaattagtgagtaagttttcgattcctttcttctacacattcataatgaaatgcgtatatgatttctgaattttttgttgtgaattttgcttgttcctaggctgttctaggttggacgacacacacacctgtgcacaactcacggggttggtcctggagctgcttggacatatctcgagacgtgtaagtattgatggtgactttgagaaatgcacgccgagtgagtaggctaattgaatatgctctcgttagtcctttggttattaggcgactaatctcgagagttagcagcgctaatttttgggttaacagagagtataattgaaacccctcaattacctttaattatacaattacagtgtatttatatcgtccgtcaaacatgataaattgtgtaagtacctttagttacatataaatccaatcacagaataacttttcaaattatataattaccactaattaatgtgtaattaccaattatcttgccaaacataataataaaaattcacgtctaattagcatttgatatctaaacaattactatacagtgtaattattataacgtgtagcaattacaatccataataattacactgcatagagtacaatgcttccaaatctaccctcacaaaaatagaatagacgcatctatctataagtacgaaagtggtgctctttcatatcattttttatttttttatttttatggcatgtttactaactgtaattggaatcagaataattaatagaagaaatcaatctggttaaaatataaaataaccggaaacgatattttattttgttgtttactaaactgaccagaaaggaaatcaaaatcatttttttttatttacataatcaagataggtaatcagaatgacttaatttgactaaattatcatggttagaacatgtaattattttttatttatatatgattgaaagacatatttgacttttttttatttttaattaataaaaatataattaatataaagtaagttaaggaaagtaaaaagtaattcttatgaaaataggaaaaacctttctttttgttttctccttaatttgtttagcccattagtttttcctagggatgcacatttcccccacggggat

SEQ ID NO: 311409 - DNA, 573 bp, Cannabis indica
ttttatatatattgatccatatatatagactttaaattctatgtgaggctctctaaaatttattatatagatggataaagatagttatagttatttattttgatatatgtttatatatatatattgtactattataaagtgtttaataaagtattttttagtcgagtaaatatttactaaatcaagtttacaatttattttattttcatgatttatgatatttttaattatgattttgtcaaatataatgtttagtgaagtatatttttttgttttgaaaaatgttttgtcaaacataaattactaatatatatatagatatttttttttagcaaatatccaccttctaaaactcaagctttcaaaagatgaaaatgaagattaccaacaaagttaatggtctacttcagtggcagacccaggatttaaattaagggggatgacacttttttttataagtgagggggcgtctgctttttctacattgtataatatgttaaaaattgatgcaaatttatattttagtattaaatatagtataaagtaaaaaaaaaaaagtaacaataaaatatt

SEQ ID NO: 311410 - DNA, 1918 bp, Cannabis indica
tgtccatatgagggaggaaatgacttttaggacaaaggtccttgagccttggtcaaactttttgtgtgttatccttcttcttttctagatttcttgtaatcttgatgaaatacttttatttgtattttgagtattttgattgtaatcctcctattctctcttgtaatgagaatttttccaacaaaaatatatatattattttaaagtataaaaatgaaaaaattcttaaatgaataaatacgtatgtatttatgagaaaaaaattacaaccaaaaagataaataaatatctaaaatagaaggaaaaataaacatggaaatttcagctttcatttgctgtctcttcttttttctctttttaccaagtcttcgtaattacatatacaagtcaaagcacaagcaaagaaaattctacttctcttgtttgtccacttgtacgtacgtacaccaataatataattattaatgataagctttaaatgtgcacatatactccatagtccatacaaccacaccctgcaagaaaaaaaaatatcatgagtaatttgatgatgaaattaatgttgctcttgatttgggtggctacccttttgtgttgttcactagcacaaaaccaagccatacataattcaagatacaaagcttgtgcaccaaaatcttgtggtacaggtcccaacataagttaccctttttacattaaaggtgtaggaaaagactactgtggacgccaaggctttcgaatcgcttgtcaaaacaacaaaccgattttccaaaccgattgaggtccttaaatcataaagcacatcttctacaaaaacaattccctaaagatagccgatttggatgtagttgacattataaactcgttcttaccaagtttggagaaatctttggttccttgtgcctcgaattctactcattcaactctagttgctttggtgccaaacaacgacaatttggggaatactattaatggttcgaagcaatattgtgagaaataaattgctgtgccaattaacttgagtggaaataattataataatcaaagtattaaaatggtgaattatattagacttttgaaggatggatttactttgttgtggtacgagacaaattctcatttatgtgaagagtgtgagagtagcggcgggcgatgtgggactcagaatggtggccttgtttgtttctgtcctaatggaactcaatcctcaacatgtgttgttcaacctaaaggaatagaagctcaaggtactaacaaaactactagtaagtttcataattaaattttaaattttgtgttttcttttttcttttttctagcatttgttattagcactcaaggttccaagtagaagtagtgagtatatttaatatgtgtgatttgatattaaatttaatcaatatatagtaatataggatatatatatatatatatattttttattagttataaagaaaattatactccatatgattttttaagattttgttacaaaaatatgatatttttaggtttggttattttttatggcatattttagtttttaaagtattttatagtattttttttatgtcatatgtgtaaatttaatttttaaagtctatatttgatgtttagatagattatttgaaagaaaaaaaaaatctcaaaactatttcttctcctccattcaagtaccctacctgtctcatcccttaacagtctacctaccaacctccgttcaccagcgacatatctggcgatcggcgacccacacatttggtgatcgatggctcaaacgtaccttgaatatgagatctccaccaccaaaatgtaccttcaaacgtacacatttgtaggtacttagttaaataaattatcacgtggtaattcctgattggtccaagttattaaatttttattattcaaaaaaaaaaaa

SEQ ID NO: 311411 - DNA, 816 bp, Cannabis indica
tagcaaatctaggagacaaagaaggtaccatggagcattcatctcggtttaccactggatgctaaggcgatttctccaccttttttaattttttgccaataactgatcttggcttctggtcttaaactcggattacttttctaatcaatttactaataggaatagggcaagggacaactttccctcggtcctcacccactggtcttttcactttatccaactttgacttcagacttgtcggaggagtacttatcattggaatatttggcctatcatcttccttaaataaatcaagttggtttcaagtattaaaatagatatagaccgtcgtctctgctttcatccatggaccgtaagcaggaattgcttttcctttaggtggataagcataagaagtagctctagcacaaatttttatcatgaccaaggtaaccacagttctaacataactttgggagtttgtagtaacaaaattgtatacattcttttctccctcatttaatatccaaatagaaccctgacgttaatcggtgatatgtcacaagttccacttgaaattttagaaaggcacgcctaatcattagggtttccaatgtgggtcacgacacgacgacacaactcaaaaatgacacgaaataaatgggtttgggtgacacgtttaataatcatgtcgtgtttgtgattgagtatctaatgcatttaataatcgtgtcgtgttcgtgtactttaccttaatcgtgtcgtgtcatagtcgtgtcaacacatgtagtaattgttggaaattattttaccaggatctatttactatcatgtatg

SEQ ID NO: 311412 - DNA, 1313 bp, Cannabis indica
aaaacaaatcgttcaaataattactactattttaattattaattaaaataaaaaactaaaatattaaataaaactaacactacgtggcttggcacgtaacaatcacctagtatatataaaggcgtcggctacagtacacatatggctaaatacgtcatccaacatgcataggcggacctaaaattagagatagaaataatacataattggtagttagtgtaggtatttgttctttacttagtagatttggtcttgaatatgagttctatcttttatttttatttatatataaatctaatgttttgaaaaattaagctacaaaatattaacttaaagcattcaaactacaaataatttcttttttgttgaaaaaaaaacttattatgttaatgaattaattgtttgaattatatatttaatctataagtaatacaagttctatacaagttcttacataaaaaaataaaataaaaattataaaatctcatgttattatttagatttgttccaatttatataataatttcatttcaaatttaagtaaaaaaatgtattatagatttttcttttttgcttcaaaaaatattattttaaattctagtgcaaattttagttacctcaccctaaaattatattctagatcggctactaccaacatgacacctggtttttttttctagctttagaaaatattttattgcatttataaattactttttaactggttattgtagtttacatttatggttaaatatttaatcaatttttttattatgatgttatgtctatagtcatattttacatcaattaataaaaggtctaaatgtcaatccacccttatttttttttttaaagcaatgaacaaattcattgaaactagaataacatcatatagctagttatgaaaactaaacatgtcatctcatgttcatcaaataaatactaaatatggcataataatcaaaataatactatattctaacaaaaataaaaataatcatatctacccaaacaagttgtttatttatccaaaaagcatgtgcaactaatctacaagcaacataaattaggaacactcatggaaatttaaataacaaacttgtaaaaacttataataatgatcacaaaatcatttgagtaaaggactctgatagaaaagcaatcataattgtaaaatcttggtaccagacaacaatctattgtcatcaccagcatcacgcaaattgttttaaaaactcactattctttctctaaaagcttgacgggactaaagtatcttagctgcacataaacaaactatacattagtgagat

SEQ ID NO: 311413 - DNA, 1425 bp, Cannabis indica
tcgtgcacttgcgagtataaatattaaaacactcacttttgaggacaacacactagctaacaaactgtacctgaagaagagatatatactcttaagatatatgaaagcagagagttgaggaagcatcttaattatttcaataagattatcttggattttaataatcttggtgtcaaaatagatgatgaagatcaggccacaatactccttagttctcttcccaaaatgtatgaatattttgttgataccatcttgtatggtaaggacactctcaccatgactaaagtgaaggcaccactcagctccaaagaaattcaatagaaaggtgatgagggtggggatagcaatggggagggactgttgattgtcaaaagaaaatttcccaagaactacaagggaaattaaaatcatcacaaggctaaccaatctagaacatgtgcaaaaggtccaattgggggatcaaattcaagaggtaacactgggaaacaatgcttctactgtaaaaaaggagggacatttcagagataaatgtctggctttgaaagaaaaattcaagagagacaatcatcaatcaagaaccaggaatcatggggaagctgatcttacagatggatgtgagacagttgatgtcctggtggcatcaagttctaactcaggtggaggatgggtgcttgactcaggctactcatttcacatgacaccaaacagggaactactcagctctttctcagaagagcataatggaacaatgcttctaggcaataaataggcatgtgcaattcaaggaattggtgtagtaatgattaaaactcatgatggaaaacttcaaaccttgcaacaagtcaggtatgtccctcaacttaaaagaaacctactgtctattggaatgtttgacaagtctggttactcagtcaagattgaaggtggagttatgagaattgttcatggatcttaagatctaatcaaaggtcaattaaacaatggcctttatttttaagatggtaaaacagtcattgagagtgcaccacttgctgtacataaccctacaacaagccaaagtagactttaacatcttagacttggacatgtgagctaaaggggactggaagaattaaacaggcaagggttgttcaaggagaaactataagaaaggctagaattttgtgatgatgtgtgcttgggaaggcttccaaggtaaatttcagtaaaggagaacacaaccacagagaaacttgcctatgtacattcagacctttggggaccatcaagaattccaaccatgggaggagcacactatttcatgagcattataaatgattttagcaggaaggtatgggtatactgttgggatttaatgccttaaataaaacccatttcaatctaatctgatttgttatcaatgaaagattagaagtcatttatgtt

SEQ ID NO: 311414 - DNA, 822 bp, Cannabis indica
cattcgtactcttcaagatatttggattccaaatgtgaaataccttagatataagggtgatcattctccctcttctgatagagtcattttctttattaattaaaacttccaatgggatattgacaaattggctcagttttttgacagtgacatggtggataatattctccaagttccaattggaggtaatgacaaaattgataaacttatttggaatggagaatcttcaggcatgtttactgtcaaatttgcttaccacttagcaaatgctggttctgttccccctcctcttccaatattatgaatatgacacattggtggaaaaaattctggaacttaaacctccctccaaaagttaaaatctttggttggagagctttttatcatattctaccaactgcttctaatcttttttccaaaaaagttcttcccacaccatcctgctgtttttgtaacagcttaaatgaatcagtttcccatgcacttctagacagtttcagggcgagacaggtatggaactcctcctcttttaagcagttttattctcaaaataaattcaaagatattagagattttattctatctggttttgctgatttaaacaagaatgattttatgttgttgctgtgtcttttatgggctatataggagaataaaaataaaaagatttttggtaaatctcacttgtctgcatttgatttagttaattggactattaggtacttgatggattatcaggaagctcaactcaagaaggtggatagaagcaaagtgaccaacaaacccatgttgggttttatgccctaaataaaactctgtttc

SEQ ID NO: 311415 - DNA, 1360 bp, Cannabis indica
aaccggtaataacaacatttacaagtcttgacaattcaatttttgagctactttactaagttgtaatcatcttctataaatatacaaactatcacaaaactcataaaacacttggtttctccttggtcttttagggccgaatgtagcgagagaaaggtaaggtgtgtgtgttgagtgtatttttttttttctgaaataagagaataacttaaaatgttcttttaattaaatcctttccgcctaatataacttagataattatggaattaattccactaactaaataattacaataacaaaggaccaatatactatttacttctcggttgtaatttaataacttaggtgtaaaatagttaaaaacctaaataaatacgatattctaaatgtctaactatttttccagcaactacaccgtatttaagtgactttaatggctaaatcatcacattctattattaccgagtataaaatataaaatttcatatatagtataataatatacctaaaatttaaatatatcaccataattataaaaataataatttaaagcctatttctaataatatgttataattatctactaattcatgtaataaagttagcggtcattacacataggcactttgcgtcctcactagatttttctacttatatcatccaactgtatttggatgaatggtccctgaggtttgttcttccttcatacaattccagcagctgtgcatctatgattctgtgtcctcttctttcgagtcaaacactgtttcattttgttgtctaagatcttttctgtaagctttgttaactttttaattttacgctccaatcattgagttttagcatcggtccattctcttccgcaaatgcaatcattaatatggtttcttaggtagtctctgtgaggtctggctttctcagtttagaccttttctatttatttggcatttagtctcctcgaaagatcatttgtggaaagattttcacttttatcgtctgatggcagatacacctcttcgacatcatcacttcaactaacaaaatcatcacatcaatttgtatccttttgggcagtaggcttcttggtttttgcatcaaatttatctttctgcgtagctctggctctagaatcagtttgttcatcttgccttgaggcatgattttcttttttttttctttgaggttggctgatagatttgaatttcttttgctgttcagcttgggcagccttctttaaagttccacctactttcctttttcttttatccttatgaggatcataggttccaagatttttaggatcaactttcttggtagtgttatattttggtagctgtatgattggttgtgcctacagtgg

SEQ ID NO: 311416 - DNA, 1273 bp, Cannabis indica
aaatctaagtcttggtaaaatataatccaacacctttaccagcggaatcactcacttgcaaaagtttgtcagcacatttagttgattttttcctgacctaagttcatggctactccgatatcaaagggttggagcttgcagctagttttctatttcactcccgagctttggtttgttttattttacattggctttagtttagttgcttgttacagtttggaattatttctagttatagagattttgaggtttgtatcgttgtttatttttttttacctactatctttgatagtatcgtacatgttaacgaatatgacaataaatgacatgtgcactctttgaaaagaattatgaggttccatctcaaaactaattgaaggtgagtggagtagctcatgttcttataaattgataattattcttacatttaattcatgtgagacaatgttatccaatatcccccctcaagatagtgtatcacgactcgagccctaggttgtggtatatatgtaatattcatatcaaatgtcatactttgacccttgttggaaatacttacaaatgaccatttaatttatattacaaaatcatataaaatacatatttaaaataattgaataactcctctacataaataagaaatattagtaataaagtaggactatttgtaaattatatatgaacaataatatcctcacagttatgtagtcgccaaatagttagatttaataaattgattaacaccaaaaataatacttagcgttcatcatattccttattcctaacaattatatagctatacaaatgatacaaaatatccatcaacgatcctctcacatccactagtactgaaatgagttcctcaaagatggaatataagggtaagcttataaagtcaagtagaaaaataactaataaggaccattagtttaacaaaaaccactacatggttagcttttaaaagtaaaacatgtcattgtcattatcatgtataaataaaatatagagaacccaaacaattataagagacaagctactcgtgcatatcacattgttgattagacccttagctctcagcaccaatcatagaaaattacatcttaaacttggtagttgtgcctaataactaccataatatcgggtctcagatttaattcacttcttgtactaattctagatcttttacctataggtgagtgcacaccttatctaccaaatatgacatagagactagctcatgaaataaaaatatgcataaatcatgatcatatga

SEQ ID NO: 311417 - DNA, 1109 bp, Cannabis indica
ggccgggtccgagtcaaacctggtcaaaatgttcagtcctaatagagataggtgactgttgtcggaagaattttgataataccaaatgttgcgagtattcaaacaaaattagaatactcgctagcagttatgtgagtacttacttagaataccgagtactcaaagtaatagctacgaaatagacaaaaaccaaagtagaaacgtagaaaagacaagagaattatagtggctcagttagagcttggtctgcttaatccattttaagtaatagtttcaacccagtttatttgatttagatcatccttttatatagaaagcaagtgttctttaggattacataaatagtcagatctgatagtttttacaataaatgacaatattaaatcaaaataaacgtttaaagaataaataaagaacaatttcatccgttcttgacttaattgcaacaatttatgctacttgataattcgcaggttgtccatccatatttcaaacacacgagctcgcgtgctctattgtgttgtactcgcaggatgggcctttaggcctattttgttgaatgtttgcattcacccttgatcgcgtagtcaaatattctgtgcattgacaatttggaacatccgagtccccgacgagtcatcgacacactagtcatttggattaaacctatgtaattgcaggagggatatacttggtcatcacatataatcagtatatgcgcgaccaatattaacttcccttggcttacttatctgttgattagggggcatagtatgcgagtagagcctgccgcaaattcacatcatgcgaggtgaactaatcgttctttttgattgcactggttcctatgtccacacttcttctttttgcggttgataatactttcggcagttaacagcactttcatcggttaacaacgctctctgcggttaataatattttttgcagttaacagcacgtgagtggagacaaacatacccttgcaacaaatcatctttttctagtaaaaaattggatccacgtgacaacttttcacgagactgctcatatttttagacaaaaaaaatgtggcttttctctaaaaattaattattttttttataaaaaaa

SEQ ID NO: 311418 - DNA, 1811 bp, Cannabis indica
tcgtaggtgtgcatgattgactcggagtgcttgtagcatcattttaaatttgaaatggttggaccaacataaggtggagtagttagtttaattaaattgtgagggcttgggccctcaagagtaattaaaggccaactttcttgtatgaatatttatatgtgaatatttttttaatatatctcgttataaacaagccatatataattttatctcgaggacctactcaacttggatctgtttaaagatgtcacagtttatgaacattagtttttataagtcatttctagcttctacaatgtatgatgaggcctagtagcaagcttagtgataattttgtacattgacgagcggtccaagtctagtaggtgagctcatagatgtgaattttaccttttgtcatattggatttaattggacaagaagaaataaaaaaagtcttttatgtttgacgtgagtggagagtacattgtcaactttgatagattaatggacatgtgataaaagttgtatataaacataaccaaacattgttatttcatattttatagaaggcgtaaataacttgataattttgaagaggaaaatagctcatgtccaagacaaagtagataatgtgtaagtacatttagttgtgggatagcccactatgtatatgtatttttcatgtgtgaattgagtcatctcatatcagcaatacgtgagttacttttattgtgtaagggcatatatatatataaggctagttgtacctctaaagtgttatatatgtgttatataaagttgtcctttggaagatagcatataatctttagttaggcatgtccactcttttcgagctatgatgtagtcagagcaagcactatattaaccttaggtttgacttgcacatatattgatttaaggataacaatccctaattatggttgtataatataataagcttgggcaaggctgaagagtcaatatatttgtgaggtgaccaatatgcaaataaaccattatagggactgactctaataacgtgttggatgatggtcaagtttttacaagtgagcaagaatttatttatgtaccctgataaagtgtttgtactcatatatatttatgtcagtaagtgcaactccaatggaagttgctatacttgtgactgtcagaaaatgtgggtctatttgcccaaaattattgactttttaaatggataatataagcatattgctcctgtccagcaccgatactcatatttttttttaattttttttgattggttagtgtaaagcttaataattataaaactgaaaaatgggccctaccaacgttgctagcgttggaggtgccctaatggtctgtttcaactaaggctctccattgagattgcttctacttcatgtatatccatgagtgaggacactattattatatttacaagcattgtatgaacaatagtgaccattccatatatatatatatatatatttttatgttctttgctgtaacatagtacgaatgtcagtgtaaactagataatgtagtgcctcagcttgttgtatttcacttgaaataatttttgttgaatgtaaaaaattattttcatagtgatctattgttggtacaagtgagatgatcacaagagtgtgtgtgtatatatatactcatgaaccacatcaaattgtgtatagggctgacaatgggttttgagaatgagtactagtatatttgaaacttagatcttcactcctctatagtgttattgttctacataagagggttcactaattttaatctgtcacttgtcttctttttattttaaagtg

SEQ ID NO: 311419 - DNA, 924 bp, Cannabis indica
aattgttgaatttaaaaatttatatatgtccaattttactaacggatgcttgatgtggatgaaagttcaagagacgtgattcggtacttgtcaaagttttggagccgcacgatttaatacatatcaaagtttaggggtatgattcggtacacatgatcgttggggagcacgatttggtgcatggttaatcagcccgttagtaaaatagaataaagttggacaaaaatccttgaataaaaaaatctcaatagtttaagtaaaatttttaatgatctgaaaaattcgaaggcacgatttagaatatgtgaaagttcgaaaaacaaaaatcttaattagcttattttttaaaaaataaaatttgtaaatttataaataatatcataaatatataatttataaatttatttacaatattaaaaaaggttcataatataagcttgttatccattaaattttgtaaataatatttagactaaataaaaaagtgttacaattataatttgtataaaattttgtatttcctaaatatttttaaaatttataatgttatgcgtaatttttcccacatgattttatttgtatgtgtgtgttttgaacaaatttttgtgtgtttaattaattatctaatgaatatgtatcacacatttattcttattttttttgaaataaatattcaggagatctattaattaataaattcgttcaaaacaatagaacgcagttgagaggaacaatcctccaactgaagcacacaatctgtagagaaacaagagtctcttgccaagcaatgagccaacttgtttgcagatcgtttaacaaaacataactcaataaaagataaagccaaaagtaaattcctaacatcttgaacaataagaccaaactgtgaggacataaaaacattactttggactgcttggacac

SEQ ID NO: 311420 - DNA, 1049 bp, Cannabis indica
cgccaaattttcaaagcgaacacaactgttgcaagctttaagtcataagttggataacgctgttcgtaatcttttagttttcgtgaggcataagctatgactttatctgcttgcattaacatacaacccaaaccttgtttagatgcatcacaatataccacaaacttatcctgatcagtcgataaggctaaaattagagctgtgatcaactgttgtttcaactcctagaagctattctcacacttgtctgaccacacaaatcactgattctttctggtcagcttagttaatgacgttgcaatcttgaagaatccttctacgaaacgtcaaaagtagcctgctaaactgaggaaacttcgtacctcagtaactatttttggtctagtccagttttttaccgctcaatcttccccgagtctaccataatgtcgtctttttttgacaatatgtcctagattgacacctatgacagccagaactcacactttttgaacttttcattgagtttatgatctctgagccattgaagaaccatacaaaaatgctgctcatgttctgcttataaccgagagtacagaaagatatcatcgataaatacaatttcatagttattgagaaaatcctcgaataccctattcacgagacccataaaggttgttggagcattttgttgtgtaccgaaagtggtacattttacatttatcaactcgcaagtgcacggatctttattgtagtatggagattgggaagaacgaggtcgaactcatgggaattgcgtgagatcaaagaaaatacttatttaatctaaggtaatacaactctaacatagttaaaaatgacagtaaaatgacagtaacagatattttcagtaatatttggggatattattaaggattcagaatccactaagtgtatataaaaatatttatgtttatattgattctcataatttaaccagtaatcaaaccaattattttctaataaaaaatagattttccttcgctttaaaattataacttctaagtattaaatgtgaaacaatttaatgt

SEQ ID NO: 311421 - DNA, 1044 bp, Cannabis indica
ttttttttacaaaaatatggagtattgtttttctactgtttttgaagaaacgttgttttgacattgctgctacgagaaagcaacatgatttgtttttacaactatacaaaatgttgttttatcgatatttcagaacaatgttattttgatgttgctacgtgaaagtaatatttttctctgaagaaaacaagtgaaaacctataaaaatgtaaataaaaaattcgtaaaaatatatataaaaaaaactatttttaggggtactatgtaaatttttataattatcaggtactagtctaatagtgtctaggggtgtgcataaatcgatccaatctagtgagaactaaccaatctaattacaaccgactgtcaaatattggatatccaattgtgattggatcggattagattctttttttaaatatccaattggattggatcggatggtggatggagtgtctaaaaatctaatatatccaagatccaatcaaattaattagtattttcatttagtttggatgagtaattaaattttatattgttatacgtaaactctatatgtatatatgaaaattatcattaaaattttgctctttttttcttagagtggatggatccagtctaatgcaatacatactgcaccgaaaatattggatggattctatccgatcaaaaaaatactgggtcaaaaatattgtataaattcaaattaaatcaataaatatatatgaaatacatctattggatagaaccgatccaattcaacatttaatggatgttggatcgattggatgactaaaattaattgaattgaattggatgataaaatctagggaaatttacatctcaacacgtttttgttaaattaatgccaatattaacgtcaatttttaaattattgatattaatgtattgtattaccgtttttttatataattaatatattggcacatgcttaacataatcaattttcacatgtctaacatgttttgggatgcgtgcacccatttttcaatttttttgtctttttggtttgaatcctaaata

SEQ ID NO: 311422 - DNA, 1218 bp, Cannabis indica
aataggaaaaggaatacaataaatgattaaagaaaactcaatcgtagatgtacaaagaattctcataaaccaagaattctgttatataggcacactttatatagaatagatatactagtgtcaaaacgtgctggaggcacgtaacttccgtcaaaatatataggttaattttatttttatcaattacatataaataaggacaatatacaaattcttcttaaaaataaacgtatcatctatcatgctatttaaatataagcccataatttttttctaccactatgtactaataaaacaacatcaaaatattagtataatttgtaaagtcatgtttggtttgatgtaatgaagattgtaatgaaatcaaaattactattataattttcaattttcttttaaaagtgatgtaatgtgataataatataatgatgattacattgtgcaatagtatctttataagattggagaaactatgtaatgtgaattacattacaaatattaaataaagtaaaagtaaaatgaatcaaataccctttctatataagaataaaaattaatgtagtgatatttttgtgaatttgtcacttattctaatatttatttcaacaagaaataaatatcgtaatcattttttattatcattcttatttcattacattactattactattctaccaaattaaacatcacctaagctcgtataattttatacactattgcagctgatattgaaagaaaatcgtaaagatcatagataaattaatccttaacagactcgaagcagttcatcatcaccaattatgtttatattggatacaagctgctgtcttcaagtgctaatcatgtaaaatggaccagacaagtatggtgttgtaaagcctgtatttgaaaatttgctaattttaattaaaacttatcttgttatatttaaaaacttataggttgggatcctgagtttaaaacaacgactgaaaacacatattttacatatatagttacatattattttttttacaaacaacatgcaacaacaaaatgactgagaccctccaagttgtactgccgcaatatgtataatctttgtcgagctccaatgctcctccaacttagccttacccttacctacacaaggtagcaaactgatgagtcaactgattcagtaagatatgcataacatttgtataagcaatgtgataccagcttaatgcctaagccgtc

SEQ ID NO: 311423 - DNA, 972 bp, Cannabis indica
ttcactatatgacataaaaacgcattcagaattcaaatataacaacataaatgattatttaaatatctataaataattttcataattaaatcttaattaactgctaatttccaaattaaactaagcggtctttacaccataagtcttgtacaatgagcaactagctttcctctcgcaacaaccattgaccttttatagagtttccaattcttattaccaaagtagttttcatacccttgctcatctaaggcatttatagagatcaaattaatgtgaaaatatgaaacatgccttacattctttaatgtcaaatgacagtcgacattcacttgaatacttacatctccatttccaataattttggagcatgcagaattacccatgttcacattccaaagtcactagcttcgtatgtagtaaacatctctctattgagagtgatgtggaaagaatctcccgaatctaccacccactcaaccatattgtctccaacataaaaacattcatcaacaattattatcgccagatcttttttatagtggcgcttgtagctgtgttattgtcgctattatttttcttcttgctagcctcatgcatttctcgattcaaaatcctatcatttttcttaatgtggcctggcttgcaacagtgaaagcagccatcaattttccatttggattttgatttgtctctagacttgtcatttctattcctgcctttgttatgacttctccctttattttcataaataagggcttgcgacccacacctctcgccttgttttgcatttcaaatgaaatcaaggcctctgtaatgacttcatactccaacttgtccttcccataagtaagagttgtgataaggtgatcatatgatgaagtgttgccattatcaacatagtcttttcctcataactaaacttcactgcaaaccttatgaattgagaaatcatgccattaaaattactcaaat

SEQ ID NO: 311424 - DNA, 2033 bp, Cannabis indica
cattcataggcaaatgtatgagattgccttctctattagcagagaattagcttgcatgactcttatttgctacatttgctgtgtccatttccttaaactaaagtttatttttctaagtataaatataatataataacaaagtaaaggattggactaaattattttatattcatgtttgttttcttagaaaagaggggaaaaaaacaggaataaaggaagttcttactgttgtttaatactaactgtcagctatatatatcatccgatatataaaccagtcccgtcttatgataccgaaaaaaaaagggttaatttatgctccttatttatttttattgttttttttaaaagagaaagagaccacttatcttagactgaccttcccccgatatatattgaaatcctcacttatggtagaggaaaaaccatggtaaacagatcatggaaacataaaattaatcaaaacaaatttgtaacaacacaccccaatccttacataagtctagaaaagagaaatcctcaaagtatttagttttgaatatccaggtagttgtcaagaatttgattctttcccgaacatcctctgctgacctttccagacctttaaaaattctgctattttatttttattgtttatctttggttggtgcagttgaagaaaaaattatttatcaagaccggttcttttacaagttattagtaaccgaaaacaaaactcacttatgaaaacttttcctggtggaataagttgcgactttgtgcctctctggtgcctttcgacacgtcctgaagctctttataagctcagagatgccggcaaattctgacctgccctttgttttcggaaggtataaaaattattttacacttctctattaggcggaaaacgaccacagagatgtatcatgtatggaacagttttgtagcaagttttgttttcgatttggtcattctttttagcaattcttttgtaccttacaaactagtttttgggttactgagagtctgaggtcacagttttgttcatttatacaggcttgtgatatgaacaataagttttgttctcaacaaaaagggagaaaagaatttcatttatttactttattacatgtgaataatggtaggttataattaacttgtactggtattacaaaaaaaaaaaatagtacaagacattattgaaaattgggtatttgatgctatgttcttggtttatattaaaataccaaatatatataacactaaatccatagtatttctctagatagagagagaaagagagaccttgcttagaaggttgttaacttgcaaattttacttcctattaaaaaaaaatgtattaagagagaataagcatcttgtttgatcacctcaaatgacacatgatgaaatgtttgctttcaaaagttaaaaactcatgatgaatactatatttggtcaatactaataggagtcccatgttttgtacaagaaaaaccaagtaataaaatagaaacaaaaacattcgaagaagtgtttttcaatgcaaccaaagacaaccctatcaaagccttggcatgagagtcaagtcattaaagcttagaagtacacaaatcaaaccccttttactcaacactatcatgcacataggtataagtacttgctataatttccatcaataaacacaactgagtcccataacatcatttctttgcaacaaaaacttctctaagcttttgttcatatcaatatggcttcttctggtaacaatgacctcaagttccctgtttttcctcttccaccacccaccaactatcctccattaccattccctccaaatgttgctccgccccacgctcccgttaaacctcagccttcaccattcccaactccgattacaccacaacctcgtcccccaatcacaccaccgtcaccaactgtgaagccaccaccccgtcccccaaaaacaccaccatcaccatcagtcaaaccaccacctcgtccaccaatcacaccaccatcaccatcagtcaaaccaccacctcgtccaccaa

SEQ ID NO: 311425 - DNA, 663 bp, Cannabis indica
tttttaattttttttaaattaacccttttatatataaagatagacttagatcttatagttataagagatgatatttgctagaattatatatacaagttaaattttgagcaaaatctcaattagccacacaataaaccgcaaattataaaatttaaaaataaaaggaaaattacaattgaaaaataaaataaagagtctaatacattgatgtatgtagttatcaatactccaagcaaaatgggtctccttcggggatttaataactgtattagaatctctttatatcatcacaaaatggtgcttcaaaaaaactgtcgtctctagggttagaaaacaagttgcaactttgccaataaggggatcagtgaagtaacatgttgatagtaacccacaacaccgttctcaagtgatttctagccaacactgccacacacattgccccaatccccactttaacatcacaattagtcttgatccaatcttcttaggatggagaccaaaggagagatccaacagctgaaggatatggaaacaaacatgagttataatctgcataacaatgagtgatatattcaattttactgtttgatgctactcaaataattattatgtaccttatcatatactggtcagccatatcgtatccaccataatcgaagcata

SEQ ID NO: 311426 - DNA, 2233 bp, Cannabis indica
tttatacggactatcctatgtgacatctcgggaaatcggggtgttacactaagtctaagtccaacttgactgacctacatttagactagggggaaaatggggtaccaaaccattgcaagtcagccaactagacaaaagttcatattacaatcttaaaaacataaaacatccaacaaataattaactcaagacagacgtggggcacaaagttagtcatccgctggaagatcgttcgtagtcatcccttcaaatgagttagccagttggctagttcaagcttcttcctcggccctcatctgtagtaattcttcatatccagcaatgtacttaggtatgtcccaagacttggccttgttgtctcgatactccatcgccattttccacaacactagatctcagcctctagtccaatgccaatcaatcgaccttccaacatatccatacaagcttgggcagtagcaagttcagccaaggtagacttcaaacgattagaatctttctccttagcctcgagctgagtttgcaactctcccttgacacgatcaagctctttttagcagccatttagctccttaatctctccgcataaatcatcatgctcatacctcataactttcatttgatccttcatgttcttgatcttatccaaagcgtacataagcccttgcataccctaccatacaatatagagtaccataatgatcatacacaataatattgtaagtttatccatacataaccataacatagaatttcatgcaaacttgaaaggagcgagagatggacaccgcaatagaagctatttccctgatcctctcaaatcgagctcgatcctttgggaataatagcttattggcctcaccaaagtgtaggctaaactcagaatacgcggccactgaagatgggaaagtgagatcaactatattactcaactagttgatcgactcaacctgagatggtcttttgttattatgcttctgagctctcacaaaaggacaagaaggagcatccgtattaacaacctcattctcagcactagcagttggcctagtcttctgtctgcatgagtataaatggtccatagcaccatcactagccagaggaagagtgaaagaaaattgggccatgaatcagtttcaaaatctcatttgtctgaagtcaattcaggcagaaatagaggtcacacccaaaaatctcaaaacttctttggattatagcaacttgagacttagcacattcttaggaggagatatacctttaggttgatgtggaacgtggccccacaaagtgttgtctcgaagagaagaatcagacactaaaaccatccaatgcgctcctccttcaaaatttgaagaacttgatcaactctccctggtgcttgaccacacacccaactaaacggaaggtcaatcctccctacaaagaagacaaatcaactagataaatgtgtatcaataaactataataaataagggcataattcactatcaaaactataaatgggggaatcccatgatcaactggtaatcctagcacatcaaagggaacaaagaaaaaatcctccttccatcgcttagcctctttaacaccaagaattagatggtcactacctgttctaatagtaagttgatacctacccttatcatgtggatgttctttcaagtagtagacgtgcaagacttcaacaaccgtaaatgtaatattatgcttttcaatcaacacttgtatagccataagagcacgccaagaattgggcattagctgactggagttcaaacattaacctagagagagaaaatctaaaaacatacttgaatggaagctcatacaaacacgtccaacccagtatcttccagtcagtttgtttcctgctagacaaggcgtacaaactaatgtgtgggaatattgtaacgacgatgaatttttaacaagacgttcaaggttattactgacgtagaattaatacacaagagcatatcacctgactcactatcacttataggacgatcaatgtctactctaacctcatatccataataatggacatccatattctcacacttatcatccaatacaaaacttaccacacctgtaatggatgctttagtaatttggattagcaaaggcaattagcactaatttctgctatttttataattatttatgaatttaattatcagtggatcccattattagaaatgggaattagagttataatttctcaattccggag

SEQ ID NO: 311427 - DNA, 2174 bp, Cannabis indica
aaaaaaaaagacatatatataatataattatataatatatatacataaaaaataaaaaatgataattgggttttgggttttgaaaaatattaaacccgaacctgacttgatacagaaccgtgttacacccaagcctggtgtactaaaattaaaatccatttttttaggtttttaaggtttcgggctaggtgggtttgccgagtgggtagtttttttgggtgtaaatgtgcacccctacttcaaggtcaccatgtttgagtgactttattctttgtcatggtcgagtgacttcaaggtcactatggctgagtgacttttcttcttgccaaggccgagtgacttcaaggtcaccatggccgagtaaattcattcttagtcatgaccgagtgacttcaaggtcaccatggccgagtgaattcattcttagttgtggtcgagtgacttcaacgtcattatggccaagtgacttttcttcttgctaaggccgagtgacttcaaggtcaccatggccgagtgacttcattcttactcatggccgagtgacttcaaggtcactatgtccgagtgactttcttcttgccaaggtcgagtgacttcaagatcaaaattgtcgagtgacttcattcttgttcatggtcgagtgacttttcttcttgtcaagggcgattgacctagagttaagcatggctgagtgatcctcttccttagcttggtcaagtgacatctcaagcgcatggtcaagtgacatctcaagggtcatggtcgagtagtcttttgtcaaccctggccaagtgatcaccttagctagagtttggtcgagtgatcccgggccatatgcatcaacttggtcattccttgattgacttttaaagttgatgtctcttgcttccccagactaattattgactaatttgggaattgttatccaaatttttgaactttgacgtggcatcacatgatggtgacacgtggaatcaactttatgaacctgctcgcaagagatatgccgaacagagcaccacatatactcgctcggacgaagccttcttagccgagaagtgaaaattctgaacagcacgtcaatacatagcaatttcagcttttgcattgtgagtcgccgaagaaatccctataatttttggatcaaatcacagagatatggcaagctgtccgaatcccttgattagtgtattctgtatttaatatgcaatctttctgattatatcaattgtaatcagaagggaaattcttccctcccaagcttatagccatataaatagtgattcatactcactgggcaaaaggtcaaaaaacttattaagaatttatattcagagataacatgtaagagctctaagaaaagggattatattccttgttcttaagtcaatacaaaccaagaggattaggctattaccgaactgctagaggctgaacctttataaaattctcgtgtctttatttacttcattatattacatatacataatactacttgtcgcttacaatctaggctcattgtcattggccaaaagcgaggtcaacatagagctgaactcaaggattactttttatatcaaatctagtcataaacacaatggtggtacagactcgtagaggcgtggttgatccggcgaatccacagaccgtggatcctacactgcagaacccagggaacacaagggttccaccaaccacgaatctcgaaaaaccatcaactgtaggtcacggtgtgacgactcctgtgagtaaaatcgcgcctggtgtgcaagagtctgggaataccagttcagcatctaataagggcattcctaacaccgtcgttctgcccgtaaccaatgtttgaacaaacattggagacaacaccaaaatccaaaacctttgtgctactcttagagtcatgcaagctcataccaacaccctgtatcatgatcaggaggaactccgtgccgcggttacatttgaagagcagaggcgcatgttcgctgagtggagagataaagaaatggaaaagttgagggaatagcaagcagccattgacgaccaaacccggaaggccaccgtgttgatacgaaaaagcctatcaggctaccggaaaatagcctgtaatcgtcattcccttgggcgagacaaacgaagatccaccagtgaacaccttgttggaaattatttta

SEQ ID NO: 311428 - DNA, 759 bp, Cannabis indica
aaaattgttaacatcacgctacaatctgattcgctagaaagaattagaacggcctaacaaagcgattctgaactacaggagcataaaggagaagttagaaacaggatcggcaaaaaacttttctctttcatcttatgggttactacgatataagagtaggatttgtgtactgtccgacaaaaatagtagacaagagattcttgatgagtctcataccacaccatactccttacacccggggacaactaaaatgtatcatgatgtgaaggctctgtactggtggccagatatgaagaatgacattattgagtacgtattcagatgtttaacttgtcagcaaatcaaggcagagcaccagagaccaacgggtttgctttagcctttcaagattcccaagtggaagtgggaagatatcaccatggattttgtggtgagacttccaagagcgataggatactatgattctatttgggtgattgtggatcgatatacgaagtctgcacactttttaccagtgtggacaacatatacagtggattagtatgctgatttatatatcaaggagatagttaggcttcatggtgccccaaagtcgatagttttagatcgagatccaaagtttaggtctaagttctgggaaagcttacaacgagcaatgggtaccaagttaaagttcagtacaacttttcatcctcaaactgatggtcaatctgagagaactattcagatacttgatgatatgctgagaacgtgtgtaat

SEQ ID NO: 311429 - DNA, 1180 bp, Cannabis indica
agagagagagaacattgtaagcacttgaaaattaaaggattatcaatcgtaccgatgatttggaatccatgattgtaaactgttgatcttgaagcttcaatagagaaattgagccatttctaaggcgagctcgaaagaggaagtacccaacaacattttgcggaacctctataaatttagtgttatctctctattattttttttattgctttatatgtttgtgtgtatggatttaggggtctgattttaatctgggaaaggggataaggcttgatcttgggtagatatcagtcttcgagtttcttgagaaaaaacacgaagctttgttagggtttgattcaattaggccaaggatgaagtgtttgggggattcgagagagttctgagaattttgtgttaggatcaaaacgacagtgttttgattgagtcaacttgtgtttgactcagggtaaaatgtctattttgaccttagttaaaagcttgattatattttgttgtgtgtaggttaaattggtaaattcctacaactgtgaacataaatctttttttaggggtaaccttaagaaaggttattatctagtcatcttaagaaaaaataatttatggcataaatatttaaatttaactatcggatgtagataaatacttaaatttaatttttgacgataataatacctaagttatatattttgggaacttctaaagtacctgaacgttaagtatcaagttattatctacgtgtcattttcttattggtatatatatttaaatcaatttttaaataaaaaataaaaaatttaatgacatgaattaataaaggattgtcatgttataatttacttgagatttaacaatcaggtacttacattagtttcagaattatagcttacatattattaccgctaaaaattaaacttaaatatttacttacaaccaataattaaacttaagtatttataccataattaacactagaggtgctcatcaaactgctcgcacagcaaaaaaatgcggtttgaaattctttgtggtgcagtcgcagtttgaatttttcttaaatcacgcggtgcggtgcggtttgcgattttgaattgttaatatgcggttcaaaccgcaccgcacattataaaaatattattttttatatttatttaggtccaatatgtgaatgtccaaccca

SEQ ID NO: 311430 - DNA, 1796 bp, Cannabis indica
aaaattataattggcccattaaattatagtacaccattattgaaccacttcaacccaattagtatataaccccttagggtatgagatatatatatatatatgtcttaagtgaagaggtttagggttaatggtaataagttgaaagaggggatagctccacgtagtgttctctctaatattactttgagtttgtatttgtcctcattttggagattcttggatgctctaacatggctcacatggatggatcatcaatgggaggtatgcgtgtttattttattttgtgatgctctaaataaaatatagatcttggttaatgattatgagtaaggacgattagtatttaatatgtgtgtttggatagctcataatctatgaaaatttaacaattagtattaagagctaacatatttaattttagtgctccataatatttcaacttaacccttttttttttgtttttcaaatctgaattttcttttcggattaatgtgtttgaagttgtgtaaatatgagatttattattttaaatgggttcatatatattttggatgactatttttttatattttccattgatgcatatcatatttggaggagttgaacaatggaggaaactcattttcggatttgtatttaatgggtaatgttttttgtgaaaatagatgaaatggaggttggaaattgatagagggttgaaaatggaacaaaacccctcaaatggcatcgagtttggtggccggagatggtctattcgactaggtcacgaggcgggtcgcgatccaggttgtagacctgcagacctgtgtgtgggtttttgggtgatagggacgatacaaaacgacttgtcatttcgcctctgtcgggcaaacaacatgtcgtttggtccaatgctgaagcccccttagccgcaaacgacgggttgtattctgacccaaattttggacgtcgttcggccgaacgacatgtggtttcttgaaaacgataagtcgtacggtcaatagaaaaatgtcaggcgcttgggggcgtgtgcatagcccattttgggcccttttttttttaccattttgttccatttttaattttctatcatttatttgtatgcacaatactaattcatgaattttattcatatttttggttattaattttagtattgtggcataaattttttgtgatttttcttaacaattagtgcttattttcttacctatcgtaagattaagtatgtaaaattatttagtaatgaggaacatttgaatattgtatattcctccaaaataacattaagatcctaataagtaattgattatcctatggataataattgcttgctaaggatgctcaatatggtgaagaaaatttattagatattatgaatcacaatttttctatcctttgatagtaaattaatgtatttgattataatatttaatagatcgttcttacctgtgtatgagttctattttatttaatttgtctaagaactctagcatacatgataatcatttgttattttacgataaaataaatgagaaaaaagagcacaaatgacatgattttgttataacatgcatttaattgttatttctcttttttctcattaaactttaagcattccaagaacctctgccatgttgacactaaatggaacaaaccacaaacagtgggtagaatctctcatcttgaaattgactcttatgagagtggatttggccttgagaatggatgcatcgcctaaacttgttgatgatgccactgaaaaggataagaaatcctatgaggattgggagcat

SEQ ID NO: 311431 - DNA, 1671 bp, Cannabis indica
tgttttagtttaaatttgtgtttaatattgtaatagattttaatttgtttctgttaaaatagaatgtaataataattaaatattattttttatgaatattccggtcacccgcttcaagccccaattgcttagatcgttgatgccaaaaaacctccttctcagtaaggatttcattcaaatcttcctcagcctttttataccgaatcaaagagtcagaatcacgggccctttttaatctttgtatctcctttttacaatcattaataggttgttcaaaatttccagtaaagtcttttccccaagccaataaattggtcccagaggtcttaattttgtccaccaccgaacagttaagaccgaatctcagctttctttaacgatttgtcgacacattggctcagccaagcattctcgaagcgaaaatgacgaatcggctgggcaatattatgaaacatagtttccagcaacaaaagactatgatccgacatggacacttcaagattaaataattgagctgaattaaaaagatgtgtccaagaatgactaaccaaagcacaatcaagtctaacttctacccagttattgcttcctcggcctctctcccaagtgtatggataacccatccaatccatatcatgaagattagactcatctagagctaactgaaagccgtccaatagccattgagggtacggggagcctcctttttatctgaatgtgatagagtattattgagatcaccaataacacaccatggaacagaatactctaatgagagtgttcgtaatagatttcaagttttgtaccgaagcgactgattgggttcaccgtatacacctgtaagacgtcatacaccaacaccatccgacccgatttttatatcaatatgacacacaaaataacccaaaaaaaaaaacatcttctttatgcctccaaaatatagcaacaccaccactatgtccccttgcatccacggaaaatgcaccatcaatacttaaagcaacacacaacctctccactacatccttacgagcaaaagtttcacagagaaatacataattgggcttcttttggaccacaaggtctgttaggaattgaagagtctttgggtgcccaagcccacgacaattccaactcaaaatactcataatgagcggtgggcctaggaactagaacacaccaatgatccattttttgagcccatatttgttttaatattttcaccagaaacatcctcagaataatcacatcatatcctcatcaatattagtagactcagacccacttgtagagactcttctacgtttactatccaaaatggcaattccttcctcatttatatcatagtcttcctgaccatttaaatccaccacattacttcccaaaataccagcgggctcctcagtgatcatcataaatgccatattaggaaggtcaacttgttaggctatttttagcctaagttttgtgtcacattttatagttgtttttcttctttattattgtttttggaatagaattctgcttgttttctttgtttcaggtttctacacttggaatgtagaaattggacaaatttcggaaaatagtgatctataaaatagagaaatttttgaaataaaataaagctgaagctttaagcctaaattcgactatgttctgatcatattt

SEQ ID NO: 311432 - DNA, 530 bp, Cannabis indica
tgtgaagaaatcctagttagattttcattacttcttgtcttttttcttttattctttttagacaactattactgtagatgtaatggtacaatgtatctattaaattgttattataatgcatacgataaacattagcccctaatcttttgcattagtttcttagtaaaaccgccaatttcttaaggtagctctgggtagatgcataaagaagaaataattttgatgcattgaatatggtggcatgttggccaagtggggggaggacaattgtaggagttattttttaatgaggaaaaaaatgtagtagggagtatcaaacacataactttttagtagggaaattttattttgtatgctgacatatcttatatcaaaatttacatccctaactaatttatattaaataacttttttgtatgctgacaaaatatcttatatcaaatttacattcccaattaatttatataaaataattttttgcttatatatttttctcattttatcttgcctaattaaaaaaaaaaaaaaaa

SEQ ID NO: 311433 - DNA, 3522 bp, Cannabis indica
ctctctctctctctctctctctctctctctctctctctctctctctctctcttcaatcggactgaaactgaaggccacaccactcagtagctgcctctcttctttcttctctctctctctctctctctctctctctctctctctctcgttcaagcttagaagccagccaagttgggaggaacctagctgaaatccatccctcttccttgctgaaccattccttagagcaccatagaaatttgaggtaagttcttgttgtgttttcctttgatttcttaaggttttaagttagttttggttagggttttgaatttccaaggggctgtaacgtatattgatgatggaatatgattgtagctagggtagtttttgaggttatttaaacttgtaatagttagatataggggctggtttggattgaatgtgttgaatgaaacaaaaaagttaaatttctttcacttgaacatgtgattttgagttaaagattgagttgtgttttaaagcttgggatatgttgtattatggttattatactgttttggaaagtttgagcaagtttggtgagggtttgatgagtttttggggtggaaaaccaaagttccccatggctgcccaaaaaaccggtcgaccggttttccaggcaactggcaaactggtagaccagtttggccagcagggggaaatctcgggttttctcctcaagcttgattttggttcggggtatttttcaagagtgtaattcagagtaatttaagaatgtttaagttagtttggtcaggcggtactagagtttgtccggttttgagaattagggttttagtcctgaatttcaatttaaggtattcattgggctttagttatcgtgacataggaccggaattacctagcttgcttttccatttaggtcggccctcttgagttcttaattattgtaagaaaagtgggaagcaccatatgtggctaagtgttgacaattgaatgattatatcttgattattatcaagattatgattaaaagtatgttgatccaaggttatgacctaaggattgggaacgattattactgttacgagtaattagtccttaaactgcagataggtttcttacttatcgtttgctttatcatgcaacaatagtgacatattcagctggtgattaacgagtggtaaaggggtactttataaagtaccagagttatgtctataatattgtataaatgtgtatgcaaattactttgagattgaattgctgaataacactgattgaattgcttaatattattcgttattattttattcacatttcttgcttagtctctgtgactcacgggtgctttatggtccaggtaaggggaaagcaaaggttgagcaaccatgagttcgaggtcgtagcagcaatgtacatatcagccgcagtggcatggcccagtgaaaatgatgctctgtcttgattttattttgggattgcaaaatttatgttgtaaaagcactaataaactagtttgtaatattttaaaaacaagggtaccccgtagttctcattacctaccctttactataaagaagtttttatatgcttgattttaattttcaaaaatttaattacccacacttttggtataattatatagtatttaaatagaaaaaaaattatataaaacacacacacgtggcgtccctgttggagaaggcgttacatttatgtttttcaatgaatatttttcctttgttttgatacttatctgtgcaactgttatgttattttctgagcttgttatttacttttaccaatgctttgtacgggtatagtttctcccaagtgactgagtagacttttgactctttgtcgcttacatttcacaagtatgattttcatctgttcagctctttggattccagcagaccgttgtacacatttaatagtaaatttataacttgctaatagaatcgacacaatcagaatttaaatagacatctttattcattcattggtcggaatatttttgttactgtaggaacttacgttcgtgaaagccattaaatgatctaatccgatctttcgctaaatttaaacaaaacaaatttcacttaaaaagaaattgtactttcaaatgtggtcatccgacctgagtacttaatcatttgatcagaaccgttggcgggatcctcctaaaaggccatttacttaaaagtaaatgttcgtttgttttgtacttaaactggtcatccaacctggtacttttacagataatactttcttaaatgttcatcattccaatacctttgtactagaacgagtttcatatttttgtcatactgcccatttttgtatgctcctaattctagaacttcgactcccgatatggtcctttccagtttggtctgagcacacaagttgtgctatcttttctgtttagaaatactctaccgaggaccatatctcccacaaaacattttcgtaccttcacttgcttgttgaagtaccgagccaccttttggttatgggctactaactttaggtttgctgaggctcatttttcttcaatttcgtcaagtgagtatgctaggagggcatgattagcttcttgatcataggtcaacctcctgtgggatggaggttctagttctacgggcaacatagcttcatagccataggccattgcgaatggagtctgtccagttgctatttttttcagttatgcagtatgcccatagtacttcaggtagttcctccggccagttccgcttagcttcttcaagtaattttttcaaagtgtcttattgagttctttgacttgaacatttcattgagagtgtgccaccgcagagaaactttttataacttcatggtttgtgtagaaatctgtgaacaattggctgtcaaactttttgccattgtctgagactattttgtgtgggagtctgaactgacatattatattttttaccacgaagtccaatactttcttagatgtaattgttgcctatggctcggcttgtgtccactttataaaataatcaactatgaccattgcatattgtactccacctttacctttaggcaattatctgattaggtcaattccttaaatagcaaaagaacaagaactttacatttgagttagctcactaaaacaagaactatgtagaaccaacaatagagatcgaatatccttataataaagctcattatttaaagtgtattttcatctaatatttattttaaaataaatatttatttattaaaattatcaatttagaaaactctaaatataaattttaatttaacatttacaaaattatacttagatagatctgaaaataaataatattatttttcatcttagtaataattctcaataaatattttgaaaattacttaatttaagttggtccaaaattaattaaaatcaattttccacgcaaatttaattttctataaatatatatagcaaaacttgaaatataatgtatttaaaataaatacattttttaaatttattataaaataaaataaatccta

SEQ ID NO: 311434 - DNA, 1434 bp, Cannabis indica
aagaatatcagtgtgataaggatttggatgattttattaatcaaataattaaataaatgatcacatgaaccagataacacattaaactagtaatgaaattaaatttgtttctttattgataattgaataaaagaaattacattaaagtaaagttttatttagggcacaaagcccaacactatatcctcttacgtctgtagttgtgggagcccagggcccatcagttggtgtggatggagcccttgctgttgagggggtctgtcctggtgatggacaagtccatgacatggatgacgatatgcctatgtcctggatagctcggggtctagagaagagagagagagggccctccgtcagtgctttgctcgcggaggtaaagttagggatactactctttggattaggcctggaggccagagctttactgggcctactcgccccttgcctgcatctagaggtaagggcaagatggctatttaggactcagatgattcctcttttcttgcatttaatatttgtaacttgtattctaactttgctactttctttttgcggttatgtcttccaggttgaggggtcttgctagtggaccttcagaggagccttcaggtcgtttgagggccaaggtggctcaaaccacccgtgccagagatgctagtgggtcatctattcctcctactcctcctcctccagggcctacaccaattgggcagcccatgatggatgaccttcttgcgaggagagaatgaccttctagcaggggcaccttgaggcctagtcggggagcaggctcagccacggggcagagagccatggaggctacctgtaggcttttggacaaagctttctttttgtggatgatgagcttcaggagcttggtgacaccgagccagagagcctctcttctactggccttcaggatttggtcgcggtgagttgcacacttaactttgctctttttttttggcattattataggctggttggccatagtgactgttgcattgagttgtttggccaatgatgtgtctttgaggggttggtcagccttggcagctatgtggaagggccggccagccagctttgtcttttgacactgattttgaccttgttttatttttaggcctttatgaagctgagtttctagcatggtaactctagggggtctttgattgctctttgagagtagataaggacctagaggctgacctcttggcaaagtgcaaggctttggctgacatgaaggttgttggcttgtagaactggaacatgatttttggtttagaggccatgcttggcaccaaaaaccaggagaacaccatgcaagctactgatatttccaggttggagatggacctcactgttaggttttgtaccgtaaataaaacctattttaatataatcagatttactaattaatataagatcagaaat

SEQ ID NO: 311435 - DNA, 481 bp, Cannabis indica
taatatttacctattttttcttcattttttttttaagttttttgagagtatcatgttaatgtactaggaaaacatgattattcaactaagttcactttttacaataatctcacattgtttagaaagtataatgagacattacatacactataaataaatattttctcatagtattttaatttatcccaatatatgtactttttccttgactaattgattaaattagtcttattcaattaattagttataattttttttttaatttatcctaaaatatgtatttttctcattgactaattgattaaattaatttattcatttaattagttataattttttttaaaaaattatctattctataatctattacaataatgtgtggaaaggtaataaaatatatatgatgaatgagccgctccattgtcaattacttttgagatggaatcttatttatcttatcttaaattctaatatggtatca

SEQ ID NO: 311436 - DNA, 840 bp, Cannabis indica
ttaaacaacatacttgtgagtagatctaagatcctggtaaaataaattccaacaatttctcgaaccattttctttatttcccccttttatatctgcgcgtatcggtagggcctcacagaaatgggttcggtgcttggctttaaagtgatggcatgttcttgagaacagatcggaggtagacccggtggcatgtcaaagacatccttgtacttctccaggcgggttgcaataagtgctataggtggtggctgttcctccatggcagcagtggagatggcatttaattgcacccaatatccttcccctcctttttccactgtcaacatcattgccttaagtgaaattggggatttacacaagctaggatccccttgtaatgtcacccaagtacccgctgttttgaacttcattaccatggttttccaattcactttcatattcccaagtgtctctaaccacttaattcccaagattacatcagctcctcctaactccaagggaagaaaatccgtaatgacgcgcatagcgcccaaatccaactcaacttgcgcacaattaccctcagtccgcaccttcccgcctgtccctaataggatgccgtaacaagtggttgcagtgaggcaatcccactgcagccactacctccattgacacaaaattatgggtggcaccgctatggattagcaccgtcacagggtgtttcccaatatggccagcaagtttcattgcgtgggcggtggagatgccgattaaggaattaagcgacaaagttggtaagtataattctaaagtcagactatgtatgatttgtgaattttcactaagcaggggtgaaattgt

SEQ ID NO: 311437 - DNA, 1933 bp, Cannabis indica
gaaagccgaagcaattgtcgatagcagggagacaaactctaattaattcggtgctgcagaatctcgtgttatgcgatatcaaccatgagaattccggtgtccgtttgtgctgaaatggacagcattgttgctcgtttttggtggaagggatcagcgtttcaggggaatcgatacctagctctgaaaagctgggcggactgctgtcaacctaagaggaatggaggtcttggcttcagaagatttaaagacatgaacttcgcgttattggcaaagttggcatggcagatgctggatggagagagaagtactacaccatgggttcaaattctatctacaaagtactgctctattcaagacttctggtgtgttcaaggaaaacaatcggattcgagagtttggcggggcattctgagtacccgtgatttgtgtgtggaaaatgctagatttctggtgggaaatggcaaaattgacatctggtctaggccttgggttacggggatcaatcctttgaaggttcgcaatgccttttcctataatgtcactcatgctttttcgtctatgtcagaccttttcatacctgggacacaaaggtggaatgagaacctcattactaggtgtttttcgatggaagttgctgaagctatcttacgcatccgaccacttgctgggaaggaagacacactgttttggaggggcaatagccaaggcaacttctcggtcaagagtgcttattggaatgcgcagaattacagatttcacgaaaaaaaaaaagggtttggaaatgtctctggaatctaaggattcatgcaaggaaaaagactctgttttggaggatcttaagtggctgcctacccatcaaaaatcgtctgggggtggatactgaatactgatataagttgcggtttgtgtggggatgaagtcgaatatgatgtccacttgttcagggactgccattttgctcgtggcctgtggttctcttgcccgtggggtctttgcagcagtagccttgggaacttgaactttgaagattggttcttatggatgtttgatacaaggtgtgagttgctgatgttatatggtgcttgcatcatcaaacacatttggaattgccgaaatgatgtcatcttcaaaggagctaaagcgaatatggctgcctcagtaagagtcatccaacaacggttcaatgaatttcgaatggagctcctggatgctgatggacctgcggatactcctactgatgcttctcgtactgatttggagggaggctacaggattaggatggatgcctcggtctttgatggtctggctgggttatgtgccgttcaaattgatgcagggcccgatgaagcaatggtgttgctgcattatactgtagtagaaagtgtacttgaagctgaaatgctcgctattctcagcgctttgacttgggcaagggagaaggaaatcagatctgtcttcattgaatctgactctctaattgcagtaaaggccttaaactctaatgttctgccttatgcttggggttcatatccggcttttcatgaatgttgtgctttgtttcctttgtttctaaattgtgtgatttcgtttatcccttgtttggagaactctgtagcggatgctcttgcgagttatgctagagtgtctcgtgtgagtgcgaggtgtgtgctaagggaagtagccccctttgtggctactatgtgagtttgttttgctttcaataaaagaccttaattaacaaaaaaaaaaaaaatccataaaattaactcaaaatcattaaaaaaattacgttattagatgagctaaagtacgtcatatttagcttataccatgtttcatatttataactttagtcacagtcagtgacggacccagaaattttactttgtgggggctaatttatacataaaaaaatatttatagctacattata

SEQ ID NO: 311438 - DNA, 1476 bp, Cannabis indica
gccgtcaaattaatgttagtagttgagaataacaagttatctgcggctgaaaggattgttagtagtgcatttatacatatatttgcacaatgattgagtgctcaagatatattaaatgaaccagcgaaataattagcttctactgttgtgtcttcagagagattgatgaaactggatatattaaggttaactatgatgctataattttttttatctattttattttaatttttttgtcaaacgatctcgaaattaggtggatgattatttagttcgtttttctaattctactcgtcttcaataggagagatgtcccgattagattgtaggctattattttaactaattgttattaaaaaaattgcataaaaaatgttttaagtaaatataaagaaaatcttaaaaaaaaaagtacatataatttttttaagtaattagtaataataataatcaagaatcatatttttataacaatttttaagtttgagttattaattaatgattattttatttttttcatctttaaataattattttattttatttaaagttattttaaacaatttattttaactatactatctttattaataacataaatttcagtacgtactaaatagattatatatatatgtactaattgacatctactaaatttattatttttttaaaaaataaaataatttaacaaggagatgaaagtgaaatatgattctttttaataattttttttatctcgattctttttaataattttaatttttaaatttgtgattattttttttccttataatattattctttttttttttttgaggggacttataatattatcatttttttcgtattctatttattttataaattgattgtagtaatttggttattaattaccacatcaatttttaaaataaccacttataccaaaaaaagattgaacagaacaaaattaaaacagtagtacttcttgctctcttaaaaatcatgcatctatacacaagtgagaaagaataatagagttaaaaatgaaaaaagagactagtatcatgtgttatattaatcctagtttgaagctatttatgcttacataaagatgtattattcataataataagtacttgtcttgataattcaaataaaatgagacacaaaagtcaaaaattcacaatttttttgatattttgtgcaaagtagcattattttcaagttataacattaattatataaggatgtatgtagattcctttcattgtcatcccacaattccttctaaaatcttatctatttattttaatttgtatcatgtgtgaataaaaaaatatttaaaaattttgaactaattgacgtgacacattataatttcataataaacaaaataatatgtgaaaaagtatttattttgaagtaataagcaccatcaatgatagcaccaaaaagagaaccaagtaacaaaatgagtccaccttcgcaaatgaa

SEQ ID NO: 311439 - DNA, 2746 bp, Cannabis indica
agtctcccctttgcctttggctcgggaaaaattcaatccccaaagagcagagaagaaaagtggctgtgaagaaagatgcaaagaaaagaaagggcgggaaagatgaaaaaccgattgaactttctcagaatggagatttgacaatcgctcagaatgtggaagaggcgaaccctgcgagccggggtcgcctgcagcaatgaatgccttattgtggaatgttcaagggatggggaacccttgaacgatctgtactttgaagtccctagtgcagtgttggtgttcgaatttggttatcatagcggaatctagactcaataagatgcgagctgaaaatttgcgtctttgggttttgttggttgctttgttatggaggcgaaaggcaaaagtggaggtcttgttctgatgtggtcagataagataacttgcaatattctttcgttctcctccttccatattgattctttcattcggaaagaggaggatcaagggtggcggtttacaggtttctatggagacccggatccaagtaaacgatgcgattcttggacacttctcaagagagtcggtaggatgtatacgggaccttggctggttgggggagactttaatgagattctgaggaaaaaagagaaaaagggaggacaaccgaaaccgggatatctcatgaataatttcaggaaagctttaaatgagtcttatctttgggaagtggagtttgaaggcaacttgtacacttggtgcagtgggagacaagacaaccttatctttgagagattggatagagcttgtgggaattctgactggtttgatatgttccctgctgcaaaagtatttcatcttgaacgaatcaattccgatcattgtccgttattactcacttgtgctaaacaacacaactggatggagttaagggggttcgatggcactctcggtttcattttgaacatgcctgggcagaggaagaaacctgtgtggagttggttacgaaatcctggggggctggcactataagcaccacggctagggagctaaaagactaattggctaaatgcggagcagctcttaacaattggaataagtctcgcaagaaggaaatgaatatgaggataaaggaatttgaagataagattgccaccttatctaaacaaacagatcacacgggctggagtcaattgaaggaattggagcggacctacaatgtgtatttggacaaagaggagaaattttggaaacaaagaagtcgagctttatggctgaaggaaggggaccgaaatacaaagtttttccacaggaaagcgaattcaaggaagaagaagaattcgattacgggattgcttgatcaaaatgctcgatgggtttatggaaatagaatggtgggacgggtggcgtgtaactacttccaacaattgttcactgcccaaccggcttccgcagctgatttaaaagagtttcaaagcatggtgccaaacaaaatctcccgggaaatcaatgagtaccttattgctccttttacaaaggacgatgtgttacaagctatgagagatattcatccgcacaaagcccaggcaatgatggaatgccgggtctattttataggaaattttggccaatcattggagaagaagtcactacagtttgtttgggaattcttaatgaggggaagagtgttgaagctattaatgatacccttatttgtcttatccctaaactacctaagcctatccaaatgtcagaatttcgacccattagcttatgcaatgtgatctataagatagtagcgaagtgtttagcgggtcatatgaaacatagtcttcatcaagccatatctgaggttcaaagtgcgtttgtaggtggaaggctgatccaagacaatgctgtcatcgggtatgaaagcctccatagtatgaagatgagaagatttggtaatgggaagaaaatggccttaaagttagacatgtccaaagcatatgatcgtgttgagtggagcttccttatgactatgatgcgagggttgggatatgatgagatttggattgagaaaatcatgaggtgcgtaactagtgtctccttttcgatgttaatcaatggggaaagattgggaacttccatccatcccagggtcttcacgaaggtgattctttatccccatacctcttccttatttgttcggagggcctttcatgcctaattcaagaagccgagaaggctgggaaaataacaggggttcggtttggtaagaatgatgttaaagtgtctcatcttttctttggggacgatagttttgtattctttgaagggaaggagacagaatgtgagactatgacacagattttccagcggtatacaaggctatcgggacaaaaaataaatcttgagaagtcggaagttagtatgggcagcagtatatccaagcagttgggtcaacatcttgcgaatacacttggggttcggctggtccctaatcatgccatttatctggggctgccaagctacctaggaaggaaaaagaaagaggtttttgaggtcatcaaagataaagtttggaataaactcaaaggctggaaagcatcaatgttctcccaagcggggaaagaaattcttataaaagcggtgatccaggctcttcctagctatttcatgagttgctttcgtcttccatagaaattgatcaaaaatctccactctttggcagccaatttttggtgggagcacaaaggaaataaaaactccattggagcacttggga

SEQ ID NO: 311440 - DNA, 822 bp, Cannabis indica
catacatgatagtaaatagatcctggtaaaataatttccaacaggataatcatcataaagatttagattttgttaatttggcaattaaccaaccttcttgaggctgaggatctggtttctctttttctaatgcagatgacagatctacttttggtcctccttcctccactcccagaaggggtcgtggttcattgaacccctatgctgtcccacctagaacaaataatggccctggttcgacttctaatggtcgtggagctcctcctccctttactggtcaatctactccacacacctctacaagtggtgcgtctggatcgagaccaatttgccaactgtgttccaagcctggccacactgcagctcgatactatcaatgatgcaatatggactttccaggtgtgggagcagcaaatgtggaacacttctcagctaatatagccactgctgacactgttgcagacatttcttggtaccctgactcaggtgccacgagtcattgtacacctaatgacaacaatttcactcacaaagagccctatcttggacaagatcagattcatatgggagatggtgcaagcttgcaaattcaaaatgttggtaagacactatttactacacctttctcatcccaatctcttgttctaaaccatttacttcatgtaccaaaaataattaagaatttgattagtgtatcccagtttgcttctgacaacaatgcattctttgaattctatcctaaccattgttttgtcgaggaccaggattccaaggctgtgttgatggaaggacattgtaacaccctaactaacttaggcgtat

SEQ ID NO: 311441 - DNA, 967 bp, Cannabis indica
tatttattatatttattattattatttatattatattattattatattatattatactgtccattaattccagagtatataattacaaaaaaggcttattagtaggtaacaaaaatctgcgttaacactttggtgctttcattgagagccttgtaataaaaactcagaaaataccctccttgaaaataaattcaaatcatcaatccatggcagacgatactcctcgagacaaagagaatcatccaagagagacaacttaacgtcctggaaaagagcatcagaattctcacaggacaaatgcaactgagactccatgctttaggagaaatggtggagaatttgaacaaaccagggatgaaatcccagagagatgaagcgagaatgactatgatcccacaaggtatgttccatcagtggaattggaaaataggcaactttgacagtggctggctgagtcaaatcaaagaaacgtagaactggagcgtgaggcagcagccgcaagggctgcacgtggtgatgtccctccaaaccaacctgacatatcaactagacgaactcagggaagacccagaggctcaaggaccaaaagacatggggatgcccctagagggaataaccctagaaatcccacggatactcaggatgatcaatatgagaacacaagggatatcccgatggatgaagagaactcccaaaatccaggaaacactggaaatagagaaactcgacccaaagatttaggatcttcccatggaaatataaatcgtgggaatgtgttgtacccaaaagtgagtgttttaatatttatactcgcaagtgcacgaaccgtttcagaatatagtgttcatgtaagtgcaaggtcgaacccataggagttgactaacatcaaaagaacttttttaaacaaagcaaggatattctaacctagttccaaatattttatgggattttggtttggaaaaataaa

SEQ ID NO: 311442 - DNA, 1055 bp, Cannabis indica
tatgcataaataaattctcttttgttgtatgctgtaaggttgatgtattccaccatctaatcgaatcttattgaaacttcaagtgctcggactctcttcgacctccttgaagggtgtttgattccttatgaggcaagacttaaaaagatatcttttaaaagcttgtagaaccttctcccaaaggtagtactgttgttctccttttttaaagaacttgattgcagagtcaagaaatacaaaattcaaacacacagagagaaagtcaaacacgctcttttcttcagaacaaagaccctgttttctaaatatatgaaaacaatttaaagtgaataaaagagatactaaacctaggtgctaatcgtgtatttataatcaatacacaccttatagaaaattcatacatagtttgaacaagaccacaattcacaaaaaactttcctaaaaaaaagatcttcaatcatcatagggatttctgcttctgtacctacagaatcgtgagtagtaagtgcgactttccttttatagaaaagaaaagtcttacattagcacaagaaatctgatcaaactaattaagaaactcatataggatcagattaacacgattggaatatagaaattgatttattcataaaacttaccatttatgataaacttttcaaatatagaaaagctaatcactttttatactttatataacaaatacaactcaactaacattaaaaaagaacttatgaaatatatttcttaatgtaaagatgttaaaaaatagaattgacattttaaataaaaatttggacaaattagtttatattaatttaacatatttattttaattaaattcaaatgtataaatgatgattattaattcgttaaaattcaagtgataaaacaaatagatttcgtgtaatttgataattgttgattttaattaccataacggtgagtatttgtacaaattcaatccaaccaatattgtatacttttattattattattactactagtaaacatctcgcgcttcgcagcagatatataaaaatattttaaaattatat

SEQ ID NO: 311443 - DNA, 1274 bp, Cannabis indica
aaagagaatgatgtcatctacaagcattagatgagtaattattggcccattcctaggtatcttgaatctggtaattgccccttctcagatttcgccattatcagtctcgataggacattaattgccaatataaacaaagctggagacagcgggtctccttgtcgtagaccacacgacggctttatgtatccatgaaccgctccattgatgagcaagcccatcttatcaatttcaatgcatttcctaacccagtttatgaatggattactgaatgccaaactgccaaggactgaagagatgaacccccaatccatttcgccatatgctttttccatatccaattttatcaacatataacccttcttccctttcttttttatcatttagtgaacaatctcccttgccacagcagtgttctcggtaatgagccgacccttgacaaacgctgattgggcatggaatatgatggaaggtagaagtggcttcaaccacatagcaagaatcttagagatacatttgtatgctacattgcatagggcaataggtctatagtcattcacaccactaggacaatcctttttcggaattagcacaatatgtattattaatgtagcatggcagttccagatcggagaagaaatatcttaccatattaataagatgccttttagttgcatcccagtgttgagtatagaaccccattggcatcccatcagacccgatggccttgtcgtttcccatggatcgcaagctaccttcaatttgttcattagaggggatggagcttaagaatgtattgtcagtttctgtcacactaaccccttgtggccagttaaggtccgttatagaggaagaccgattacaagagaaagtgctattgaatttgtccacaaatagattggcaatggaagttgggtcccttacccattcattcttttcattttttatggcttgaataaaattctttctccttcagactacagtggaggccataaaaaatttggtgcatctatccccctccttgaacaggtgtaggctgtcttcgcagtcgttcccacgtaggcaccttaagacttaaaagcaccaaataataatgtttattggtttatatataaaaccttataccagtggtaccttatcctattctaccacactacgtacgacttcaaactagaattcattttaattagggcattgctattaggcaccagtagtgtctagcactttctcaacatgtcgtgttacaattggctagcgatactttctaaaagcta

SEQ ID NO: 311444 - DNA, 581 bp, Cannabis indica
tgggagtgaaaaactcaaataaatactcactatatattcacttgtgatacatgaagttgaaaatactaattgtgtggctagaatcttgtgaggatataatgttcatctttagatattatactgaacatatttggcttgataaatccttaagagtttttctagaatctccctaagtgaccatataaggaaaaaaataacttttaagataaagttttttaacttcgtttataagcctgagatatatatatattattttttttttttttgtatattcatatagtgttatatattattattgtaaatagctgtgatctcttattcttctactcatgtaatcttgatgctaatacatttatttttattttattgtattttgattatactcctggtatttcctcttgtaatgaaaaatctccaacaatgtaaaaagtcatttgtgatggcattgtttttagggctatttacaaaaatatgggaaaataaagataagttttgatatatatggcataaaaacttaattacactaaatatgacattttttaaaaaaacttaacaaatatgggaaaaagtcttgaggaatg

SEQ ID NO: 311445 - DNA, 753 bp, Cannabis indica
tttcattctacgtctccttaaacattcatgctcatcaacccaatggtactacatttagtacttagctaattctcattggttgatgaattgatgactctatttggaaatgagaataatatatacatatatatataatgtaatttagatatagtgtcaattatttacaagatactatgatacaatgataaagattgtacactatatactataatcttcactattcattattcactataataattaagtgtgtaatttagataaatggtcaaaattgtattctagtgtaaaatatcttcttattaattttaggtgtaaagttcacttatgagaatgtctcaatactaatttattattatttgaaatggacctaggatttatttgtttgtgattgtgtttcgataactacttaatttttttaaaatataaattataattatattttgttgaccgaggtttttggtaaccgattaaataatatgtagaaaaagctgtaagaagtttaatgaatgagatttttacgtggttggggtattaatgagtcttagtccacgagtctttattattaatgagagtatttattacagagaatgttcttggtgaacttttctcctattttctccctttgatttttcttagtgtgtttgtagggtatttatagtgtggttcgggggtgatccctaggaatgaatcacttgtctttctgtgcaggcttcatagcggcacatattcccagcatatacaaaataggaaata

SEQ ID NO: 311446 - DNA, 2216 bp, Cannabis indica
attttaatagacacactttatatagaatagatatataataattttcaatggtgacacattacttcaattgagaaaaaaaaagaagaagttttttaaaatataataatagaattgaaaaaaaagtttataattttatgaacaattaaaaaattgtgcaacagtaaaaatttagcatagtatattataaaaaatatacaatatttttaaaaataattacaccccacagtaaaataaaaaaaaattgaaattttaagtatagtgtaaaaacaaaaaaaaaaatgagatactattaattatttataaaagtagaaagaaataaaacagaataagttttagaaatataaaatttgtctaaatgtagatacataaatacaaaattgcatgccatgccaattgatatatatcagtaagagaaaataaaactttgacaactattattctcatcataacttcttttacataataataattgaaataataagtaaaaatattcacatgaaaaagcttggctgctgaacccacagtggagctaaataattggactttgtattctcaagtcgaaataaatgctcaatttccccactttccaaatggaatattccaatatctttatttctaaccccacatttatccaatttaccaaaatcgtcagcaaaatatacacaattacacttacacccctcaaactctgaagccttgatcgaaaacgacgacgaattatctgcaacgaacagagccctatctcccaagtccaaaaccttacgaaacgcactgtcgtttacgtccacctcgaacacccgaaactctgtcgtttcgtgtcgaccttcaccccaccattgccgattcccttgaacgacgagaagtgacccttccgagtccaccaagaacaacatttcgatgtcgtacgggttcacgaacggcgcttcccatttcggaaggttcagatgcaaaatcaaggaagccactggatcgggatgatcgagagttagggcaaaaactctgcggttgcgatcgacggcgtagaatcggccctcgaaaagagcaacatcgtgaaagaaagtgtgatccggtagggttgtgatcttcttccacgacgagtttcctgatctccacaaggacaatcgattatgagtcgatctttcgtgagaatcaattgtcacgaccattaagccctccgacgacgcgagagtcggtctcgacgacaacaagagcttctggatggtaaagatattccgatttgggagttgaacttttgatcgatctggcgctagaggatggaacagagttaggtcgttagtggtggaggccgccggcgtcattatccatcccagagaagagaaaatcggattgattcgataagtgtgagatggtggaagaaggttgtagagcttgttgtttgagaggctgcagatgattggggcgatttgtgagttggaatcggaatggattgttcgtcggagcagcatcagccatggaagacggtggtggtttgaattgttgaaattgaggttggtgagaacagctctgaaaggacgacaagcagaggctaaaacgacgtagttttcgagaggtaagcgattagctatggagattatgagatcttcatgaagtgaggtccagtcttgctctgctgctctactcatttcttgcatatcaagaattaaaacggagttatgttagggtttcataaatactattatactaaatacaaaaacttaaaccctacgaaatcttctatcaatattaataaatgcatacaatttctattggaaggagtgattcgtggaaatgcgatcaatgtattttcttttaataataattataattctttttatggaaaatttatgataaaaaatgtgctatttttttaatagaaaattgttattacacattatactaataattcattaaaacaaatagaataataataatgagcatcttattacaatgataaatttgtgatgtattaacatattttagatttttgtaaagaaaaaaaaggcttttttatatattaggcatttttagtagggctgttcatccgatcgattccgcatttttttgtcaaacaacatccaatccgcactaagtgcggatttcattttttggatcaaatccaatccgcacaatagctcaaatccaattcaatccgcaaaagtgcggattggatcggttactttggataagttactttttattattaaattatttaatat

SEQ ID NO: 311447 - DNA, 2282 bp, Cannabis indica
aaatttattctcaaatcatcagttgagttgtggaaaaaagttatgctacttgtttaataaattataaattttaaggtactatttatttgttaatattctaattataacgacaattatattataaaattaattcattatacttataaatgtataaaaatttataagaaaattttacaatgcactccctttaaatatatgtatattgatgcactcctatttattttagcatctaaaataattttttagtcaagttttttctcatggtcatgtacgttatagatatttaagagattctgcaaaattttaagaaatttagaaaaatttaacatcctaaaaatagggtttaagaagtgtgttgcacgcgtgactatttttacgcgtgtgaaatagattgtttgaatactactttctatatttgtaagttattctgaattttctaaagttttgtaaaatatcttaaataactataacttaaacgaatatgaaaagaaattagagtatttttttttttttggaatgccaaaatagataagaatgtatcagtgcactccttttaaggggtactttctagaatcacccaaacttatattatctaaaaaaaaacttatgtggttagttattattatttttcttctaaaatatgaatttatatgtattttttattttgcaaatgaattcttctcacatgtaataaataaaaatatgagtatataaaaactccaaaattattaaaatatcaaatatcaaataaatagataatatttttaaagaaattaaaaaattaaacatttaaatattgtcattagaacatgtatttttaagaggaaaaatatgttcataaaaaatgacatctcttgagtgaatatttgatgagtttcaaggtcaagtagagtataagctttcataccaaccgggtatccaatgagtgcacaagcccgagatctcaagaaaattttgtgccttgagctatccaaggtggaagcataggcaaggaaaccaaaggtaccgagatgatcataagagggtaacctgttatacaacaactcaaaagaagacctaaagttaagtaaaacatatggtgtgcaattcatcaagtatacaacagtatttataaagtaattccaatactcaagagataaatgtgactgaaaagcaagagaacgagcgacattcagtatatgttgatactttcattcaacaatagaattttgttgtggtctttctacacatgagtgataaggaagaatacctctagttgaaaaaaagaagacaagtttagttctttggcattgtcacatcgtatgcttttaataggaatagaaaattgatttagtatataagcataaaactgaggtatgatagtgttgacatcagatttatttttaagcatataaacccaggtaaatctagtgggatcatcaacaatagtaagaaaatatcgataaccttctacgctggttttgtgaaaaggaccctaaatatccaaataaattaagtcaaaagcagtaggagccatgttattagccgaattaaagggtagtcttttttgcttaactaaatgacatacatgacaagaaaacaaagatgagttaaaatcattaagacaaagaattttattcaaggatttagttttccgtaacaagggatatccaaggcataaatgccatttgtgtacatcattacaagatatactagtttgaacagaattacaagtagcaatattttcttgttgaagaaagaaaagttatccaacgcgattagcaatcccaatctatagattccaactcgtgtcctaaatagaacaactagaatgtgagaataatacaaaatattttggatctttaacaatagaattaactgacaagaggtgaaactgaaaatcaggtacaaaaagcacattagttaaacaaaagttagcattaatgtgaacaatactagatttagtaacagggatttttatacctgtaggtaaattaatatgcgaagcactatggatagtatcaaaagaagtaaaacatgttttatcaaaataaacatggtgggttgccccactattaactatccggagattattagagaaagatacaaatttaccagtgagattagatgccaatggagtgttgacatcaaccgttgattgggcctgttaagcatgttgaatgtattgagtaagttgattagcggccagtcctttaacttgggaaccccgatccgaagtggagcgctatgtagaattagatttgtgcttgtcaaaataaccgggaggaaagccatggagaaca

SEQ ID NO: 311448 - DNA, 766 bp, Cannabis indica
cttttcttatttcaaatggtttttcaatgggtaaagcgaagaatacattttttataaaaaaagaaaatcaaaagacattattatagtacaaatttatgttgatgatattatttttggtgctactaatgatgctctttgtgaagaattttctaagtgtatgcatagtgagtttgagatgagcatgatgggagaactcaattttttccttggacttcaaatcaagcaacaaaaggatggcatgctcataagtcaaaccaagtacatcaaagacctactttaaaagtttgacttggtgaatgcaaagtccatgaaaaccccatgagcacatctataaagatggataaagataaaagtggtaaggatatggacatcaccaagtatagaggtatgattggttctttactatatttaataactagtagattagatattttgtttagtgttggtctttgtgctaggtaccaatcttgttccaaggaatcccacttgagtactactaagagaatctttagatacttgataggcacaatgaatctaggaatttggtatcccaggaactcaacctttgaaatagtaagctactcagttgctgactttaccagttgtaagacggataggaagagtactagtggaacatgtcactttggatgaaacaaaactcagtagtcctatccacaacccaagctgaatatatagccgtgggtagttattgtgcacaaatactttggatgaaacaaactcttaaggattttgatgttgattttga

SEQ ID NO: 311449 - DNA, 648 bp, Cannabis indica
tagctaaaatcccttcagctctcgatacttgacttcaagatttgctctgaaacttcaacccacaacaatggagtttcttacaagtacctgtaatgaaacatacagaaaaaacaagaaagaaagaaagaaatgaatccgtaatcttcgatcaagaaggttagttaaaagagtaacaataaaaggtatatatatacaggtaaataaagaaactcgaagtagatagttgggaaattaaacacccaaaatatcttgataacgtggacaatcactaacagtataaagtccatacataacactaggaactccagatgcaactggacctaatttgtcactaaaataatggtttttacaatgtctcccttgacaaattatggtcaattacaacactaccagtgtaaaataaaatattaacaaagcaaccataaaaatatgacagagtctaaacaaacttaaaaataaagttgttaaacaaccaaacaacaaaacacaacactttacacaaaggataagtatttcaccctcttcattgggcataatccatgctaaaaataccatggtcctaaaacaaatgctgcccttgagaaaactaaaagtttaacaaagagctccccctgaatggtagtattaaatgcaacatagactcctcat

SEQ ID NO: 311450 - DNA, 912 bp, Cannabis indica
tgcctagggcccacccagcccaggggcccaaaatttttttttcctcttttaaaattatacatatttttttaccaattttgaaaaataccatattttttctaatataagggcccaaaaaaaaattttctccctatggcccactttgtttcagggccggccctggtgtcgaggttcgagttcgggtttaaggtcgaggtctgagtccgtgtctttgtgttttgggtaaaggtatgaattaagagttaggatcgatgtcaaagttagtatcacatatgatatcattaaaaatatatatcatttaattattttttaaattaatacaatataattacgcaacaaacatagtatagtttgatacaacatatttatataagtcaatactaaatatagtattgtaagaaagtaacatatacaaactaatataataaatgtcatataaaccataggaaataaatcactaatcactgataaaagctataacttttttggtattagacaccttaatacatagagcattattattgggcacctgtagtcctagtaccttctagacgtgtcttcttgtgattggtcaataatactccataaaaattattatattaacattatatttgttaggaagaatgaagagttaatgaaggatgtagaattggaaggagagagaggagagtagcaattagttgtttggtagaaatgatggagtgatagaaaaataaagagtatttatttataaaattattatattatctttatgtgtaattttttaataattattaaaagagtatatatttgtaattttcaataaatgaagagggagtgtgaatccttctataaattggggattgcaaaggattactcaccatccaattagtccttccctcctccaatctctcttgccaaacaagtgaattt

SEQ ID NO: 311451 - DNA, 1221 bp, Cannabis indica
aatttttttactttatttattatactgtatacttatgataatatataatatattatttttttattaatattaaaatttacaagtataactttattaaagttgattgacttgactctttctcttcaaactctttctttctttatctcttctgatctcattttttttctgttactactactatagtttagggcttcaaactcaaagccccataatccattttctcttcttctcattttctttctttctttctgctactgctactataatttgtgctaatgtgcttataatataaatttgattatattttacacaaaaaaatcgcttttggcggtttgaaccgaccaaactgcggttcacattggtcagttttaaggatgtttttggattggtcggtcggttttcggattgaaccaatccaaaccgaaaactgaaattcagattttcatttgtaaaaaaacgaccaaaccgaccgatgctcagctctagacaataatacaacaagagatttctaggcaaaacctgtattgagacttatgaacacagagctcatgggagaccccaagattcacaaatttgataaagatggtagttgtaagattcttggaaataataaaccaataagaataaagaaagagaatggtacatattcttgaaaactgtgaatgtcaatggtgtttggtaagtgaggcttagtgtcgacaaagtgtggagagcttaggaaaaaggtgaaggaagggacataatgtttttagtagtcgtccagtaagcaagtgattcccccctttaccctagcctattacaatctctatatataggctttaggatttatcagtgatcccccacatgtcggggtgtctgataagagcctttaggctctaaaattattgattctccatagggccgacaaaacgggtcagacacgatgacacgactcgaaacccgcacaaaagttagcaggtttgagtttgccttaaatgggttcgggtcgtgttcgggttgactcgtctaacccgtttaataaatgggtcgtgttcgggttgacacggctaacacgaaattgacccgttaatgacctatttaaagttattttagtaccttaacgtgtcataaatgggttatgaacgtgtcgaatacttcataaacgtgttattggttgacatgtctaaataaaatatacttataaacgggttacacaggtcgtgtctgttgggttttatgccc

SEQ ID NO: 311452 - DNA, 726 bp, Cannabis indica
gggggccggcaaattagtatagctgataaattaggcaagagaaaggtgagtacatttaagaggggagagtagtgattaagatgaaatgggttgggatacacgtgaatgtaagcaactaggcatgtgattatgtgaagtttctagctatgaatagagaagataactgaaaacatctttattgctggataggatactcattgtttctgtctgtgcatatcgagaaagtaatcaatttatgaaatatatactagctagggtcatataatttggttataccatgttggagttctgatatataatgatcaaagataatagaataatttagactgtatttattttgtagaaaattacttaagataggtttcgtcatatttattcttttcaatactaactaggcagctaccgtagtatatagcaatacttggaaaagcataagatagctacgtcaatatggaaaattactttttggttctactcacattatttgtttggaaggattggttgcaaaatcaatgccttattctaagccaagtaatttgttcttataattaacatgcaaaaaaatgagaaaattacactcaaacacgtaaaatacattttatttataaggatacccatattaatttaaattgataaaagtaacgaaaattatttacatatacatatatattcggcattttctctcgtcactggtgcattattcaccattctttctttttttttttt

SEQ ID NO: 311453 - DNA, 1476 bp, Cannabis indica
atgaactttgaattgtaatcgaacttacctccttagaatttcggagttgcgtattgatgaaatgattaggtctatgattagttactagaagctataaaattccttctagggatatgtcttagagatagcaaatgataatttaaaagatcgttccatctaagactaggtcccaaaataaccttaggttatataatggtaaagtatttagtgtacaccattggtaaatctagggatgccctgattatgtccttaagaaatagctagaactgtttacttactttttcaagtttggtggctattccaaagtgactaggggtggactatactatggtcatcaagagtagtatgtgtttgttttcataaatactgattttctagacgttgactacatagatgtaatcttaaaaacaaagtagcacacaagtggagatactatttgattcgaatctaaaagtgttccattatcttatattatataagataatcccacatcctctgttgtattaatacaaatgaagaattctataccactgaagttcctagacacataatcatggtaccttgtcatagtgggagaatttctaggagtccatctcgttatgacttagatgatactagtgaggacgattcatcatttgttcaaacaagcaatgaacagtcctaataaggagctaagactcaaagcctagagaactatggtttagctattcacatggagcaacctagaattttcataatacaaggataagatgggaaaccatagttctaagtttgtataagaacatcaaagcctttggtttgtggtatacctagtaatttacttactctgtcgcaagaaacttatattattaagaagctagatcatttttcaaatggctaactctaatagaggtcacttgaattccatacatagagttcatttatcttaagatttgtttctaactagtccagaaaagacaatgaccacaaaaacaattccctgaacatcaatagtaagaggtcttatgtatgctctagcaggcactagaccagacacctgttgtcgagtaggagcttgagtaagtattagtttaaatccaaaaaaagaatattgggatataattaaacatatcatgagatagatgagatgaactatatgatagtcgataagggtggtattttaaaaccttaggctacaccaaattaggtttctagacttgtattaatgctagaaagtctaattaagagatggtgattactctgtgggtgaagtagtgtaacgccccgataatttgccttactttacaaaaaaatatcattttaaatgcataatttaaaaagataagaaaatccttgaaatacaacagtggattttggaaattaaaatgcaacagagaaggatccttcatttgaaaaataaaatataataagtaaatgattttaaataatacatttccactgtgatttatcaactgcttaaaataaaactaaggcacc

SEQ ID NO: 311454 - DNA, 2219 bp, Cannabis indica
aaaaaaaaaacaatatatagggtaattctccttttattaatctacatcattttatttcttttaaatattataaaaattattgttaaggagactatttaaatttcagagttttaattatttttataatctttaaaaataattaaaattatgtggacccactacaagaaatattacttttgttggtgaaattgaccaaatgcgccggcaaaagttgccggcataaagtggcttacctaagaatgacatttttcatccaacgtttttagcagcgtagtatattacaccgataaaatgacatataccgacgcaaatcatcaattggacagacaaaagtggtgaaatgaaccacctcatggcgcgaacaattcccaatggttcatgaaccttttgtcggcacaattatgggctagcaaaaggtccaaaatattttgggaggagttttactgtgtaagtaaatgtctacgaggaaaacttttgttgtcgcatatttgcgccggcaaaagtctacagaaaaaaaatattttggcatttagggggaaatttcactttttccggtgcaattatgcaccgacaaaaaggtccaaaaaaaaaatagtgagaaaattctcgcatgaaaaatgtggtaggtgagaatacatttttcggcgcataattgtgccggcaaaagtatttctaaaatactgcatttcaatttagggtaagtttgaacctttagccggcgcaaatataggcttttgccagtgcaacgaaatgcgctgcaaaactatatataacaagggtcgaagtcccccctcgccatatcttcttctcccttcttcttcttcttcttcttcttctgtaaatttttgcccaacaccaccgcaccaccaccaccatcacacccttctctctctctctcacacaaattctatctgtctctattttcattcaaattgcaccactaccatctaccactagatttcaaatattttttttattatatcaatatttgtatttcgatatgaatataaatataattttggatatatatgtgcacatatgtacatatataaatcaaacataaatttttaacattttttattttaaatctgtgtctttatatatagatgtatatatgtgtatatatgtatgtataaacttatgtatgtatatatgtatatgaatttgtatatgtatatgtatgtatatgtatatctatatgtatgtatatgtatatttgtgtgtatgtgtatgtgtgtgcatatatgtatgtgtatattgattgcatgttaattttttaatttgattttttcttaaattagtatttgttttaccgccccgtatcaacctttggggactgctaggagtacttcgttccacccaggtaagaaaatataagacacgtgtcatctagctcattttcacgtcatagggcaaaaaataggataacatttactgtccaagtctgcatgggaccttctttgtcgcacgtggactttactcgctcatgagtcttgtctggatgggtgacgcatgtcttcgacggttgaggttgatccgacgtgacttcgactaagggtctcttcagtgtttgaacattaaacacctcttaaaagatgtacctctaactacgcattgacgattgagtgacaatgcatgtgtgatggttgtactccttgtaatgagtactaacgttcacttttggggggaaacccaaatatttgaatttaaaagtgatttatcttcctttcttggtttcctataaaaggagattaaagcttttggtaattcttttagccattttcaccttgaaagaactagagcaaaaatttctaagttttcccttaaatatttgaagaactttgttggaaaacctctcacgatatcatctgagcaaataaaaaaagcttcaaatgagtgagtaatcatttattttttgcttttagatgattgctaataaatatgtgcattaaatttcgctttcatgccataaactctatttgctctttttgttgttgactaattgtagaataaataactctatggtttggaactttaccccacgttttgtcacgacccgagtcttaggccgtggcagatatgtaatatccatagcttcggtggtcaaaggtcacactttgacccttgtaggaagataaagcttataaatgatccttttatttatatcataaaatactaatttaaaagtaatggattaactcctatattaataagaaaat

SEQ ID NO: 311455 - DNA, 2738 bp, Cannabis indica
aatcacacatgtggtgtccctattgattaggacattacaattgttgctcaaggttaatctcttgactaagataagaggaagtgatgtattttactgttacttcaacccttaaggcgatacactaagttaagtcatgaaatttaaaatatgggttacactcacaaagtgcaactaagctttatagtggttagttgttaacttggtcaaaaagtggtactttatattttgaaaagaaaatatgagatatttaggtttcaaaataataaagatgagaattgtctcatagactcaatgaaattgactcgatgccgaccctaaggcggcggttcattgtcaaagatttttatcgtagaataacttaaacaagattttgtgtgttttacttgtatgcactcatgcatcacgtttataaattctgaaataatatttatatttcaagtataatcataatgtcattttatttattttcaaaaatatctactatgtcaaatttccttaatgctttactagcaattgaaaaactaaatggtaaatattttcttaagtggaaatctaatcttaatatgatgttagtttgtgagaaccacacattttttccttactgagtagtgtctctttaagaaatcatgtattgcaagtaattaggcaatacatgaggccgagacacgtatgtctatcatagacaagaggactcaagtatgcattattcttgagtcgttcactcattgcttcaaagtgttcaatacaagctatgtgatgaacaagatataattcaacatgactcaatagttgaacaagttgactatgtttgaaaacttttacaagaataagtccaagaaaggtgagtaaaacaagttgaagcaaagtccaactttccttcttattcagataagaaaaggaaataggacggtaaggacaacagtagtggcaagcccaagccgaaaggcaaaaaggcacgtaaagctaagaaaaacaaagccaatcctaagtccaaggataacaaaaatgagaggcaagtatttccattgtggcataatgggacactggaagagaaattgtaaaaagtatctctctgagcttaagaaaagtaaatttgatttatttgttcttgaagctaatttagtagaagatgatcaatccttatggattgttgattcagccactaataatatttgttcttcaatataaatacttgatttttcaaggaaactgactaataaaaaggtgaccatatgagtgggcaatggagcacaagtgtctgtcaaatgtgttggcaaagtccatttaagcttattaataatgagattattaattctatatttggaacgccaatttattatgcaaaatatagaaatagactttatgtgctcaagtcaagtgagcaattaattatttagagtagcattgcctcaatataataagaggcaaaaagtttctaatgatgatcaaacgtatctatgatatctacgtttaggctatattggcctaaacagaataatccaattaacaaagaatggttttatgagagaactaaaagttgaaactcttctagaatgataatcatttctaggaggtaagatggctaaaagacctttttttttaagaaggtaatagagccaaagaataacttaagcttattcacactagtgtgtgtggatctattaatattcaagctcgaagtggttatgaatacttcgtcacttttattgacgattattctagatacagtcatacttacataatgttttgattatgggttgattaggtaataagtgtgattatgatcctactaatctatttcagcataaaattcaaatctactataagtaagtaaataagcttaaaaatatttttcaggttcaatgatcctgaagatccgataagtggataaaaaaaacaaaataaaaaaaataacaaaaattaattgaaaaaatgtagatataatatgagttatttctaaaataaaatattttcaagttctgcaaccttagagacccgattggaggctaacaatttcacaataattttagttagaaatattgatagaattattgggataagttgattttagtaatactgaaatattttggagtactcgaagttggccaattaccttaaaagtagaagtttcttagtggctaagaaataataagataactattaataataaaatatttattaataatattatttttatatatatataaaacttctcgttaaaatttatgtatatattatatcagtaaacataaacaaaaacgaacgaacgaaaccctcgttctcccctttctacaaaaccttcttctcctatatctattttctttgattttcaacccgaaacctagcgatctaagctctggtagtagcgggatagctaatccttgaagagggaaagcttaaggtatggtttaattacgttttaagctaaaaacgattggttttatataggagctttgtgattgaaaatggttatggagattttgacttcgtagaattgttctttggtagctatgggactagtttcaatgtttacttgttaactttgaggtgatttttagttagaaatcgagtttggaactttttgaagcttagtccgaacgttaatgacattattcatttaaggactaaattttaatttcttttacataaggatggtaatatttatggtatatatgtgccttgtgaagtttgaagtgatttggataagttttggtagtgtttcggtgagtgccaaattt

SEQ ID NO: 311456 - DNA, 1205 bp, Cannabis indica
tatatatatctatattaactaaatttatatccaaataaaatttaatttaaatatatctctttttatgagtattgtacccaaattaccttcacaccctcacataatcaagacataattttaaattcatcaattacaagatgctaatggtgacgggaagaattgggcaaccagtcttgacaatattattaatgattattttctcaatcttttccaaacgtccaaaacctcttcacagcttattgttgacaatataaaagtttcagttagtgcaaaccacaatgatgcattattgaaaccgatccttgatgaagaagttaagtttgctgtgttctctatgcacactgacaaggcacccgggcctgatggtatgggtcttgaattttttcaacatcattgggaagttgttggtttcgatgttattaacttggtcaaagatttattttctactggagctttgcccgatagcctaaatgacactcaccttgtgttgattcccaaaaagaaaaactttgttgttatgagtgatcttagaccgatttccctttgcaatgtgctttataagattatctctaaagttcttgccaatcgtacgcgggatcttattgatcacatcatctctgatactaaaagtgctttcattctggggcatctaatctctgacaatgtgatgattgtttttgaagtaatacactacttgtaacgtaaaagaaagggcaagaaatggttcatggctcttaagcttgatatgagcaaagcatatgatcgggttgaatgaggttttcttagagcggtcatgcttcgtatgggatttgctagtagatgggtcaagcttattatggcttgtgttttgacggttcgatacaaagttgtgcacggtggtcatattttggagtctatttgtccgtctcgtggtattcgacagggtgatcctcttttaacttatcttttcattatatgtgttgaaggtctctcagctttaattcaaaagtttgaagctgaaagaactattcaagggtgccgtgttgctcaccgtgctccatctatcacacatatcttgtttgcggacgacagccatttcttttgccaagtaacggagggtgcgactgctagtatttttaatttactccagctgttcgaaaatgcgtctggccaaaaagttaatccatctaaataatccattttttttcagccccaacacagatggc

SEQ ID NO: 311457 - DNA, 1071 bp, Cannabis indica
  modified_base (86)..(86): a, c, t, g, unknown or other
gagtatacgtatctttttaataggagttccggtactcgagtttctaggtgagaaaaaatctcactataacatattacataaaaacncaaatttaaaaattcagttacgtgaatgttataaacattatttataattttttctaattttttaaaaatttaaaataagtgtaatatctattatagtcataatatacactgtttgcatttggtagtgcttgattaagatccatgatgttctatttatttcataggagctttaagaaactatagagtcgaacgtgacatttaaaagaagtaaaattatgaaatttgtgggtgtatatgtcaggaaatttatgaattttgaccccaacactgaaaactagtgcattggccaaaagatcccaaatagaggttaaaggaggtacaatgggagttttttatttgactctgatactatattagaatttggtagtgtttgattaaggtgcattaggttccatctgaaaaccaattgacaataagatgaatagcccattcaacttatatatgacattgtatttccacacattaacaatgtaggattaagtctaatatacagagtcatatacaaaaattaattataatttctgtaagtccaaaaataaagatgtccatacatatacataagtgcacttttaatgggtattacgaatgggtagtattagaacaaattgaaattttatacttaatttttcgatcgaattagaattattcttatttttacaatatataggttgaggttgtttcatcagctgaaaaaaaaaaattatttttccacaaaaagaaaagataaaattagtagagtttgacttaaatatattttatataaacatatttttgatatagtgtaaaaaaaatttatttttttgttatttttttttagttaaatagctaaattaagcataaaaattcaaaattttcttttattatttgtcactaaatcataattttttggttaaatatttattgttaaatttataccataaccatgaataagtaatagtcatttataagtgctttcatatatatatatatatgtgtgtgtgtgtga

SEQ ID NO: 311458 - DNA, 1131 bp, Cannabis indica
taaagctactacatatattaaaaaaaaacaaaacaaagaaagaaagatacgaatatgcatacttgtggcaagcaaacaagagctcctcattctttacacctttaagattatcagcccctagtttaaccagaaacgaacgccaatgaagtcgttcttcagcagggactccattaaaactaaacaaagacattaacaaataaatgagtgcagtaatatctaaaggaaattgttaagtagatgtacagctcataattccttttagtagtcaagcaatctctcatttcagaacctttatttctttactccatatttgacaacttaacaaagccaatgaatgggcaaaggcagtgcatttatgcatggctttcatcattttcttaagcagtgaaaatttttaataaccacaattcagatcaactctttattgataatatggtctaaaaaatagaactcacattttgcagagccatcaagcgatttctaacctaaaagttagccacatttttcttgcacccactaccaatgaacaaacaaatccataataaatttcatataacatctttccttctagcataaatggttcgacacatccaatcttgtaaatttatacataaaccaacccaaatcatctacaaatagaattacccaattgaaatccatcagaaacaaaaagaagaaagtggagatctatgcataccgttcaacgaggatgttgccctcagaattggcgaacaagactgccagaatcataattttcttcacctctagggaatagggacttgtgtatggaggtcgatcagagtcacagagttgtggcgctcgttgcgattattgatcccaaatccaaatcaaatacttttacatttttaacatgtttgtttcaccatccaattgaataataattattgaatagttctaacttatattggtctagtctaattactaaaaactattagtagaatttggaatttttttttaccgtaatgactaagggggctaattggacgttttcccattaaagaaagatttggggttatttgttgattccgttcttcaactattaagtaactatttctttgaaggctaattagtaatttttctctttgaactttgacatatactaaattgtgc

SEQ ID NO: 311459 - DNA, 2171 bp, Cannabis indica
gacatccgccaagtaaccgtgctcctgcaaattcttcatttttccctgggtcactatgaatggaggagaaacccaccgagctcctgttgcactttgtcttctctgaggaacagcctcggtgtattccttagtaacatagtcttcaccggccttagacacaggttctccattttcattaaacccaccaaagggtaagctccgagccgcaccttcttcctcaacttcagaaagagtgtcacgacaaaccttgccctgatcctccatctcttggacttcaccgtccccttcaacgtcttcctcctcaacagcaggccaagcctgctctgcactcggcattgtggaaagccgagctacgtgtgggtcagtcaaagaagacttttgcactatttgtttagtgcgtgccatcatcctattcctagatagagcctaagtggtatgtctagcaatagttacggcgaatgtagcgatgggtgtacctacatcagtaggatttggtaggcctacgggtaaagtgtcaactatatctggtcggacaatatatgtccagttggatggtaaatattgcctccacccctttctaagctgccaaatgaatcgtccgtagccttggccttcgatttggctggcgtaaaaatggtgttgcacttcgagttctagagaaggcgtaggttcgctacttacctcccaatattcaaagcttgaatttgatagaccatcactagatgaggacggactagcacaaagacgaggatgatcctcgtacagaagttggagaaggtcttggtcgatacaatgttcgcttccccaaaactcactagagttcatctacaaaaggtcggatgcaagatgagtatttggccgaaataaagaacataagcagattggttacaccgatcaagtccgatcaaggaataaaaaatagaaaatttacatgatattaaggtttacaatccagaatttcaaaactttaaattaagggttattttcactgagccccgaatgggcaagtgaaagttaatatcgtggaatcaaaatcaaaatgcagttataatcaagcaacattgttaagcatagtcaagatttcacattcttgaacctaaattttctatggttttcctagaacaagttcaagaactatcaaatttttcgcagtggaaacccaaaaaatcaaatattcaagcataaaagaggaaagagatgaagaacttactcactgttcgaagctttatagttgatcggatgacattgctcgatgtttcctgttgattcttcaaaggatatgaaagaaaaaggtttcttgctctgattcttcaagaataaaaatggctaaaagtggttgattagggaattcaaccctatttataagctaattagtgaggcaaagtaatcatttcaaaatttaaaaaccttgatttccccccaaaagtgtatgttgagcactcaattgcttgaatggtaaccatcaaaacgtgctaatttttaggcatggttcgatgtatgtcactcagcattaatgagccaaaaattgaagagacccttggtcagagtcacatcagatcgtcaataggcagttcaaacacgtgccacctgtttagctaaggatctagatccagtgaagtccatgtgcgaccttaaaggtctcacacagacttgggggcaaatgttatcccattttttgcactgtgatgtggtagagtatataagtgacgtgtcctacattccttgcatttgtgcagagatgaatatcccgaacagacttcaagtagcacatctgcacgtataatgtttgtccgagcagggtaaatggtagactacccaagtaagggcatgtttggcttttcgaactacttacgaggacttgactacttcaaaatgatattgtggagtccagcacgaaggcaatccctacaatcatggaattgaattagagagatacgggaggctgtctcaattccctattttgtgtattctatttatgtaatgaatgttcctgttgggctttgtgccctaaattaaactctatttcaatgtaatctttatcattttattatcaataaagagacataagtattttcatcacttatttagtgtgtcatttggttcatgttataaattcatccaaacccttatcacattgatattcctatttattgtgtcgtcagcacagtgga

SEQ ID NO: 311460 - DNA, 1868 bp, Cannabis indica
tagggttatataaaaaaaccctgatttttcccaacccccaaccgacggcatagatatatatacactccatacctacggtttttaccaaaaaaccgcctctaaatgtcaatgcagatattttcaccccctttagcttccctttttataaattagattgaaaaaagggaagctaaaggcttagattgtagtagtgcatgttgaggtacgagctcttcttgttagatgatacgatacattggtgccagatcgtggcacaagctcatctgattggatgatacaacaacattatgtatgatgccagattatgaaacagacttgcctaattaggtaatgcaatatatgattgcttttatttccatgcatatggctggttatgttattcatgcttgaatattattgcttaatcattttataatagtgaaaggaattattggttatttcatgtagtatcttttattatttttcttgctaagtccttgtgactcacgagtcctctatgatgcaggttaaggtaaagaaatgatagatcagccatgatgtgacattcttctcctcaaatgtacatgtatcctaccgatcagtatgtcgagttgtcaggagttgtttttgagctgtatctaccatgtattttaatttagtattttaacttgttgtcgtatttagcctttttgtaaaacttttacaacagggatctctgaaacacagtttcatatcgttatgatgtccgcacttaatattatcatagattttaataattaattactttattagtaataaactagtttataaaaccacacacgtggcgttcctacaggataaagcgttacaaaatacttctccctctagctctcttggagctcaatcttgcttcgactgtgataatctactgggttgagtggctctctcctatttatagcagacttggaacttgatgaagtcggttgttacagttagtcataactgttagcaactaacactaagtgagatgaatctagctagatccataaatctacgtgtgtattgagcttgtaaggagatttaatctaacaaaaatgaaatttaataacgtttttacgtatcaaaactagagaattagcgtgtgtcaataatttaacatgtttggaataaagtaagctctttcatacaaagtacaagttagtttggttcttcatagcatatccgcttatttgtttatataataaaattgatacaataaacatggcagaaaaatctttgtgcgcctttagctcaatttaatgtaattaagttggttattggggtaggcaaattagctttattctgtattggtaaagaggtgaatgagctcttaactgtaatacatgcttattggttcatgtattttagagagcttaatgaaaatcttgtttacttaaaacagttaaaagtatactatatatgcataatggtctcaaattttgaccattagactagatttgcatatatgtagccttagtaagatctcaaattcaatctcaaacaaagcagaattatgtcctgatattctcaactgatctttgactctcatcatgcataataatgaacatatcacgcattcaatttcttgtaccttgaattatttgttgttccctaacagaacactaacattgattgttcatttatgagaaaaaaatccaagtcaaagaagcacccggaatagaattcttttgagttgagcactaaagaatagcaataaaatagagaagaatgaaaatttacaaaaatgttgcatcttctgcatgttagaatttattgaggtcacaattgtatatataaaatgagtgttggatcatcaaataaataagtcaaatttatgtggtctattttggaataaagtttatgacttaagg

SEQ ID NO: 311461 - DNA, 1813 bp, Cannabis indica
aatacttgcctttctgggccaatggacgtcgtgacaccccaatttgcaacttctcaaatggaggaggaccggcccatcatttctttggatagccttaaagaagaacgtgagaacctgagtactttttattcatctgccactcttcataaagtgatggaacaacacctccaatcacagtaataactctaggattcaaacagactataccgcaatgtatggcagctttatttttcaaacacacctgccattcagaacacagaaataaattaactgctggaattgaagtctcggagtaacatgctatatgaccaaaaaaaaaaaaaaaaaaaaaaaaacttaatttgcataaagcatgttaaggctatccaaccctcacaagcaacccaaactgaaaaaggaagcctgttgtactctatcattctaacatttcattcttcatggatgtacaacataaactgaaaaggaagcctgtctttgacacttcaacgagactcaactttatcataacacgcacagtacatttggctgtctccaatgataaagaattaaaccatgtttcaggagctcctatattcatatcaccaacaaataatataaaaacaaacaaactcatcattttttttttctctaaaatcactctcttcatccaaagtctacgatacagtctcaaacttcgataattatctttgaaagccatcttatatggagaaaattataatgtcaatctctaatctcctgccaaccaaacttatcaggtcccaacattgcatatttataccattactatgcataatttaagcaaaacaatatcacttgtattataaatcaatgtagggagaaaacaagaaacacacacatagacccacctggttgttccaagaaaggaaagataaaacatacacaaattcactagactagcaggttacgcgagctcagaccaaaaacaaataccttagtaccaggaacaacatcatcaggaatcgatgggacatgtgaatactcaatagctttaatctccgtaatcccatcagtgagattaagactcaaaagacgtcgaccgcctgaatttctagtcaaatcatctatgctgcttctagatatgtctctcacagaagatatctgatagagaagattgaacaaaaacaaaagaccgcgattcaaaaccatatgattttcccgcattttctcagcaaccaaacgcagagagtaaagaagatgaagtacctgaagaactttggggccaacaatatgagaagagttccgaagaactgaaggatcgggcaaagacttgcccccaatggatttgaggtccatgttggttagctccgactccaccgaatcaatgaccgaactggagtcatcagccaaagcagactgaatcatgatcactgcgtccagctgctccaagtccctcaaacaccatcctctgttttttagggtttcgactacagaatctgaagtaatggaggcaacctccattttcagcgttgccctagaacttttcttttctagttgaaaaggtatctgatatcgggattactgtgtgaaacaaatgcccttccgactcaaacaacaccaacaccaacgtcgtcgttgagaagaagaagagaaacatgcacgtgatgagtcacgtgccaccaaacaaaccctttgaactttgattagattggaatttttgaagggaccttgtatatgcattttattttgagaaaattagattgtatatcactttattttatttgttttaatttttatttttatttttatattttttttttagatatactcacttttattgatggtgttcccatta

SEQ ID NO: 311462 - DNA, 1628 bp, Cannabis indica
cattgctctcggcgactcagtttcactgagttcgccgcttgcaaatctgtcccaaaggtcaaatcagaaatcttcgaaatggcctttgtatcacaacccgtaccttcactgtgctcgtccttcatcatcacctccttagtatcattaccccctttattcttggttcgtttaggaatcacctttcttctctttgaagggccctccatttttttcaacgaggcaagattatgatcataacttatgggaacatctattaacttcggcattggttcggtgtgatcattaagaggattcggttgacacttagtagtataattattatgttgctgttgcagaatttcacccatatcttgatagctttcttccctccaagaaccatccctttttgaacttccctgtccagtaatcttcactcccgaacccaagttgataccagaattctttgtgtaattaggaccttctaaattaatacagaacctgtcctccttttgatctttctcaatgttcttgcccttccccaatatttcagaattaatattaagggaaggagaagaactcaccagtggcactttagaaggattcgagattatggtatgtgaagagtcaactctggcaccatgaactcccaaatttggtccagtcggcagtagccttgaagaaatattctgctttgcaggaaaaccaggaggacttttattcggagttgagttgccacacgggtcttgaatgaaggaagggttaaactcgtatcgttcattcaccttgagccaagaaccatagctcggttgtagcttccctgatccatcgtcaaagaattgaattggttctgcacaaacccgagtatcatgtcccacaaaaccacatttaaaacacataaaaggtaaacgatcgtacctgtaaggaagatagatttttcgatcctcgtacgggaattggaatcctgggcatagaggagtagtaatgtcatgccagactttgaaggtgaagtagccctttgaagcaatcttgggtatatctgcattttggacagaaatcagttttcctgcaaatccagccagtcgatccatgttcccctttgtgatcgagcgtataggaaggttcaagatacgcccacttaatggaaatctagtgaggactttgttccaatcgcacggtattccttcaaatttctccattatcaagataccattattcaagaaccatggatttttggccagaattctagtcaaatcttgggtagatttgaatgaaaacaccaagaaacttgcagatgtcgtcttgcttttgatttcgacgccccagttcttgtcagcaatcccccacactcgtcccaggattgtcttcagaagcgatcgactaatcggtcgattggagcaccatcgtcccatcgcgcacaaagtcacaacttccgaccctccagccccaagaacttcccatccttcctcatccagaacatataggtttgttgtttgggcaagtagatcgtccatggtgatgtccgatgattccatattcacaggcttttccagcatttcagggaggctcttctcgtgagagagcattttatatatgtaataaaaataaaaaatgaaaagtaaaaaaaataaaaagtgactggattggcgggt

SEQ ID NO: 311463 - DNA, 572 bp, Cannabis indica
acttgtttaagtcaattgtctttgtaattatttgagactttactaattgatttcattttatgggcgtgactccatggactaagagtgtttgaaaaaacactgataccacgtacaattctcttgcatcaagtgtttttatcttctgctagtattttaatttttggtattttatttctggttctggtttgttttcacaaaactgtattctgcagtgataaaattacattctactgctgcagactgttacaaatgtttttttactgttattgtgtaaaaatttattggcttttgctaaaacacgatttttcaatgataagttttcatgatgtattagcattcaatataatacttcttctatttagagagcatatagctaaaaaaataccaaaataatctataatttggaccttagattttaccgaaggaaattttaagaggtaaaatagtagggagaaaaatgaagaaaaatattttccataaatttgatacttgttttatttttattttttcctttgcttgtatttatttgaaattattttaaattttataaacttataccacacttcgtgttt

SEQ ID NO: 311464 - DNA, 961 bp, Cannabis indica
atttaggacacaaaacccaacatcgacttggcataccaaggacataattgaggcatcaaaattagattcaaagcaagttgagatttgagcacttaggcctcggggccccgagcacctagcgcttaggttagcaatttgtaattctgggcaccttccaagcatctgatttaagatctgtttttgtttcattgaatccatagtaatggggaaataggtcctttcagaggaataacaacaattcctgggcagaaaaaatagggcctaatgcccaggttgataattttccaacctgggccacaaaacatggagttttcccaaaattctttcaatcatcatctcaatttttagaaaatattgagaagcggctatttttcagggaaaaaatagaacttttgaaggggcagaagagggacccagcgcccaggttgacacttgggactaggccctacacctaacttaacattctgtcaacctgggttgtttctaattctgttcagtaaatagtgctctaggcatcttcaccatcatcaaaaataatgaagattcaagtgaactcagcgagaaaagcacaaattctaaatctgatacgtccaatgaatctggcattgtcaaaaaaggggggagaccccatcctcatgtttagaagccttgaaagccttggaactatcaaaaacagaagcccgggagctcaatttaaacgacccattgcccatgccaacatttggccttgttcgttgggttctgcttatccaaatcttataacaagtgcaatgatacatgaagtcacatcatccaaaatcataacttcaattttggctcattcagaagccaaaagtttggagtcttacgtatccgtaaaacagtagtatcttcgaaaataagtgatcagcttcaccaaacatataaaaggactaacgggtgacaaaccatcacataggcatctcaaaggactcccctcaaa

SEQ ID NO: 311465 - DNA, 2126 bp, Cannabis indica
aaaattgtgtataaaaatatatactaatttctcaaaattaaaaaggacaaaacaattatatattctcttcaccattgtttacatgatatatcacagcaaattttgaaatttgatagagggttaatcataaaattgggatttgcaattaggatttgttcttcatctttcttaaggttgacattttgaaaaataatcatttgaagagcaaaagtgaactctcactgccatcaccaacaaactgtccagccgccgatcgatctacagaatcccaaagtttggtcgtcgcttagcgggtgagccacacacgctgcctgaagcctctgcgactacgtcccacatatcagggggtgatcgctcgtgacgtccctatttttcccttcgtttctctgtcggttgttacttttttagtttttactgtaccttgttatctgattcgaccatcaattttcttcttttctaattgtttgggatttgtttgtcatcctttgctatgattcttcattctttgtctttatgttctttcttcactgctttaggattatggtaaaaaaataaatcagctattgtgacagatatgatgttggtaatgtccaaaattaccgaccatgaactcaatggttcaaactatttggattggagaaagactattctcctcaatttacggagtattgacagagatgattacttgactattgatcctttaaagtcatattcaaaggaaaagttaatctaacatggcttagggatgatactcgcttattctttcatattcaaattctattgataatgaggtaattagtttgatcgatcactatgaatttgttacaaaaatgatgaattatttggaatttttgtactctaaaaaaggaaatttatcctaaaagtatgacgtgtggaaatcatattttattgtgcatgtggaaaaacaagataaattgtccataaactattttatggaattcaagaagacatatgagcaagttaatacattttttttccttaagtcctaatgtgaaggttcaacaacattagcgggagcagatggctatcgtgagtttattagtggggctctcccctgaatttaattttataaaaacaaaatttatttgagtccgacatctttgcaagatgtctttcgtcatgttctatgcactcaaactactccatctacttcacttacttaatacctcgtaataatagtaatgtgcctagaaaatcttccacctcaagtggagagaaggggaatatccacaaggatttgacaatcgagcatcttgtggaggcatttttttgcaactatagtgaaaaaccttgaaattcgaacaccaaattctgaacgcattttttgtaacccttataaacattttgttcacaccaaattttagtgtagaaagttacaatttaaaaattaccaaagacagtttgctaatgttccaagcaccaataatgtatctaaaaaaattagttgttatttatgttgatgaatttgccaagtaatcgctataagtcgaccttcatctctttctgttactattattattgatttaggtaatatatctaatgtatttgttctttcgatgttctcataatgggtcattgattctatagtgccacctatcatatgacaggttattccagttatttttttttttacttttcaatctcatagttccacttctactgttgccttagctgatggatcttcctcttctgttattggatctggcgtcatattactcttacacttatgcttgctttttcatcaatcttacacttacctaattaatcatttaatttgctttatattagctatagctcacttgttatgtgaattgttgcatctcattcttttttaatcattatttatttccaaatcatatgatctatgggacatcagttgccgcaaatagtactttacaatttgttttaagaaagttttaattgttaccaatttttatgtaaatcacattttattataaattccttttattaacaaatattagcacaatgattataaaatatgtaaagtaccttatctattaaagtaaatattgattatgtatagatactttttatatatatattttttttttttgacaaagtgattaaaatcactcatgaattta

SEQ ID NO: 311466 - DNA, 807 bp, Cannabis indica
actaaagtaatgaaaaatcctaaaaaaaaaaaaaagaacaaataagatttttatcccatgatctatgacactagtatggttttatccctgaattattttttttttgggtaaattattttttcttgaactatgaaaataactgcaaatttccctcttcagctgcaatttttacttttgcaaacaatttctttatgtgagactgatctaaaattaatataactaaagaatcaagacaaaaattatttcatcgaaaatactctaacaaaaaataataaaaaataactattttatagagcattcaaattatatttacaagttgattttccaaacactctaattctttttttttttttcctattgcacttcattcgtaaacaagcaatcacatctttttgggtaacatgatattttctccctaaattatggacattgtagcttttcacccctaaattgttctgtgtagcctagatccctcctgattttttttctggtgtcaatctaaaatctctttagctatagaaatcattgcaaaaatacatatcttcaattgcattttgttcatattttagaatggtttactaatacagcactcagatgatactattgtaaaacacagattatggtctagcgacaaattcttagaatatatacttgtaaaaataaagctaagatctataaatatatatatatcgtaaataaagttaattttgttataaatattattaattatgtgaatgttcaaatcttttatttattaccttttatttattactattaatgtaatcaacattctcttttccttagttt

SEQ ID NO: 311467 - DNA, 1706 bp, Cannabis indica
aagtacactgtcacacacattttatttaaaattcattacgtcgagattatgtctgagagacaagtcttccaatagtgtagttcaaagaatatactattctttgacaaaattagctcagctgcagaatatttatgcttgaatccaccaaatttcttgtgtttgctaggtaaacaaaattgtatcagctccagttgagctaaaacatcgacccctaacaattctggaagaggtggtcttttctcaattttttcatcatatttttacttctccaccttgggtcgtccattgcaagaaattgtttgtgtccagcataaccaatcttactacgcaatccaattgaaggggtgtgtccgttacaagtggggcatcccttgtaccctttggtgctccaaccagacatcaaagcatccactaagaagttattaatggtctagaaatagcagcatgcattataaacacagtcccattaaaagcatctcgagcttggacacctgactaccaaaaatcttttaattaatcaatcaatggtcgcatgataatatacatgtcttttccaagtgcattgcgccctggaatcaatggagacaatattaacgactctgctttcatgcacttccaagggggtaagttataaaggactaagataacatgtcatatactgtaagagttactcatgttactaaatagattgaacccatcagtggccaaacccaacctcacattttcaggttcaagtgcgaggatgggtggcacctatcaaactgcttccactcctctgcatccgcagggtgcttaagcacgccatcctctttgggtcttttagagtgatgccacaacatgtcatcagtcgagtgtcttgaactgtatagcctcttcaatgttggagttaggggaaagtactgcataacttttcaagcaacttttgttctatctcctttttccttttccaacaactcttgccacaaataggacaaaaatatttttttttctcattctcattccaaaacaaggcacagtgatacttgcatacatcaatggagtcataacctaaaccaaagttatgcaacttcatctttgacttgtaatgggacttcagtaattttttaccctttgaaaacaactcaatcaatatggagagtaacatatcaaaataatggttactccacttattgggaacttcgcagtgcatcagcttcgccaaaacattgaacactgattttttgcaacccgggtacagtttactttctatatccttgaacaaatcatcatagttaccactaccattgagcgggggcttgttgataaatcaatggtaaataaggatattctcttaaaatattagccatcacattcgccatttctttttcatcgttgtcaactatttttacatccggttccatgaacgaatccccataaaaataccaggtcatgtacgatcacttgatgccatgcataaacaaatgtaccccgctattatctgtagtctcgaagtttacatccagacatctcatgcaagggcatcgagtaattccaacagaatttatttttattcgagcaactctaataaactcatccacacccctataaaactctacagatcatctatttaaacttatccagcttctgtcacttgccatatttctacaaatataaaaagaggaagttcaaaacaaagttaaaaatgtgcaagtgtcctaatccacctt

SEQ ID NO: 311468 - DNA, 740 bp, Cannabis indica
ttcctcttctacctttttagctttctcacaataagcaaggacttcctccaggccctttctcaggaaactcaaatccatttctagatttgccatccaggctcgaaagacggagcggttggcaatggcattccattgctccttggtgtcgacctctttcccctcgagcgttgcattggctgcattgatccctcctagagtttctggcatagctcaaacttgtccttcgcctccttatgagtagcttcaagttcagctttgttggccctcttcacctcctcggcttgtttgtttaagcgagagatctccaactgagacttgttccattccttggacacggccttgcgctgaccaatcaccttttagatcttgttctccagttgcttcatcttatccagaccccagcgttgggcgacaaaagagatgaaagtttgctgaaaacaaataaacaaaaatgcataagtatttttgaaggttcttaaagagagaaataaagcgagaaggataaagaaatttaccgagaggccaaaggaaccgctcctctcgatcatctcattcaggatgccattcttgaccaagtcgcaatcgttgggaaggaaggatcgaaggtgacgccaacaagccgcagcatactatgcagaatgctccgactcagcattcccagcctttatgggcggagtctcaggcgcttggtgttgggttttataccttaaataaaactctatttcgatgtaatctctatc

SEQ ID NO: 311469 - DNA, 735 bp, Cannabis indica
aaaataatttccaacactttccacttccgcgaattgatcagatagtcgattcaacctcgaggtacaaactcttaggctttatagatgcatactctagttacaatcaaatcaaaatgcatgtggccaaccaagagcatacaagctttcaaactgacaaaggaatctattactacaagttcatgcccttcaaattaaagaacgtcgaagctacctaccaacaaatggttaacaaaatgttcaagaatgtattggggaagaacatggaagtttatgtcaatgacatgctggtaaaatctaagacttgcatgagccatcacaatgatttagaagaggcttttttcattatccaggagtatgaaatgaaactaaacccaaagaaatgcatttttagagtctctttaggaaaattcttgggtatcatagttagttctagaggaattgaggtaaacccaaagaagatcaaagcccttctagacatgccttcacctagaaaacacaaggatgctcaaaagttaactggaagggttgaagcacttagcagatttgtttccaaatctacacataaatgcatacctttcttcaatgtactttgaggaaacagtaagtttgaatggacaactgagtgtgaagaagccttccaacaacttaaagacatctaacaaaggctctaatattgtccaaaccaattgacaaagagtcgttgttcctataactggcagtgttagatcatgctat

SEQ ID NO: 311470 - DNA, 2562 bp, Cannabis indica
ttaatctaaaattaatactaaaaataacctaacagagttgaaagaatgaccttaggaagaattgaactcaggacctcttagataaggtgagaagaattttccactactccaaggtgctgattgtgatgtgaagtttaagcaagggagccccctatatatagtgggcacctcctcaaaaaacataaagaagataaggctcccacttcaatcaaccaagaccccgattcattcagtcaacaagaaaatttaaaagaattcttgtagactgggaggcaagtgttaaccccaaaaatcaacgcttataattttgggttagtccaaaacatcacaaggaccaactcatgatgactcatgaatagagaaagacatggaagaaggttgcgggcaaagtgcagtgtgagaggctcgcatgcaagttgtgtgaggggctcgcatgcgagctggggtatgtgtgcatggtgtgagccgtgcatgtgtgcgtgagtgtgtgtggaggctcgcgtgtgatcccatggtgcatgggggcttgcatgcgaccccatgcatggcgtgtgttgtttgtgtgtcgagtgttgtgtgcgtggggaaaagaggcttgcatgcgagccgttgtagtgtgtgtgtgtgtgtgtgttgtgtgtgtcatgtgtctcaggttgtatgggtgtgcgagggcttgcttgcgagcccatagtgcatgggatgcaagcccatgtgtagtgtgtgtgtgggggggtattgtaggtattgttgtttgggtaaggtgaagtaacgatgaaatttgaatacgtgttgaagagaatgtcgttggaggaggaatcaaaggacaaggcgtccaagggaaaagcctacgaccacgccttttggaagctttgaaagcaagaaggtataagtagtggaggcaccgcacctgcaaggcctgaggacctgaccaagagtacgctgcagccaccacctctgcggcctgggaccacttgacaccagacaagggtacgaggtgcaagaccacctcctgaacctgtggtttgcagcccaaaagcgacaacttgtctccttgggaccactatgtaacttaggccattagagcctataaatatctcattcttaagtgtgagagggggttggaaaatcattcttataaccaccatgttgagggtaggaaaagttttcattttctctctacattgagatgagatagccacttgaatttatatttcatctttttcttcatcttattctggtttgaagtagagtttgatttttcggccaacaagttagttgtcgagttctcatcatcaatagaacacaataacatttcatgaatacaatgtttttttttctttttcatgaatctaatttttttctctaataatttaatatttgtatcactacatgtaatatgatattttaatttattgaattataataatttatagtattattgtcatgcgattatttaatagtttccattaataaaatgattcatagtattagttaaattattaattagatataataattgtaatgtttttagtaaattaatataataataaaaagaatgttttattttattaaaaaatataatgtaataataaataatattttttgtagtgtagtttttagtgttattgttagaatggaaaaaaattttgtcatcaaatttagtgtcaaggttggagatgctcaaagagaatattttaaagtaagaaatgttaaaaggtactaatggtgtctagcactacctaaagtgtcatgccacaattagtgttatttattaataggtctcatataatttaatttaataattattataaaatatcgctaactattttctagacttcatcgtaaaggtattgcttggcaccactctagcttttataagtagagaaatgctaaaagacactagtggtgcttaacactctcttatgtattaatatcgatattggtgtaattaaatatcaggtcccacatagtttaatataataacttttaaaaagtattgctaaccaattgtaaggcgatatgtcgagaggttctaggcactactagtacccaataacaatgccctaaatatgctattctcttttaaagtttaacaattttggccctataaaaagtggcgcaaatacattggttgtatttaagagagcaacccggtgtcattgtatggtggtgtaaattaagcactattaaatgagatggcccacaattgatgaagatgttagatgtccattattattattcctctcacattcagcttttggttgttatgattccccagccgtcgatgattcaccacacaagtatgtggtactgagaaattcactaaccactctttacgacatgccatccatggtaaataatatataatatatagtagtggtgagatgaggcacatggtcccactttttcttttatttttaaaaattttttcttaataaatatctaataaatgctttaaaagtttcaaaaaataatttgcaatatcatatacagtaccataaataaggtcggtcgcaagatatgagggctacgataaaatttattaattattttttttat

SEQ ID NO: 311471 - DNA, 701 bp, Cannabis indica
ttcaaactgcattttttttttttgcagtgtgggcggtttgataaatacccctaactagtatttctaaaacaataaaataaaataataagaatattgaaaactcatataaaatatagtgaaaatataaatgcatttaccattttttaatgcttccacttcttcaattgccccagtaatatccgttgttgttgttgtttgtgtctagttgaagccatctaagtgttaaattaactttgaatttccaagttcaaaaaattgataaacaattaaactcaccaagctagctgcagttgcaaaattcatagcggtgtctagtgtgatgatgaatttattctcaatcccacttcaataatctaaaatagaaaaagaataaactcattggtataccatgccattgaaatacataaataataaataaagatattatcaaacataataagaaattagatggctgaattcagattcacatatataatgcatgttttatgtatacatataaaaaaatataatatatatacactcaagatttcaccaacaatgaccaagtataactcacttgaatagtgtccttatcaaacaaagatcatctttggtttgaaccaagtctcttatattgaaagtgagacaagacccaaaagactcgtatatatattcaaagacccggaaaatgtattccattttagtagaaacagagtgaaaaa

SEQ ID NO: 311472 - DNA, 846 bp, Cannabis indica
tattatatattttaaaataataataataataacaataataataataaagaaatcagaatgctaatcgcattctccaacaacagaacaaaaggacaaacaatatatataaatggcattgaattacaacaatttatatatatgtactgccaaccaaaataataatttaaacccaacgactgaatcacatgaatatattaactaaagtactaaatttcttgtttgacttcaaaccaaaagtaattattattaatatacatatcaccaaaaaactgtatatatatacttgagaaaatagttatatactgatatcatatatcaatattctggaaaagatggaccactgacaagcctatgtaatatgcatatatatattcaaaacgattgtaaattctgaaaggaataaatctctctcaaatttaattccagacagagttatgcatatgtatcctgcaattaacgataacgattgaaagaaacaaaaaatttctaacgacacatatatacagagtaatctaacgattacaaccaaaacaaatatatatatatatatatattcggcgtgaatgcttaacggaatattccaaatgtaaaaataataattgaatggaagatcaatactaccataaattctcaagaactaatttagggatgctcttgataccacatgttaggaatactgtaaaacttaatatagccctaattaattcatgagaattaaacaataagattaaagaatagcggaagcgtaccggagtccatagaatcgacctttaaatgatctttattggtatgatcttccaatttgcatcaaaatatctctctgtaaactttttgctcttggtgatg

SEQ ID NO: 311473 - DNA, 1184 bp, Cannabis indica
aacataaacaactgctaatttccaaattaactaagcgggctttacaataataataatatgaatttattaattataaataagttaaaataatagtaaaatttaaatataatactaaatattataattatataattaaaattattaacacatgagtaattaaggttatatattaattatttataaggtgagatataaaaatttagatatttataagtaaatatttaagttctaataatattaatattttcttataggattatttacaaaatatatatgcatcttttagtaagtaaaaaaaatataaaaaagtaaaatacgaatttaagtttggatatgaaaatggattggtttgtttaaaaaatatgggtcgacatgagtaaagtatgacatgaaatatcgggctgtgtcgggcctaccctttaaaaatattagcacacacgacacgacacgatccatatttttttatgacacggcacgatataaacctatttttttttatgacacggcacgatatacacctatttttttaaaaatcacagagaaatatggatcggacggtacgcacaaacttacaacactagtcataagtcacatatatagttgcgtaagctatccaaaatcaagattattctcattaacatacaaatatcaattctaagaatctatatatatatatatatatatattaattcatagatatttatttttatcttaactcttaaattatattaaattaacaatatattagtgttacattaataaattatttaaataaattaataaagaaaatataattaaaggcggatatatttataataatttttataaataattgaaaatattttgcaacaataaaatgttgttcatacaaaatactacaaaatatcataatttagggaacaaatcttatttattctaaaataaataataagagttatcaacaatctaataattagataaatatatataaaatcatcaaaaaaaaaatctaataattgttgatattataatacttaaaataaaagcaaagttactcctacttactccttactcctacttactcctttttctctcatcaatcatcactattcactaaacacaacacaagtgagaaaaattttagtagcatgttgggtatatatttttagtttttttattttttaaaaaattatttttagaaatga

SEQ ID NO: 311474 - DNA, 900 bp, Cannabis indica
tggtcttggtgggatcaaatttcacacgatttttcgacctttacttttacatcctctagtggttcaatcattctctctatcccaattttcgggatccatttcatcttcataatcctctggacagcttcacccttcgcttgaacgtccattttgggagcaaaatccatctcttcccaaataatgaacacagtccaaacagagacattgtaacaacttctggcacttatttggtcacctctgaccacttcgatgcttccattatcacaaggaaacttcatgcacaggttcctaatagaatccatagccctaaaatcgaccaacactagtcgtcctagtatggcattgtatgttgtaaggccgtccacaactacaaatgtgcagtgcttgaaggcacaaatgttgttctccccttttatcatgactagaagctagatttttcctatcgacataagagcatctccattaaatccttggagctagatgatacacggtgatatattggcctctataagcccaatcgtttgaaatgaaaaatttaacagaatgttcactgagcttctattgtctaccaagaccctgaaaacgctcttattggcaatatcgacttccatgaccaaaggctcattatgggggaaatgaacatgcctagctttttaaatatattttatcaagacctagatttactaacaagtatatttttaacatcctaaatatgaatctctaaaacgatgaaaattaaacacatataaagtatgagaaaccttacattggttgcagtggaattaaatgactccttccacttagatttctaacccttattcctttctattgcagagtataatcaagatctgagcccgacactccttcaactgtttggattcttcacagtcttacatacta

SEQ ID NO: 311475 - DNA, 3006 bp, Cannabis indica
gctttcattgagaatgtggatatcataatttgatcaaatgccatggtgaacacgagaagaaatcctatcgcaccatctgcgtctttggtctccctcaagacccccagataccaggtctaggcactcatgttctagtcacaactgggatccccatgagcactacagatgtggtgaatcctgtcaccacatcaggcgccacaagtctggaaactacaactggccaaactggtatgagcaccccagtggatccaattggtaggcccgtctctccaagagcagacccaccattggtgcctcccatcgaaggaaggatcaagggcaacaaccccctagaacaataacttcatctcaactctaattctacacaagagagacatgtccgggagttagtgagccagcaattgacaaccctcacttggacctaggagaagaccttgagttagccagactctgggaggctgtaggccgtgcaggcctaactgaagaaccacgcgttgctgattgtgatgttttcacttagcagagacgcgaattcttgagttggataaatgaataggagtacatcctttgatctcatcaagcggagttagatccctggaactgagaaaccaccgatctaataagacagttcaatcagggaacttatagaaaaggctaggatctccttagagatccacttcaaggaagacttctgccaagttcctcaagaactaggatagatcttcccctgccagagggaggacatacctttcctcaaaggtgaaacgacgagaatagccagatctcgacacctagcggcatggggggcccacaagggatctctggctcagcaacaccccccattgtgcagccattggctggccagccaccaacaggggtatccatagctggctagagtacaacacttcctccccatggggagcgtggtgcgcagagatcgatcttcgactgacaaggactaagattgggtggaaacaccaaaacagtgattcgagaagtgaaatcgatcacttcaggcatctagatccaccaaactctagtaattggtgtgatctaccccctgtcaacacatagccagcaccagtcaatcgtggagtcacgggcggccagacgctgcctaatgctagtcttgatggccaaggaagcatcatgggcgaccaaactctacggattgctggtctggctagctatgcaggagtactgggcagccagaccctgcccaatacagctctggctggtcaatcacaatagccaggtgtaggcctggccagcctaggccaactcctgtacttgggaatggtcggccagggtctacagttcaacacaagcctagctgacctttaccatatactctcccagggtatggccagtcaggccatatctctgtagaatctacagcctccccaaggagggccagtcaataaggtccgcacaataataaattcttctatgcaagcatagtttgacaaactcagggacatgatccaggcatagcttgcctgaaacctttataccatgaacttgatcggtcaaggggatcaccattcttaacatacataaatgccttgcccttgccaaagttcaaaatgccagtgtggaagaagtataccggatgagaagacccactggctcacatcaaatacttcgagatgaaactcgacctccagaaggttactggtgatgtgcgttgtcacatattcctagccacattgtcagagatagcccaaaatggtactttaaactcaccctgggaagattcaattcttggtctgagttctcacgagaattttacacacaattctcgtccgcaagagttgtatcatcgcagctggaagagcttgttgaagtcaaacagtgacaaggggaacctttgaaggatttcatttagagattcatggccaaagctaccaatgccaaaggccttactagagaaggtcgatgtacgaccatactggggggcatactcccactaagtgacttcgagaaagatatccaaaggatatccatcaacaacatgaaggtgttccttgatagagctgacgactttatcaaacttgaagaagccgtacgacaagcccaggcagggcatgtcaacaataggcagtcacgaggcatttagcagtcttataacccaccaggtgcataggcagacaacaataactctgccctaacttctagtggtaaaaacactagaaacaagcacgacaccaacaactttgggaagaacaattgcaaaggggaagtttagcacttcttccacgccacaaaataacaaggaggagaattacacttgcttcaccctcctaaaaaagaagcccgaggccatcttcattgccactcacggaacggtcccataccgaaagtcctttcctatcagaagggaaatgggcaagagagacatgtcaaagttttgccgatatcacaatgacttcggccacgacactaatgagtgtcaaaatctaaaaagggagattaagtacctgataaggcacaataatccccacctgtgtcattatgtgcaagatgacgaaactcaggcacaaggtgcccaaaatggagatttgatggcaccacccgtggtaggccacctacgggtcataataggcagaactcacattactggaaaaaccaacaaagctatggagcactatgctcgaaaactttgtcacgagcccaaaggtgaagtcctagccgttgaagaccggagctctaagtagcagaagcccatagagcccatgatctccttcactgaggaagatgcttcactggtcaacttcccgcataatgaccccctggtcattactgtgcaaatcaggaatatgaccgtggcaacatgtatggtggacgatggagcctcttccaacattcttttcaaaataacatatgaagagatggggctccaactcatagacctgatgccttgtaaccaggtgatgtatgcctttcgccaaggaatcacacctgtcgagtatatttacccctcacggttggaaaaaatccaaccac

SEQ ID NO: 311476 - DNA, 575 bp, Cannabis indica
aatttgaaatcttccatgctttgacacaaaagtttggaccatatttctagagatagaatggagagattggtaaaagatggtgttctttaggatcttcatttcactgcctatgtttattgtataaaaggaaagttgactgcgaaggttagaaagaataagtcagacagatacacagatgtgttatagcttattcatacagatatttgggagccttttgttccagctgctatgggtggttataaatatttgtgggccttcattgatgatttttcccggtatagccatgttgtgcccatttgtgattccaaaaatctccaacaaggatcaacatgaactcaaaattagaataatattagagaggagcacaatttggagctatccctcttttcttcttattaccattgactcaaacccttttcacttaagacatatatatgtcacacccttctaagttctaaccctaaggggttatacactaattgggcttaagtggttcaataatggtatattataatttaatggaccaattatagtttttagggtactctcatgtgcctctaacataatatataatt

SEQ ID NO: 311477 - DNA, 1855 bp, Cannabis indica
atatacgtgattttgaagcttatatatgttacacatcacatgtaactttttttacctgattgagtttgagcatgaactagagttgttaaggctagaataccacaaaaatacgcaacaaagaaggaatgtcttaaaatcttcataattagtttgtttttggtaagagagtcccccaaactaatattatcgttgtatctcttatataagtataataagtataatgaccattaccagaaagtcatgaatctataaattataaattaaggctacacatatatgcttatacgtacttaatagctgtactagatggggtatcaattaagtttttccaatttttaatggaacgataaactaaataaatttaatgtccactgtttttcattattagtccatttatattgcacaaaattcaactatatcctcatttacgcatcatactagagagtataaaagtatgtcaacacccataaaaacaaagaaaatgaagatgtaataacgagttgaattaatcaaacttagtttattaattctaaaacatataatgttaaaccactaacaaaccatatattatatatatctatatatattaaaaaaaaaataaggcaaatattctttcctgtttcatattgtcaaggcatatatatatatcgtacaagttgggtattatgcatcacgtcattcatttattttttttaatggattacaacaagtttattaatcttatatatttatgtatgaataaattttatttctcaaaagaatactatttgcaacaccaaactccgagttcatttaaaggaactcaaagtttaaaatcagtcttactaattctttctcttttactataataagggaatctattacacacttcttttttatttggcagttacatttacagtataaactttttgattctacacacaaacattcttcaatacaccaagaaatgaaactagttacacttaaaaatgttaccatttgttactctttctcacatttattaaattagctagtaacatttgctaaaaatatataagatatattggtcactaaatcttcaaatgtcactgtatgatttgtattggtacatttcaaatgtcaataaaagttactacaagaatcttaatttttgccggcaagaaaacaaggcataatttgctggtacaattttgttggcgaatttatgcatgcaccaacaagtactctcggcaataaatggtcgggaaaagaatttttgtcggcgaattaccatgtaattgcaccgaccaacgagtttataccagcaagtttcgttgctggcgtaggctccaacactgccattggtgggtcgactaagaagttccccggtgacttttgtcggcgaggtaagttgccggcaaaattttcgtgccttattttatttcctgcaaaatttttgttggtgcgtgcatgttactttgccatcgacaaaagttttttcaatttttgtaaaaataaattatgttttaacgacacaattaactttaccggcgaaacattttttttttttttgaaaattttaaaataaatttaatatatataataaaattaaaattaaattaaaactaaaactaatttttttagtaataatataatttaaactgcattataaaattagaatgtatattataattataaaagtaagtaaagtgtgtaaaattaaataaagtgttgttatagtttataaaaattagtaatatttacactgaaaactgtaaattaaatacaaaactacaaaccaatagcatggttatcgttgtcctaagtgggaggggagcttgtgaaacagaccaaccactagtaggatgaaatggtagaattgttggaaatattttac

SEQ ID NO: 311478 - DNA, 2529 bp, Cannabis indica
ttttaatataaaaaataattaaattaatttttttataatcattttaaacttgaaaaagattgaaaaatataaaaattgtattttgcattcactttaaaaattataagaggacacatagacactctttgtgctttcctttatattaatatatattgatacccgcacaattactgatggttattagagcgagtatggttacataattaaaggaatgacaataataatttaaaaaccgtccccaatctgtacaattgccattccttttagtgatgttacacatttactcaaaaagaaagaatgtatcatgttgttgatcattcacacgaagcaatcatctcgaatagattccaaattaatataagcattaatcaaaaaactcaaacaaactcacacacacaatgtttaattgaatcaaacccgaccttgaattctcttaggatactcgttctctttttattgagttatgaataaaagtattacaataatgcataagttacaaaagggttagatataactatttatagatgttgttatatcagtcctaaataaacctacaacaaaagactaagatgacatggtatgttttaagacacctcagcttggcctctctagtttgatactgtctttctgttattttaagttaattaattctgttatgtaactacttttgtaattaggattcttaagctataaaaggaggccttgacttatttgttattagttcagaaaatatattgagagaaaaatagaaagacttatgtatggtgaggttttattgtatcttgtagcaagaatgatagatatgaataagagaggagcagaattgagaaaccagagggaagcaagggtgtttcctaattgctctaagcttcatgctgaatattgctcgagggagaaaatcaccattgtgacagttcaagttatcttgaacaaagtcttgtaatctgctattattcacggtgaaaaggattccttgaagggagttcatggggaataggctctctacacattgaagaggaaagttcgaacccctctaaaatttcttgtgtcttttattgctttcttttcttaatttcttgatgcattactcatattcttcttgctggtttttattttatttttctagtttgagtgtttcgctggtttcttaattcaatacaaactgaggttgttaattgcaacaaatggtatcagagttaatggtttatgtttcataagttttttagtttggtaacattggcatcaaaccagaagaaatagaagagcaagtgtttgaatcttggtctaaactgaagcttcaagaaaatcaagaatcagatttaaggagaacaagaaatcatgtccactaccaagatggatatagaaaagttcagtgggaagaatgacttcttcctttggagagaaaagatgaaagttcaccttggaaacatgggattaaatgaagctttgaaaggagaggataaaatgtctgaactttggaaaaatccaagaaggagaaaatttggaaaaaggcaagaaacaccatagtgttgagccttgaagatgagatcttgaggaaggtggttcgagaagagacaacagctgcaatgtggaacaaattggaacaaaccttcatgacaaaatcaatgcctagcagggtctacttaaaacagaaattctattattataaaatggatgaaggtaaatcaattgatgaaaatctaaatgaattcactaaacttttatctgatctttgcagcttaaatgtgactattgaggaagaggatcaaaccatatatctcctcaactctctaccacaacagtatgatcagtttagggatacaatcttgtatgcaaaagatagtttggtgttaaagaaaatcattggggcaatctattcaaaagaaatgtcattaaagaatagtggaaagcttttaagaaccaatggggaagttcacttcacaagaggaaggaacatacaaagatccaacaaccaaaaaagaaactacaacaactcaggctacaagaagaaaggaagataatcttctaaagattcaagtagagatagctctaaagatgacaataagtgctatgtgtgtggaaagactagccactacaggagagactgttatttcaacaaatacaaaaataataacaggttcaagaaagatggtaaaagtggaaacaagcatgaagactatgactcggccaacttcactgatggctatgattcaggagaggttttgatggtggcttccaagtgttctaatgataaatggatactggatttaggctgcactttccacatgacataccagaaaccatggctaaagaacttcaaatctagaacaggttggaaagttgttcttggagaaagcaatacctgcatcatagaaggaattggggatattagcatcaaaatgtttgatggtatcgtaagaacactcaaagatgtaaggtatattccaaaactcatttaaattttttttttttttgaaaaataaaaatgtgttatgtaactatttttgttttttaattttaaaaaataga

SEQ ID NO: 311479 - DNA, 2295 bp, Cannabis indica
tgtgagtgatctaagctctacggtaaataaattccaacagtaccctgtgcctgctagtagttgtttcctttgttttcaataaagaactaatatcataaaaaaaaagctcattgatcagatatatgtttattaggactaactctaatgcatcctcattacgcttgtgcgtagaaagtgttgggataactgttaagagaccacatgaccaaacgtgacatttgaaagaatctcacatgattaaatcgagaattttgtaggtgtactcgtcaataaatttgtgtacttttgagacatgtcaaaaattacaacagtacaaactagcagacattggccgaaatggtccccagtagaggttaatagggagatagccaaagtttttttttcgactttgataccattttagaatttcggataaggtgcataaattttcatcacaaattaattagtaaatagaatagtagctcattcatcttgtataagttattttatttccacacattagcaatgcgagactaactctaatagctttaataattttattgaaaatcgtacgaattataaaagcctcctcatagtggtgctaggcattttgataccccatatcaatgctcttttaaaatagataaatgctaaaggtcacttatgatgcctagcactagggctgggcatccgatccaatccaatattttttttccttattcgatctaattcaattagacattaaaatccaatccaattactaattggattggatcgttttttaattggatatccaattacatacctaaattttaatattaacttaaaaatatgaagaaaaatacgtaaaaaataaatatcacaatgtatttaagtttaatatactccataaatatatcatcgctacaagtgtaatgcaactaaaggtttgaaataattaaaaaaataacattgctaagtaataaaatataataaaacatcatgaaaaaaatacacaaaataattaagtgttataaatttaacacaaaaaaatccaataaaaatatatttaacatatatattatattttttattatataatttttttaacacatataaatctaattggattggtcgatttttcattgaattttgaaaatgatatccagtaaccgatccaatctaattagaatctaacttttagcaatctaattcaatttaattgtaattagatatctaattttttgtaattagattagattgaattggattgaatgttgtccacccatacttaacactcttatataatgtcgttgttagtacaatttattatcgaatatcactaattttatttcaataaaattataaaaaaaagtactaactaattataaattataacctagtattatgcaccatagtagtccatattaatactctttaaaataaggtcatttcgtcaatcaatggaatagaattattccaacgttgctagctcttctattatttaatttgtttattcattttttttaatggaaaatgcatctttattaaccatcaaaatccgctaccaaagaaggtagcaagtcgaatggagcagactccatatcgaagatacaaccaggataaaatatagaagctctagcacagttatgagctaccatatttgctgatcgtttaacaaataacagataaatagttttcaattctaacaatagttttttacactcatgaatgacttgaccaaaaagcgatatcatatcaactgtacttcttaacgcttgaaccaccgttagacagtccgcttcgagtgtaacatgttgacaattatgactcttaatccaactaaaagcctcctgtatgccaatggattcagccacttctggtgtaaccgaaccagaaaaaagcatcatcttcccttcaattagcataccataatgatctctagcaactaaaccacaaccatacttattaccactgtcaaagaaagcagcgtcaacatttaccttgatattgttcacatttggtacagcccaatgctcagctccgtcattcacttgaagactcgaccatgtctcaatacgagaattttgagcatttttccactgtccaagctaacctgttgccaacactacaatgcttgttgcagtaacagatttcttttgccacacaaaatcattacgggcgctccaaatagcctaacacagcaccagaatcaactgcttttttcctgcatcagcagcagcaaaagagccgatacaccaatctaaaaaacttattgtgtaatacccggaattaagaaatggattagcaaaaccctaactagataattatgtataa

SEQ ID NO: 311480 - DNA, 920 bp, Cannabis indica
agagagagagagagaatgtttggaatgttgggaatgtttggaatttttggtttttagaccattttacctctacgtttgtagtttacttcatggtgaagtaagcataaataagtcatttaccctttcctctctctcttgttcggccaccttctagagcaaaaggggattagattttctcatcaaattcaaggggtttagctaggaaaattcatagattttagaagattaagctcaaggtaagcttcctcttcttcatctctttgaatttcaagttttgggattaggtttttccatgcaatttctggagtttagttgttgtatgtttttaggatgctcagagtgtttttttgaagttatgtttgaatttattaggttgtttggtggctgttttgatggttgtagttgagtttgagctaagtttgagattttgagctcaaacttaggtcgttaatgatgaattttgtttcaggggcctagacctgtttttattgcttgatttatctttgttgtgactcaactagatattttagagcttgtggtaaagtttggggttgatttggagtggttataagagtctttatttttctacagtgaaaaacgacaggtcgtttttgaagaaacggcctgccatttattggtgaaaaacccagaaaaaatggcacgtcatttttatagaaacgacttaccgtttttcagtcagtttctctatttagttgcttttctcgtgtttcctcgatatttagggctttgtcatgctatttatcgataggaaaatttttagttttgagtctaagtccccaaaaagtgatttagcatatcacttatcagttttaagtatgttgtgacataggggcctataaatcgtcgagcagcggttacacttaggttaaccggcacgcctgaattcagaatcgaggtaa

SEQ ID NO: 311481 - DNA, 1549 bp, Cannabis indica
aaaatgtgtctaatcatgtgcaggcacagatggagtcgagttgggagctgtagcatctagatcaccaacgagttggctggccagccatatgattagcaacctagccgaccgtcacctccataggctggccaaccattgcctcatcaaggtggcccaacgacaactcctcgggatggacgatagtcaggccaacttggtatgtatgcatcctactctcttagagttctctcccttgagcaagtattctttcaaggaaagaagatcccatgtaagagaggtcgacattgcggttacataaataaagctcatacaagacctctgagaacaagccaacatactcgtccatatggcttgctggccattaagagcatgttgtagcacttggtcctttttcacaatctccacctccaacttagaggcctcagcagcaaggatggtgttttctggtttttgataccatgcatcagctccaaactgttgatcaaatcctggttcgtgttcacagtagcctaatggatatgggcatccctctttgcttgaagctcaacctctttggccttaaccttctctcggtgagcgccagaggagcctttggctctaccatgggtaaggttaaactttaacatggcttgaaatcaaaagaaaaaacctatttagtgccagaagacgacctggccagccagccactgagtggcgcacttctggatgaccagcctctcaatattacagccctagtcagccaaccttgcagtgtcccatacttggccgaccaacctttactagtgcaacaatttgagtaaaataaaatatgaaacttgtcgaagtcaagttctggatactgttagacgtcagacactccagctcatcatccttgagctcttgaagctccccatcaatgatgggtggagtcttgccaatgcgaccatgagcagtctcagcaactctctatctggtggctaagcatgctccatggttagacttctgggcacccttgcacaaagactgatgtggaggtggagtcttcctcgatggaggattaacaatcattgactaaccaaccagtgtaggcccttaaggagggggaggtagtgaggaccatgtagcatcattagactgggtggtctgtgctgccttggtcttaggacaacctgaagaggctccacccaaaggctctccagcaagatctctcagtctggaaaccatatttgtaaagagaaagtaacaaagttagaatacaagttataagtacttaatgcaaggaaaagaaaaaagttggcattatcaactatcaactacctgttggaagttattttaccaggaacttagatctactcacaagtatgttgatttaacaacctaaatatgaacttctaaaacgatatgaaattaaacacataagagtatgagaaatcttacagtcattgcagcggaatatatatgtctcctcccactcagatctttaacccttgattcctttctgtagcagagtataatcaagatctgagcccgaaagtcctctttggtgtttctgaattctacacagccttcc

SEQ ID NO: 311482 - DNA, 842 bp, Cannabis indica
tatatatatattatttcctttggtgtcagtttaaaaccgagactaattagtattattgtccatttttaacaaacactaaaagttgtattgatttttttttttagaaatttgtattaattttttcaataaacaaataaataatataattttaaataataaataattttttagtttaataaacaatttatttgtttagttttcaaaattaaaataaaaacaaaaaaaaccacacaaaatttataattagttcaaacaaccttccttatacagtataatacaccataaacaaggtaataaatttcaacagatctcagtccaaaatagtttactatccattctattttatacaatataatctttgtaacaataatttacacatcaaaatataaattctttaacacatttacagtaaaatatacatcaaataaaattacaaatttatacccaaactctatttagagatgagaacaaaaccagaaaccaatgtcttaaaaaaaataaacaggaaataaaaaagcaaacccagaaacacctacaattaattcctttggctcgttgaaaatggggttttgcaggtccctgagcatggtggtaaccaccgcaaggcgccaaacggaggccggaggaaacgtctagacgcaaaccagagatgagagaggatcgatgacccttcgtctctggttttttgggtttcgaagttaggagggcgccgtcgacatcgtctattcttgcagttgaagaagaccggagctgctccggtaatggcacggcacgaagtggctgttgggctttatgccctaaataaaactccattttaatgtaatccattttattcaacatca

SEQ ID NO: 311483 - DNA, 564 bp, Cannabis indica
gtggtagattttatctatttaaaaagcttccctgtgtggagagaagataatactacctcactcacctcaccaccaatcaaatttcaataatcttgaaaaaaatgattattaaatccattaggactctgtgccttttgaccaagtatactgaatacagcctctttaacatttttgtggtgtattttcttatcaaaaatcttgttgctcctttttcaccactgtctctactgaaataacactttgcaaaataattttctattgtctattcacccagtaaataagtataaaattgtaaaaaagcatcactaactttacttgaatcgttaacccaacacccaaccatatttttaattgaataaattctatttattacattccttcgtaatcgtgttctaatgctggcatgatgattgtcgtgtagcataaccctccttaagccaacaaatctgtaacgtccccgcttcaagccttcattgggcctttacacccatggaatgaatggctcttatacacgagtacgtcagtctggctacttcatggactgatgactgaccctacagacca

SEQ ID NO: 311484 - DNA, 850 bp, Cannabis indica
aggtcgaaaagaacatgacaacttctatggaaggagtgatttccattattggagaagagtttagcattacaattccattgatgaggtaacagtaatgaattttgaattacttttctgactatgacattatatttacatgagtaataataatagattcatttaaattgcacacacttataacaacgttagtcatttatatttttaagttaagaccatatcacttttcttatattgtatccatgcatgttgctcagaactaatttgcattattattattttttttttcctttaccaaattatgaaatgactctttcctttctctgcagcactagtgggacttgattggcatagtctttgtgattgggaagtcaattgtatgcatctaatgcaagcaagcatactatataaaagaaactccaaacttaaagctagaactagacatactgcctaagtacttaatcatcgttgtgagtgcgtattttttgagttggttggtaactaatcctgtgaaatagaccatgtttcaccattgttttgttactacaaaaaatagacttgaatctttcgtcatctatgattatccaattcatttgaagcttctgctctaaactagttcgataacttcttacaataatactctcagttcaatcttttcaatagttggaagttaataatcaaaacaaggatgtgaaataaaatagaaataccagtcaccattgaatatagataatagaaatacttaatttgcagaatagaatctacagaaacaaacgtttcaatgtatgaccttgaaagtgaataattgttaatagtcaatagaatacagtctcaacagtctgaaacgaaacat

SEQ ID NO: 311485 - DNA, 1129 bp, Cannabis indica
gaattattttaaactgtaaactgtatctaagtaactagtttgaacacagttacaatgatcatgtgattagtttacttgtccgagaaggagcttataatatttcatgcatgtgaaattaaagctaagccttaatttgactattctcatcaattcacagacctgaaaaagaatttgacagtagttttcgaatactgcaaatggggcaaaagttttttttttttttcttctgagaaatacatgtgaggggttaaggctatattaactttcatataggactctagttttttttttaaaatatatttatatttaagattctttaaaataacatttgttaagagattgtatgtactatgtctaattcaatttaaaacattcattttgtaaaaaaaaaaaaaaatacatcattaaatcaaaacaagtcatgaaaaaaatgaaaacaacaaagaaattatcaccacaattctaagtccaatcaatctagaaaaaggggtaaattgagaggtactgtttttattatatattaactaaatataattgcaaaataattttaattgataaatattagtttttataatcaaaatactaaatatataatttcacataatttgtcaaaattagaatccctaatgcacataatggggatataactcataaaactgagtataaattaaagagtaataaaaaaaagtaaaaattaaaatagaaaataaatttcctcaaaaatataggggtttttacaaaaatattggattttgaataaaaatttacaattttactgcaattcagatttttttacaaaaatattatccttttataaaacaaccataaaataaccaaacagaataattaaaaataatagtgcaacaactaaaaaataaccgtaatagagaaaatttaatacagtatacattgtaaaacttacatagtatttttttttaaaaaaaaatctacctcacattaaaaaaagaattgaaattttcagtagtgtaaaaaccccaaaaacagattgggcctcattcatgttcaaatggcccatatatataaatgtgtaatgacactttcttttagttagggaaatttagattgtatactaacttttgctatttttttattaaaaatactgtcaggc

SEQ ID NO: 311486 - DNA, 941 bp, Cannabis indica
tttttttttttttgaaagaagtcctgacttattttgacaaaaggttctcaaaccatgaaacattatctctattaacatgtttgggccaaattattaatattctgtttttcatacttttaattattttttttacaagtatactttatctacttaatttttaaggccacttaacccacaacaactcatttcttactcctctccacaaatgatattaccaatgcgacccctataacaacagaaaagcaattccttctaaacatgcatttcattaattattgttttaaataatatttttttgttaatgtctcacctcacattaaaatttatatttaaaaataaaaataaaataaaagtgggtctacattatggcattaatatttatctttaatcctaatgtcaagctagcaccaagaagaccataataataactttatttcatcgtcaaattctcattctctccctattaatttatataccaaacattaattaattgatctcacactcacactatatcctttttcacatcgttcttgcactaagcatatatttgatagagaagagaagtgggaggaaaaagagtatatgatagaaaagtggaaataaaggaaaaaaatagtgtttggcaagaaagaaaaataaagagaaaagaaaagtggatagaaaaaatttaactggggcaccaaaaattttctcctccaatttggagagaaaacttttataaaagaacaaaatacaaaatttataaataatttataaaataatttcttttataaataatttaaagataatatagtaattttagaataaataaaatttctttattttcactgcaaaaaatagttacattttttaggtacaatttattaattttttatgactaaatgtaattttttgtcacaacaaaaagttacttataacttaacatagtatttagatacaag

SEQ ID NO: 311487 - DNA, 551 bp, Cannabis indica
tttttttttgaatgaaagtatggcattttattaataaagtgaatcatgtttaacaactcttcacgagaattatcatgagaaaatacgcgaactggggaataacaagcactgcgcgccagaaaatgtgtggccttaacaaactttaaagaaatagaacccaactcagacaagagtttcttacaatcccaaccaaccatcccaaaggtggatgacgtttgtgtagtgctgcttataccttgaacaaccaacaaagagtcggtttcaagggacacattatgccaacggttgccttttatccaacttagtgcctccttgattccacaaatttctgcaatttcaagaaaaatattgccaaaattgcatttggaaccagcttcaatgattctaccttcactgttccttgctatgaaaccttattaatataatggtttgggtatgcttttaatgggtattacccatgaatgggtattttattattagccatttgatcaaatctaatggttgatatttataattattaactaatttttaaaattaatatttcttatttt

SEQ ID NO: 311488 - DNA, 960 bp, Cannabis indica
tttttctgagtttcatacatgctaaataccatccaagaaggaagggatagaggcctatgaggtttcagggacccttctttcctgatgactaaagtttttttttttgagtgaactgctacaacaaaggaaaagaaaacaaacacaatagttgcagcaaacacagagaaaatgagaaaacaaaagaattctcaagaattagtcctcatcacgcctaagagcatcccttgcatacttatgcgcttcgatgttcatcaatctaggaatgtacttgagggaggcattagggaaagttgagagggactgccagattaaagccaccaggcttgaaagagttgaattgtcctgccagttactattaactttggtgatgagttgttggcagtcagaaaacactaaaatgggctgagcttgagaatttttgcaccaaactaagccttcaaaaagagcctgagcctcaacaaaaaggggtgttgaggctcccaatttagaggttgaattagctgctacaatgcaatggggaccctatttaatgtcagctccgagtcctgttttcatcaagttttgattcagagctgcatcaaccatcagacataagctgttagtgggaaagagagtagcttgatcctgagttcgagtttcagcatgtatttttctgatgggagggttgttaacgataacattggagagctgagcgtcattgtaattttgcaaaaacctggtgacaaaaccttcaatttcgctgttgttcgtgacatgattaagtaaaaatagagctattcctggtgttccaaatatgccagattatactaataaacagaggcaagtcatctttttgcaagaccctctaaaccccgaggtaaaactcttttatgtctttgtgttggtttgaggtgtagaaagtgttaacgcagattttcgttaaccgaatttgagtctcacatataatttcacacagaaaaa

SEQ ID NO: 311489 - DNA, 1678 bp, Cannabis indica
aattcaagacccatacccaaacctaggatccgaacccagattggaacttacgacccgagacccgcactaggacctaggacttgggacccaaacctagactcacaccaggactcaaacccgaacctagatcgagacctaagacttgggatctggacccagacataggtcccgagaccccgacccagatctgagatttgaactctgacttggacttaggtcccgggacccaaacctaggcccaaaactcatactcgaacctagacctgaacccaaatacgagaccaaacccaaacctgagagtcaaaacccacacttgggacttgggacccagactcgggacatgcgatctggacccaagacccaggacccagactcaagacttgcgatttagacccaagacccgggaccgggacctaaactcgagacttgggacccagacctatccgtagtcggtattgagtcgagtttattgaaaatatatcataactttacacagtctattaatataagtcaatatcaaacataatattttattaaataatactaatataaaattaaaatggatataaaattataagtttagatatagaattaaaattcttaaaaaaatagtaaattcataaatatatatatttttatttttgtgtatttataaaataatccgtataaaaaatgcgtatatgatatatctttatattcattatatcaataattaactatgatcatcccaaacaaaaaagattatttgtagaattctttgttttactgtaagaaacacactctcaatttatgtatacaaccaaatatataaagttaaaattctatcaattatttgtatatgtaattctttttttttttttgaacaaataaactttattcaaaactgaaaacaactacaaacagattacacacaaagactcaaagagccaaactcttgctaacacagcaacagccccttataacttctataatgtaattatcttactttttaggggtaatacaagccatactcaagattctataatgagaaatcttcctaatctccatactcaacttaagaggagaagtacaaactaaatcaaagatacaaccatttctatttttccagagcatgtagatcgttgctgcataaacagagtttatcactcggttctaaatcaagggcccccctggaacttgtatatataattcttattatttaagaaaaagaacacaattaaaatttgggttgaataattaaaacacatatgtcattttgtataacatgcttttacttgttatttgaaatctactcttttatgtgaactgttctttaatttatttttgctaattatacatgttatttttaatcttaatgatatacatattgttgcgaaaattattaattattacgcaagtgcacgcaatcaagtagtatacttacgcaggtgaggtcgaaccacagggaattggattaattactactaaattatacttataattctatttggcaaatcaataatttttataattgaaacagaatgaaagtaattcagaaaacttaaataacacaagagaaagttgagcaagatgagataataggaaggagaatcctgttgtttgtttacccaattgttaatgcttaattgctatccttttcttgaagtgaatgacagattataaattaacctagctcttt

SEQ ID NO: 311490 - DNA, 674 bp, Cannabis indica
ttaaattaaaaaaaaaaaaaagtaacaaattagtcttccacatattgaatagtataattcttgagactaaataataactcgtgttggttagaaattttttaaacttttgaaaaaaagaaagataaaaaaaaagtgagaatgtgtgcaaaaaaaaaacaaaagaatgattaggtgggtgtatgtattagcttaatttaagagacaatagtgaaacatgttcacttttggtaaccattacaaaaacagtgggtatattaataaccaacaataatttcgtaaataatatgttatttacatcgtgggatgtaattattcttacattaaaatgatcgtcttaaaaaataggtcgcaataatattactttttaattaaaatgattaacgctataattttttttttttaaattatagacaagagaaataaagatagataaaaaaattaattaaaacttaataagtcacccataaaaagaagtggtagaaattttgacgaaaagagaaaaaagaactgaggggtaatatatatttggcacctgcctagcgagtaatatagtttaatttcattatttttattaagaatttatctttttttaccccctgtacttatgacactatactattatgccccttaatctattcagcttgttacaaatagtccttgtataattttatatg

SEQ ID NO: 311491 - DNA, 516 bp, Cannabis indica
aagcggggacgttacattttattaatcatgattttatactaaaccctttgattagcaaatgatagcacaataattaatccttaagctagtagggcattacagtcatgatcatcaaagaagcagcatgtcgtgtccaaatcaagtatagagtttgaatacagggctcttgctcatgtatagctgatgaaatatcttggattgagtccttactcagagaaatcgaattctctgtggttgttccatctataacatggtggaacaacctaagtgctagtgctttaccttcaaattgaatatttcatgcaagaacaaagcatattgaaatagatatgtattatgtgagagacaaagtactacaaaagtagttggaagtaagatacatcccctgtacaatcaagtggttgaatgtctgaccaaaggcttattttactctcgatttgcatttctcactaataaacttaggccacctccaacgggcctgcaaaacctcaaatacagtgtgatatcacaccaaaa

SEQ ID NO: 311492 - DNA, 722 bp, Cannabis indica
tttttttttaaaaaaaaatgaatggaaaaaagaaagtaaatcatatgttaagttctaggttttacttttgatcatacatttgttgtcattttttatctgttcaaaatatatatagattcttataaaaattacccataggaaggcgatatttaaataagtttatggctatttttttaaggatgtttgcaaaccttagagaaacacatgaaaattaggatattgtttttataaaaatattaaaggagttctaaacaaatttgttacatctttcacattattattattattattattattattattattattattattattattattattattattattattattattattattatggtgtgtgatcattggatcaatttttatttatatttgttaatttgttatactttatgcaattttttgttcctatatggagaatgtgggtgggtgacattattatttattttaataaagttaacaaatcaataattacttttaaatagttatgttttttaaagaacaaatagttattcttttagggttcgtttggtatgacatattacactatattgtattgtatagtattatattgaattgtattttatttaatatttttatgtaaaattatatatgtagtattgacttttaagaatacctaaatatacaatatattaactagatgagagttacgtggcgagccattgttggagattgcagagtaaggt

SEQ ID NO: 311493 - DNA, 1799 bp, Cannabis indica
cctactaggtttatagttttcatttttatttttttccatataatttatatttttcatctcatatatttttatttttatctttataaaatattatctttttcaattatacgcctttaatagaaaaaaaaaattgccccatttataagtgcaggttctgccacatgctatatatacacaaaaaatttagagaaaaaatctaaaaagtatatactttattttaactcttaggtgaccttttgttggatgtaatgaaatagaatggaaagaaaataatttttatttcattcttttatgtagttgcattttaaagtatcggaatgtcattcaaatagaatgactttttcattatttggtggaatgactatttttttttgtaggttccactataatgaaaaattaagggacgccaaaacatgaaggaagatggatctctccaaacaataaattttttttttctatcctaaaagcatgcaaagatactttagaaaaactaaacaataaaacttaaaatctgtagttaaataaacattcaacttgctttctttattgtaccaaaagaatatctacaaattacaaaaatagaaataaattaataacaaacttttaggaaaaacataaaaatgtgacacatgataaattgatttataaaatgaataatataattcaaaattttctcatgaaaatctttaggtgtttgaataactaaatgagtgaagtgaagacatacctctaagataaatatatatattcatttaacacattacttaatggtaatattaaattaaaatataaatttatgtcaaattataaaattaatgataaaaaaaaacttatcatatctcttgagttgaaaatgttacaattatttcacgagtcacatcacttttaagatgaacctaaaaaataattttaaccacaatacatgacaaatcacaattatggtaccaaacaaagctcaccaaccataagaacaaactaacatacacaatacaacacaatctacaatccacaacaaatacaaaaacaaagtacatacccataaatattataataattaattataaaatttaaaactaataattattctatttcattccatttcttttcttattattattataattctctcaatttctattttcattctcaccaaaccaccttagtaatactaggtcatatgatcaaaattatgaggagaggagtaagatggtagcacatcgccctatttatatacatattgattaagtgtgttggtttcaccttacactctaaaaagggaagtcaattcatgattatctaattttttagtaacttggccagccattatgccccacttgatgaaagataagaactaagaagtacaaaaggggaaaaaagaaaaagggtcccatgtgaaaggccaattatgttaaataataaaaattaataataatgaagtaaaaattacaataatttatgggaataaaaagaacatgcaatgaaaatataatatgattatgtggtagaagagactagttcccaaaactcacctaccaccaccaccgttgaaaatgatgtagaacatcaacaatataggcacacctaactctctccaacaaaagccactttaatcaaaaaaaatgttcacatattttgctaccttgaccacctaacaccactctccatccaaaactcaactcacaaagtttctccacgtcatccttaaatcattttccacaatctttcttatataatatcaacttattaaacggtgtagttttggtaatgagagaaagagacttccttgttcaatttttaac

SEQ ID NO: 311494 - DNA, 1914 bp, Cannabis indica
atcacattgggctgggccggcccgggttgggttcaacggtttagaaaaatgccaacctgttatcaacccaatagtaatgggttgtaagcttttcaacccaacacatattcaacccactaaaagagagcatgctcggcccatttttgggttgggttggccggtttggtcagcccatcgggctaaatgctcacccctacagatggtcctttcagatagcttgtcctccgtaagaatagtatggtcggatagcttatcatgagtctggagatgtatttccagatagtttgttgtcagtcttgaacgatcatccaaagtacatgtaatcatcaagatagtctcgtccagattgattctttcggatgtccgtactgaaagcgcgttattgaagctgacgtggaatatgttgctggagctatctttgagactttaacggtacattaattagtcaccatagaatcagagttaattttagcaactatacaaacatatatataactatcacctttgtaatccataaagtatcaaatcattgacaacttgagagaaaaattatcgttgtaaggttagagagagaatgataaacttagagagaaagttcgtcttgtaatctttgtaacactatgagaggattttgttgggaatattttactaggatctaaatttactaataagtatgttgattaacatcctaaatatgaatatctctaaaacaataaaattaaacacataagagtttaaaaaaccttacattggttgcagtggaatataattactccttctgctcagatcgctaacccttattccttcagctcaaaaacttattgtgctaaaactagatatacgcaagtgcacacagtcacacacaagtaatacaatgataagtaaaagagtatcgtctccacagggattgattagaaattaattatgcaaaaatcagtactaaacaatttgggttaaacaaataagaagcgatgatgatttgaactatgctaaaaactaaacaagatagtaaatgaaacgagaaaggaaaatgagaaaaatgatgaactagaacaatcaaatccacttagaatgcaaattcaatgtaaattccatagaggaatgcattagtaattaaattttgtcaaccggaaatataaatgaacatatgatttttttcaaagctatatgttatgggctctcgagattaaattaacatattcctatgcaaatctagacttagagaacacaaattaagcactaattttccatgggtcatacaagctaaatatcatatttatataccatctacaaatcacactttttcaaggtgataatcttgcatcattcaagtattttcactaatcttattttttttaaaatcaagattagttaacaacctacaattggcgatcaagcaaaagtaggtagacaaacattaggcatctttgaatgaacaaaacttcattacaaaaaatattcataaaacatcaagaaaattcaaaatccaaggttcattaaaggttttaactaaaaaaaattagttcaagctcaaaaacacaaaaatacctaaaatgaaaataaagaaatataaaaatgaaatacaaaagattaccaaaggcatataaacaacaaaattatagaatggtaatcaaataaaaaataacattgtatgagattaaattaattaatgataacttcatcacaattctcacaattgttatgaacaataaaattggcatgcttattatagtgttgtttcattttggttgtaaccgtttgtcgattaatgaagtttcctttcttctggatcaaaaaaaaaaagaaaatggcgcaaaccccaatactttatttggtttcacttaccccaaaacccaaatttggatggtaaaacccccaatactcgtgttctgttagcaatttaccatttccgtc

SEQ ID NO: 311495 - DNA, 652 bp, Cannabis indica
aaagtattttagtgagacacttaccagatttatgttaatgtgactttgggcctccgattgttgagcaatttttccactgaggtagattggtacacttgattatagaattaaggtaagattaatataacagatgcacatatgtacatgtttaccgtgcgtggtttatgtttgtcaattagataacatatccgtaagaaccgtattggtgtacataaagttgtacctggatatcaacgggacatatttttggcaatttatgaattacaaactaataccaatactagtacacctagagtactaagtggatgttgtattatggttagttgtgcttttagacagtacaaactagtgctacgaacactagtacacctagagtactcagtgcatgtggtattattactagttatacttatagtatggattaatgctatcacacgatcaatatgactagactcttgagtataggttgatattatcgtcaatcatactatagtcaagaacgttcgagagtcagttatatgcattggacacgggttatagaatcacgatcattaggtgtatggacgcttaattacaggtcgattatatgtttatattttatgctttttcttactgagtctttcgactcatagctatattttatgtgtggtaa

SEQ ID NO: 311496 - DNA, 894 bp, Cannabis indica
ttaattttaaaaataaaaaataagtgtgttttgtaaatttcatttttattttcattatttgttgattttatttaagtcggatccaagtccaattttgaggctaggatcggggctgggtccggggttgaagttagggtccaaggttggggtctagatccgagtccaaggccagggtccgagttcgggtccgggatcggggtcagggtctgggttcatatctaaggtcgaggtccaggtttaggtctggggcttgggttcggggtctgggatcaggatctgggttcgaggtccgagtctagggtttaggtcaagatcggggtccaagttcaggtctaggtttagagttcgagtttgagatccaagtccgggttggtatttgggttcaaggtccgagccaaggttcaaattccaaggtctatgttgggatcaaaatctaaaatattgattttaaaaaaaagctgtttaaaaatttttaaaagtaatttttttttgttttcaaaattgaaaagtgaaaacagttttataaaacatgattttagaaaatattcacttttctaattttaaaaacaaaaaaataaactgattaaaaaattattatttagatattaaatatatttatcatcttatattaaaaggatccacatgagttttaggattcacagtgagtgtcctaataatatattcattgttgtttcgtgctgattttcttaattaggaataaagttaaaagtaaaaaaaattatgtgtctagaacaaattattgattggcattactagaaaattagtgtgaaaaaattattcggtaagatgtgaatgaaagatatcactgaattcaattgggtccatgaatctaagaaatagtgagaattcttgatctctctcaatatctctctc

SEQ ID NO: 311497 - DNA, 583 bp, Cannabis indica
aaataaataaagtttgtttttgtattagtgactctactagagtaaatttaatatcacatttattcgaatacttcaaaatatatactgcaatgccttatatatatttgtattctatagttatactcttttgtcctggtggctgtagttgctcttgtctttgtttttttactgtgaagaggtttcgagaatattagaatgtcgtggtaactttagagaataggagatcaagtttacatggagattgtagttgtagagctaagaatcattcattaacagaattggaactgtggtattatataatatatcttagttgttataaatattgtaatgattttgaaaataaaaaatctcaaactaaagtgaatagtgaacttaatctaacaaccatattttagtttcactaaattggattaacttgtagtattcttcacaataaagtgaagaaatgggggaggcaggcccatttcttgtatgtgtatatttttgttgtatgtgtgctgaaattatttagagtgctgaaatttgaatttatatagtttgttgtataggtgcattatttttttattttcttttatgtgatatg

SEQ ID NO: 311498 - DNA, 1355 bp, Cannabis indica
gtgctaaatattgatttttttcgtaagaaaaaatttaaaaacagtttttaaaaatttgtgccaaacaccattaaatttttaaaatgacaaaaaaattgttttctattctcacttttaaaaacacaattttaaaaactgaaaactgaaaactcaacaaaacaagctctaaaggttcagatagtaggagtcccaggtcccctttacggatcggcttggccattagaggtcagagtctcagtattctggttagtcaaagctgtggagttagtcgcctcaaggttttttttagctttctagcccgcacagtaactaagatatgcctctttggtatcactgaggtagtcaaagtttccttttggtttgccttccaaaactcgtagaacacttccagggcggcagactgcaaaatctcgacctccttcagaagatcttcctcccttgtttgtctgaatttgatgtccactttcatgtttgtcttatctgtggctaaggctaaaagaaaagtttggagactctctctctcatctttgaaattattgacctctttggactaaacctcgacatctacctcaagctaggcggtagatggcatctcctgaatctctttctttagctcttcaactcgattattggagacgagaagtcgtttgttcacctcaaatggctctgcccttacaacctcaacctccttcttggccacatccacctccttcttggccgcatccacctccttcttggccgcatccacctccttctacagatttgtggtggtggtgatagtttttaaggcagtagacttggctcgagagtaggtctaagccatcttcaaattgagctacacaagaaaatgttaaacttgcacaggtaaaaggacacgataaaaattaaaggagaaatacttactcgggttgcctcctctaggagcccgcccatcagaagctccatggacatctcgtcccctctgaatagctggccattcacctcaggaagtagctgatcttggtagtgttaaagcatctccttgcccttcttggtctcaaggtttagcacgatagaagtgtttgagggcctggtccaaccagacccatccgtgctacttcccttggcacctttgggtttggaggccttcttggttggtggctccacatcggacactgcctcctcaggaacgtcgataggagactcaactgagcccttctccttgggcggtatctcatcaccccttgattatttgggcggaggggtctggtcagagctgtcacctgacctcttcttcagagcctagaacaccttttgagacatagctgcatatgaacaaacaagaaggttaaaaacaagtatgatataagccaaaa

SEQ ID NO: 311499 - DNA, 1136 bp, Cannabis indica
atatatatatgtttatatatatagtttccaatatagttgggattaaacaaccaaagtagttagttactagtttgtgggctatgtgttattattattagctcatcatgcagctagactctcaagccatagctcacatcatattttttttttactttttattttttttttttgtaatgcaaaccctcacatccttaaatatacatttaagatagtgaaattattttgttacagctagattccctactttatttttaaattaattctagctagctaccagtgataaacaagttaaaaaaataagcgagagaaaaaatatgagtttttttatttttacactttgaaagagagttttttcatttttatagaattctacacaaaaatctatatagcaactaacaaaataacgtaaatcgcaaccaaaatctgtatagcaattctcatagaaatcaccagagaaactcaaaccgtaaatttagaaaaaaaaaattaaaaaatagtatatgaggtaattttccaaaaaacaagattacatatttctctctctaaacaaagaaagaacacttccttctttctagaaaactagttttttagagtaaaacttcttctcctactcttatagctatggagtcatcatcgccgaccttgggtgtgcgtttggcattcctggctcagtggacgcctttgttgagggcttgacttcacgatagtgaggcttctctcttggcagttagtccattcgttttcttctctaatggctagcgtcgatctctcagcgtgtggcgtggtgggttgtcgaaattgacgttgttgttgttatgactaattaccctgtacaacccccaataaaaccaacactaactaaaatttcgcgatacatcaaacacacatatacattctaataaaatctctataactaataaattacacttatttcttcattaataacaataatctctatttcacataattaacctcgtaagattacactacaacaaatatagttattaccggcggaactcacccgccggtattaataggggtattaccggcggaaatagccatccgccggtaataactatataattaatattatattaaataaataaaaaaaaattattttaaatttattattaccg

SEQ ID NO: 311500 - DNA, 1330 bp, Cannabis indica
agatcctggtaaaataaattccaacacatgcacggtgcctaactgattgaacaccaaggtactaggtggtcttggtgtttgacctgtttggctgggagcttggcctgagacctccgtataagtatagttgtttgaatgtgtaactcctcccaaggggcagtttggcaggatctggctgtctaccatttggccgacaatttggacttgtggccttggattggacggctgaccaacatgagtctgtgtagtatgtccagctacatacccttctaaccagctcagggagatactagattcaattgctggttgttgactggtaacctagtaggcccttcttatcagtatggtagcctacctagatcgatcgccaatagctgcttgttgcaccctcatggtctttatctcacggtccccccactctatgaattgacgtcttttctcgttgaaggcaatgttgatggctgctcggagatcttcttgatagtgatgcatggtgttgttatggacttgcataatcccaaatgcatcccacatattttgaagtttagtgtcatcttcaacaggcctttgagtattattggcgggatctcagtgctaggagtagtttgatcgacagtcgtactggtgttcctagtctcatgtgcacctggtgtgaacccagccagaggggtagtcactccatggcctgctgtaggtggttgtgtattaacttgtttggggtttgtgaaatttgcatatttggatttgtcaccattggattgccttgaccagtaagaccttcccttctagtttgtacaatcatcgtattaacctatcaagattaaagcaaaagcttgtgtttttgctctcaatgaaagcaccaaaatgctgacctcgcttctagccaacggcagtgagtcaaaataaaacgattaaataagataaataatagacagcaaaaatactgaagtaaaaagaacagcggtttttcaagaggttcgacctcgtcagattggtaatagcctactccccttgtatttgtattgacttgcgataaggaatacagtgctcttcctctttaaagctcttacaatggatctctgagttattttctctcttagatcactattctctctagagtgtttatctctggattaattttttcgtcccccttaatagtgtgatcatgccactgcttataagagcttattacatgaaggatagttttccttaatctttaataaataaataggaaactatattaattctataattacgatgtaaggaaaaagaaactaaggcgtattgcctttattctctaactagatcccacgattatagggattgtctt

SEQ ID NO: 311501 - DNA, 913 bp, Cannabis indica
ccttttgagtgtatttttctttcttgtggatataatatatagcccggttactaccacgaccgcagtgtaactaattgggcgacatcaagatgcttaaaaataaatttctaaacgagattttaaggaatataaatttctaaagatgttcatattaaaactaaataatacccaaaaaaaaaaaagaagttctaaacaaattcccatttctaatttgagttgagttgaattgaagttgaaatatcaattacactcatattactattaacaaagtatattaataataaaaacaaacaataaaacaacatatattctaatcatcaagatcaaaaacaaaataatgctcctaaaaagaaaataaacaaaagtattattaataattaatgataatttatttgataaattacaaaaactaaactagttaccattggtggatatcaacatcaacatcttcatcatttattgttactataaaaaaaataataaaataaaactaatactaattatgaaacatatacacatatatataaatatttatttaatgatatttacctattttgtcagtcatcagtcaattctgtgtgcacactaatgcttctaatgtagaaggatgaagtttcgatcgatgagctctcatgtgtctaccaccattactgttttgaatgtagattgtgaagcaacaaagctaacaagcacaacaagtacatctttggcaatcatactcaacaaaaggtatttgaggcctgccaccttccaataattacatatatcaaataactcttcagtcctaggtactaagttctcctccaaatctaaatctagttcagacatcacattctctactcgatatgaagctctaacaaatctgttgttgctataattttaaacactacgcatgtaacaccctaactaccat

SEQ ID NO: 311502 - DNA, 1611 bp, Cannabis indica
cttaatttgtagttataattagtatataataataattaattaatttaaattacttagtagccatgatatatacttaacaatttaaaaaataaaaaaaaaaaaagttatattttacacaagtatttaaaaacctaacaaaaacttccgaagcattttcaaatgatcaacatagacatttacaatgttgattatcaaccaaaataataatgaaatactaatagagtaaattacggtcaaactctctaaaattttactatacttacaactaatctctaaaatcaattttttgacactaaaacctctcaaactcgtattctgttagtaatatagtatttccattaattttttgttattaagtgtcatgttagattgtccatatattaatgtatacatttacatacatatgacaaatttatattgatccaaatcatttaagtatttaaaaattattttaaaaaagttagtttcataaaagaaattaatgaataaataaaagacaaaaattaaaacctaaataaaccctaattttattaaccctaaacctaaatcctcatatctccaacctctcccttccgttgcctccctttgtattttttccaaaagaagaaaccataatctcattgtagatcggttggtgttatacctttgccgaaccctaaggacaaagaatccaagcttaatcggcagtacctaggctcaatcggtggtacctaaggaaaaaaaaggcctcccaagcttgaagttgcgtttctccactcacaaactctcggttaactcggttgagcttcgccggccacaagacgatgcaacaaaggccaccatcgaactcaagacggtcctgaaacccctaaccccgtgttcgctcatcaaagtttgattttccgtggtttttaagtgatttttaggcgattctccaatctcctaaacatgtatctctcctaacaatctctctctctcttctatctcgttcctctcttttagtcccggtctcctctctctctctcttgctgtcacaattttcccctttctctttggcaaactgatcgaaaagtgtgtttgtgttgggaaaaacatatctgagctgagggtttttttgtgtggggaaacagatgtgagggtgttgtttgtgtacatatatttgtgtatatatatatgagtgtatttgtttcttcgatttgattttgtttaaagttagtttgatttatatttacagtgatgtcaattattgtggtgttggtggaggctcgtgtggtgatgacatgaagaagagaaaaaaaaatggaaacaaaaaaagataaaaaaaaacacaaaatatgtaacaaagaatgtagaaagaaaagagaattctctttcccaattttcaattaacttttttaattagttttttaaataattatttacgtaaggcctgttcaacacagcttttgaaaagctaaatctacttttaaaaaaatggtgataaaaaaagtatttattaaacaattaaacaacactaacaactacactagaaaacttcatgattatcgattgggtaaataccattttggaccctgtgttttgcaaaagttaccgattggaccctgtgttttgttaaatgacaaaataaaccct

SEQ ID NO: 311503 - DNA, 1288 bp, Cannabis indica
aaataaaaaattttatttaaaaaaaaaagttatccataaatttctcgtaaacgcaagaatttagttatataggcacactttatatagaatagatataattaatttgaatatatgtaattattttttcttatcaaagttttatagacttgacttgaatctattatggtttagaatattaccgtttaaacaagaaacaacgaccaattagttatgaattaaatttaaaagtcttagttaagttgataagtaatcattattttgtttttaaatatttttttactttattaaaataaactaatatgatattttattgttaaaagttggcaccaacttatctactttaatttttttttctttctttctttcatttttcttgataataaacttatattatatttaagctaacaaagaaagttacccttattgttaggtctatagatggtctttatttgtataatttattattgacattgacttctattacgtacgtactacactacaacaccttaaagttatttatgcatttatgttagtgtcttttatccatgttcacatctcgatgagaacaaagcttaaagttaaaacaaattcctttctcgtatatgtgtagtgtagggtttgaagtttgagtctatatatttattttatagataatttatgtattaatatttttaaattgtttttttaaattattgattagcatgattttaattgtttagaatattttaaaggctaatcatgcatttagaatcatttagaagtatattagcatatttttggtaaaaaataatagaagtcggtgagtttagttttacaaggtagaacttaattacaaattttgacaatcttagaggcagaactggacttggagcttaacataaaagttttaaatctcgttcttagctttctgaaatatcttgaatcgtctgattccaagttgtattgaagaagttatgaccaaaatactaatcaggtaataaaaaaatttcgacagcgagttgtcactgcggcgaggaagtcatggtcgcggcgagcaaacctatggtcgctgtgaggaggcaaaatctgaactgcgattttttttttatctttttttttttaaaagataggttatcttttcttttagtaaaatatttcttagtattataaatatgacctcttagattacggatttcatcattctagagctacaaaatagagagagagcaagaaagagaaggaggtcgtggcttcgattttttttttctccttcaactcttactaaaattatgatttttgttataatgtc

SEQ ID NO: 311504 - DNA, 2239 bp, Cannabis indica
agcgacctgtcagatagccagaggtacgactctaaagagggagccttcgcatatgaatcagaaaggagcaacagctttatcctaaccttgatgtcagagggtgaggctcctgtagtcaaaggtcatgagggctcattgtctacaaacgagatagacagtggttcaggttttagcgaaaccaatgagtttagaagtgcactatagcgagtccacggtgtcagcccaaggttacctcgttcattcatgacatgccttagatactgaagtcgaagaaatgggtgaggacaacgagttaccagaccgtgaaaaggaggacgaagaggaaggtgaaggtagtgagatagattctgttgacaatgctcaactaaacgaacatttctcctacaaggatctagtctcacgggtcaagaaatatgataagtcaacatttgtgaggttggatttggttcacacggctactcctaagcctttgcaaacacaacgacctcatcttcctttgacgaatcctgcgatcatcctaacacaaaatgtggtggtttcaattcctattcttcgatgtggggtaacgctgcccttccatcctttcatgaaggacattctttcttactatgacgtctctcctttctagctcaccccaaacagctaccgcataattctagggttttatgcgatgtatatggagtatgcacgaggagaaccaacagtcaaagattttggctttttttatgacgtagagagcgttggttatgataatggcttatactgctttagtaaatgggccaattctgaaataaatagggtagaaggcacaatttccaatttagaggattggaaattaaaatggttccactcatttaagatgccgggggttaggattgacttcaatcaccgacctcgtacgtcgcatacttttacactttgtatttattttcattattttatagacgttaatttttactttccttgtttgcagatagattagctcgataccaggggtcaggattgacttcaatcgtcgacctcctacgttgtgtacttttacactttgtatttattttcattgtttgatagacgctaatttttactttccttgtttgtagatagactagttcgatctatactggaccctattcgtctagaaatcactaaagtcttaagagaccttcccgtgtaagattgcgaatggcgtttattgtgtacaactacaaaattgtgagagcacaagctcatcctagaggatgctaaacttcagtgagaaccagtgtgcaaaaagccttccgagaagcaaaaggaaagaatagacaagcgtctatccaagcaaaccttgagaccaacatcaggtaatataatctagtatattactaaacaatattattttaccctatcaaatccttacttgtcattcttcttgcagacatgaattttttgaaacaagctccaattttcaatcacaagtctaaggctagtactgggacgccatcatctgcgattcctcagaagaggaaaagtgacctcgttcctacccaagcagctgactcgtcgaaaaaacaacagaaagttgctcaggacaagggaaagaaagttatgatcgatcctgctatcaaggcttgcgacatcatggttctctaggacaagttcgtgagcgatgagtttgtttcaaaagtcgaggggactcctaccgaggatctactaactcatttagctgaacttgcctcgtaattcatgacaatgttttcgtgagcttttgttgcgagttttaaggatctcgatcttctaaagaactaaactcgactctttaagagggtctaaagaaagcaaaattagacgcggctgtcaaagataaggaagtcgaggatctcggcaaaagtcaaaaggtcaggtggaagtataggtcaagactctaaaaatgcgagtcaagaaattggaggaagacatgaaaaggagaatgtgacgaaggcatatgaccaggatatttctgataatatatacaccaccctgaccaaactatcgaaatttgacttttctattttcgggccagaggtagtcatgatggacaatggtttccgtaccatgtcgcctatcgagactcaagggctaggtggaaatctttttcccaatgatgctgaagctgcaacagttgctaaagtcgcagatggtataagcaaggtcgtaaccgattccattgctcctgtcgcttaatctttttatttctattgtcaaacttcttttaagcggtaca

SEQ ID NO: 311505 - DNA, 2296 bp, Cannabis indica
ttataggcaactactaggtttaggttagcaattatttggcattaaaataatgaaaatatcaactggaaatatctgcttaagtggccggccacaggtgtttttgggccccacttggattttgcagtttttcacaattttatttctactttctcaaaaacgccagttttccaattctaaccttttaaatgccaaaactaattatttaataactaaaatagattattaaataatattgttatataaattagtaaatttgattacatttaaatgagttttatttaaggcacaaaacccaatacatcataccaagctgtgaagggtaatcacgtagataaaactatgatcaaagatcatgcaagtctaggttttttgaagcatcgaattgcaagtataaacacgcataagatttaatggcaaacgaccaatgtatttagtcttaaaaacgaaaggggtatccttgaaaggatacattgtttataatatggaaaagaaagataattttcttaaaatactgctaagtacaaagcgcgagtacccgtgtaccgctcaaaagaagatcaaaaaaggaaataaaaggacaagatagtaggggcattgagatcatctattgccttattggtaccatcttcgacttcaacagcagttgcatcttttatgtcatcaccaaaattttttccacctaacccctgagtttcggtaggcaacatggtgcgaaagccattggccatctcgaccgctttctgtccaaaaacggcgaagtcaaaatctggcagtttggttagagtagtataaatatagttagatacagtctagtcgtaggctttctttgcgttctctttctcagtctcacgattacgagtaagtgaagtgttgccctcctttagcttcttagtttgctcctctgagttcttggccctttcctccgcttgatctctagccttgccaaggttcttgacttcattctctttggcagcaacatacaattttgctttcttcaaaccctcttgaaaagccaagttttgtttctttagaaggccaagatccttgaaacctacaacataagcacgcgagtaaactaatgttagttgggagataagttcatccaagtgggccaaaatgtcctcggtgggagcctcctcaactttggtaaccaaatcatcgctcacgaacttctcgtgtatgaccataaagccacaagctatggcagcaggatccatcacaaccttcttccctttgggcaggtccactttctgttgcttctttgacaagtcgatcgtaggagtggctgcaacttcacttttccccttctgaggtgttgcagttgaaggagttacgatgttttcctttggcttgcgaatgaagataggagcctgcttcaagaaagtcatatatgcaaaaagaagcatgagagtaataatttaaaaaattaagacaatattatcactagtcgctaaatcgtattacctgaagtttatcttgaagtctgcttggaaagacgcttctctattttctccttttgcgtctcagaaggctctttgtatactagttctcactgatgtttgtcgtctgctggaatgaatttgtgatctagcagttttgcagagttacaaagcaagcactaatcacaatcttgaactggaatgccacataaaactttagcgatttccaaacaattttttttctaggatagatcgagtcgatctacctgcaaatattgaagtggatatagtgtttgtagaaaagtgaaaataaaagttaagtgtaaaagtatgcaacgtaaggggtcggcgattgaagtcaattctcatctctggaatcttaaacgcataaaacaattttaatttctaatctcccatattggaaaccgtgccttcgacaccatttatttcagaattggccaacttactaaaccagtagaagccattgtcatgactaacactctttatatcataaaagaagctaaaatccttgaatttttgttccccttgtgtgaattccatatacattgcataaaatcaaggattttgcaataactatttagggtaagttgagtgggggaaacgtcgtagtgcattaggatggcctttacaaatgggtggaaaggaagtgtcaccttgcagtaatgaatgggaattaaaaccacaacattttaagttgggaggattactaggttggtaaaggaagcttcaccccgctgcattggcatgagcttagaggtagtagtgcgagtccaaatcagcttctcaaatgtggtcagataagacttttcaccaacaagactgttggaaattatttt

SEQ ID NO: 311506 - DNA, 1884 bp, Cannabis indica
actagtgatattgacttagaaagatacaacagtaagattattatatattaaccaagatcaatatcggtccagtccaatgtatactccatacatttgaaactagcatactttgccaatgttttggaaagaacatagcacttatgcaaagtgtaagtacacttcattgctgattatcacatcagtgtaaatccaatgcactgatgaaacaacgactttatctttcaagcatataatcacaatcacattccactgtgttgacatcattgtaattgtaaatgactatatgatctagacttaacagattttgtatatatcaaaccataaacatgaaaacaacatgtaaacataaatgacttataatcttttattgataacaaatcagattagattgaaatgggttttatttagggcataaaatcccaacaatactctagttcctgctcgagtattggtgctatgcattcctatgtgtcaagtagagtgattagaaatttaaataagcctagtgacattttacctaatgcttttggtaccttactggaaactagagaatcggttatctgcagcaggtgggttacgtcccttccaatacacgtggaacgtagagaattgtcagtagatttaattgaattgaatctagaatattttgatgttgcaatgagaatgagctggctagcaaagtataacgcaaccattgattgtaagaggaagatggtaacttttcaatctgagggtgaggacccatttgtgtttgtgggaagggttcaaggatcttaaattgcaatagtctcagcgctcagggtaggagatttgttgtgggatggatgtgtcggctatttagccagtgtagtggatatcacgagagaagtaccaatacgatgtgaatatgttccagtggtacgagggttaccactaaagcgagagattggctttgaaatcgaattaatactaggggaagaacctgtatctaaagcttcgtatcggatggcatctgtagaattaaaagaattgaaggttcagttacatggtatgttggattttcaattcactcgaccgagtacctaaccttcgggtgcacctattttattcacaatgaagaatgacataacattaaggatgtgtattaattactgggagttgagtaagttgacgatgaagaacaagtatcctttgccgatgacagacaatttgtttgatcaactttagggaaatactgtcttctctaagatcaatcttcaatctagttatcacaagttgaggattcgagaggaggatattcccaagacagcttttcatacccagtatgggcactatgaattcctggtgatgtcctttggattaactaatgctccatggacatttatggaccttatgaactgagtattcaataatttttagataatttagcaattgtattcattgatgatattctgatgttctctgactcaaaataggaacatgagaaacatcttcaaatggtgttacaacgtcttggggagcatggactctatgctaagtttaagaaatatgagttctggctgccccaagtaagtttcttatggcatgttgttaacaagaatggcattctagtggacccaacgatgattgaggcagtttgagattgacctcgacccaagtgtaatatcttagaaattaatatagtatttaattgggcatattttattaaatatgtaattattttagtaatgaaataagattatgatcttactagggtaattagtgaggatttattaaatgatcatataaagcgtaatttattaattacgaagattatattgagatatgttggtatcgaggatacaatttttgaaataaaaaaaatattttttgggcccggcgactgtggaaacttgacgatgtggt

SEQ ID NO: 311507 - DNA, 1521 bp, Cannabis indica
ttaacagccaaaaatggacggaaagggctaattgctaacagaatatcagtttaggagattttaccaccaaaattttagaattgggggttagttgcaaacacctgaccactttaggaggttatgccgcaaattaccttagatattattaccgccaaaaatcaaacttaggtatttatttgtaactaggagttaaatttatgtatttatgccgcaagttactcttaaaaaaaatcttaatatagaataccctatgaaaaataaaacaaagcatagtagaactttatcctaatcttccatcgactcagtagtttgaatggtgaattgattgtacttatgactcatcgttccttttagatctggatacaactggattctcttttggctgataatttctctatagttttttagagaaacaagcaatgtttctacaaaattaatttttaatattacttttactattattaagataagattcgttatgcttctaactatgaaaatattatacatataaatatatatttaaatgtgaaaatataccttatctgaatacgactttaattgaactatagtacattacaatatattttccacaacatatttgaacatcataggatctagtattctgagaccatcctcgagttgtacatatgtcattgcactaataatttatacataatacattagtgttggtgtgaatgtcaatcaagttcaaatgtcaatttaaatgtaatgagattactgtggtgtagggagacattttattctgtaattttaattctaacaatcagtttcttcattgtcgttgtaaattacaattctcttattacatgaatcacatgacatataataaagttgtttggtgagattttttaatatgtttttagcttcaatctaatagtatgctttctgcaaacaatgagttatgtatgttaaaaaattcaaaattatatcaataaaaaaaaattaatgatatttatttaaatttatatacgtgggatggtttcaatttcatcatcaaattggtaatttaattgttcttcacatatttctattttgctaagatgagtttggagaatatagataagacagtatttgaatagtaatattatttatttcttctttgaaattttaagtccttaacatttaaaatttaatgttaagttagttaataaagtaatagtcattcaataatatctaatcaaaaatcatattaaataaaattagattattttatgtatgagttgttggagtttgactcaaattatttctttatttatttatatttataaagttacaatttgttttttttggtaattattaattatgggataaggaaagtcttggttgtcaagttttgaaaaatcttcttacggaagctttggaatgtcttagtctccaagttgtcttgatgcccaagttttgtaactttataaatatgtgttttgtgtgagaggtgtgtgtgagaaaaaaaatagtgagttgtgaaaaagagaagcgtgtgagtttgttatgtggtgagag

SEQ ID NO: 311508 - DNA, 1081 bp, Cannabis indica
ttgttcaagcttgggttaggactattttcatgttgaatagtcaagtaggctatgtaattttttttttcaactttaggatggacctgacagagaaatgcttctccgtgaaaggggggttagaaccgtctagatagtttttctggatatttgagattcatatgtttatgcatgtgtatggatttttggggcttgtcgattggaatgaaactctggcaaaattttgttcttggatcttagtgtatcacttcaagtagcttggtttccgttcgtgtttgtgttggtagcaatggatctgaaccaagattttcacttttgcgctgtggaaatcattgaagatgtacctgctgacctcgcggaagagatgctcatggaaggaacccaagccgaggttcctactaatgtacctaaccaaaggtggtccttcagactatcccagagggcgaatctatctaggatgaatcctccgtgaaggctaaagggaaaaggaaggccaacacccctccctctacctaaattttcaatgactacatctaggagatggatcaaaaggcgaactatttccattcttacggaatgttggtggcatatgccaacggttctggacttcgcaatgttttagggtttatgtggcataggatgtccaccacgagagaatctgcatccacgagcgtggggggattcggctcttggagctggtcccatatttccaacagagtgcatcttcagttgaggtcctactttgcaaactttattgccaaggttgagatagcccctttttaaatgatcccctcatcatacaagtttttggctgggtggtatggtatattttttccaagatgaataatctgaaagtgccttccctggaggaaatcttgtacttttacagtgtgaaggccaacccaataagtacaaacaacaagaaactaggcttctacagattggacaagcatcctaattctcattgtcccattaggcaaagtgaccacgcccacgacctccaagaatactggttcttttctttgggatcccattgaaagggtgccctcactctagttgaacttctaattaacaagtattgttg

SEQ ID NO: 311509 - DNA, 818 bp, Cannabis indica
tgccacctttgttggttttttatacggtggctggactccaaattataagcctcctccactccctacatttgttgctgaccatccatttatgtttatgattgtggaagagttttccaaccttgtttttaccggagctgttcttgatccacgaaagtaaacacctttttgtttaggactgtcgtttgcaatcattaaagaggagtctctacacttagttttcaagcttcttttgtcttttcttttggtactgaattttctttcttgtaataaagtaataattgaaatgacactaatataatataatgagtattctgcgtactgttttgtaaacaaatgcccgatataaatttgagtagtcactgagaaacaattaaacttagaaaactatttttttcatatgactattttgatttcatgacaggaaataaatagtatgatcaaatcatgtattaattaaagctgaaaatactgctagcaaatcaagtttaaaagtggagatttttttatattaataacccatctaaattttaataaatcttaatttaattgttagcttagaaaaaaagaaaaatatcaagttgtcacacatggatgaggttgaacaattgttctattttgttttcttcaaataattgttttattttctaatattcaaatatctaccaggattacaatttacaacaactacatgcctatattagagttttggtttctttatgtataagtgcatatatgtttatagtttttatttgagtgtttggtacgtaaattataaattttaaagtgtggttaaaattttattatattaatgattatat

SEQ ID NO: 311510 - DNA, 3239 bp, Cannabis indica
aatgggaaactcttctcaacccccgaatcaaataacatcacctctaaagaagcaatatgctttcttccaatctgaattgtcagccttagtaaacaagttacaaatggttttttcctagtgcgacaaacaaatagcattctacccttctctttttcatgctctttagcatagtaatgtttcctaaaaattatggggtctactataataccaaacttttcagtaaaatgctcaaggctcaggagcaacctcattgggcataagttgcccatgagatatttcataaagactgagtatctcagtcaccaaaggattgaaaggaaactgaaatccacaatcaaaagctactttgtaaagaaaaacccaatctcccatatcccaatcggctctctcataagacttaggcagtctcatttccacatttgaaggtatgtcataaacaattctccattttttcaaatcaacatccgtcaaaatacattcagggttcacattaaggaacccggtaggttcacaaaaacatacatcttacatacatttgtaaggaaaatataactaaattcttcattacatgtataagagtttctctctatttttctaaacaaaatttagatccattgttctcatgagaactaaaactaaagaaaaagaaaaaaaaaagttcaacaattggaaagttcaaatctttaaaagagagagaaatgtgtgtcactctctttcaaaaaataagaaacccaaaaatatctttgagcagatttcacagagccaaaatgaagatctttccaacaaaaaaaaaaagagggaagaatggacttacaaaaattgctgaagaaagagaaaacctttaatgcccaacaactaagtagaggtcaatggccaggagattatctaggcaaagtttctttgccattgagattttttgtctgaactgaacatatataaatataacatatatgttcaccttttttgttttcttcttttcttttttctatttaggttttatatttacatatatagccttatatatttgaagatattggatctgatagtgggccatggcccgaatagctaattataattattatttttttttgagataaaatgatattgattgcttacattttatatttcattttactgaaattgatactcatcatatattgactgctactattacttgaaggctactctattaattgaccgctactattattaccatatattgagtgttgaacactatcttgattgctactttatgaaagtggaatcaatcaatgattcgattgaaacacttttaatgagtgaactataaattgagtaatatgagtcaattaacagttgactgtgccaatatatggatatttgctactctgttaagacaaataataactattatggaccttacatgttgactgtaccaatttatattttacgaatgaagacttatttcattaaatgactgctactttctctataacgtaactataatttgagtgctattcatcttttatgtccaagtaaattgagtgttgtatacaatttcatgaattgactgctatttatttcattatttttggtaaattgattgatactccactaatgatattttataactcgaatggtatatctcttatagaattttattgatactttcttataaattgggtgtcaaccattacaataatttttaagaccaattccaacttttaaagatcaatgtgactgctactataaaagcaagggacaccattcccttgagtcaagtttctcatctcaactactccataaatcatgattggtcgtagtcaaaatcagtctacacaagcttgaatggaagaaattcatccacattttaacacacatgctaacgtgcccgcaaaatgggacatgcaccatataatacattattcacattttagagtgacaagagcattcaactatgctagccagacgttctctgattcaatttaacataaaacacaaccggacgaacaatctacttcaagaagggacctcataatttgggcttttcacaataaaaactctaaacattatttgagtttaaaatttatactctttaactcgagaaaaactcaatttaaagagtagggacaaactatacaggccaaaattgggctcaggctcaatatcatatgtgataaacccaaagaatgttcaaataagattgggttaggctatttgactaattatgatggtacggtcacaacatcaagcctaataggcccaaaacaatatagtcaagtcagacattaacattacccatgacccgtcattgagctcacaatgatccgacctgtatatgataccgagtcttatcactcatctaataacctttgaagtggtcagtcaaactgaccctgcaaataacgatctccctgatcaagtggggaagtgcgcttctaaaagagggtgagcggtcatgagtaatgtccttccatggatgcctataagagtcactctcagttactgagagggagacatcaatttttagtcatctgaatacttcttacttatcgttcactctctcattctctctgaaactacatacttatttcctagttcgatcatttattctcattttttattacattgtgaacaatcttgctgacttgaccgtcggagtcccttcagtcggcaccattccggtgtcccaaggtttcccgattactctcttctttgttctacaggtggtgcccgcgtacgatcatcttctatcgatcgtggattttaccatctataatacccatgacactttttcaaaaaatatgcttagaaattgccaaggttgacaaaatatcaacctaggcgctaggcccaacaccaagtgccaacctggccactagatgactctgttttattcatggaaacactttaaccttaatatttgacaaatgatatttaacattaacattttacccttcaatgtattttatccttaaaacacttagctacctataaatgatatttcagtaaattaatataattactgaaatgaggtctcaataatttatctctattaaaccaagctcgaaataaatcatcgttgcacttctaaatacttatagaagctatagattccatatctataattagcgctcctactcaattgagctaccatgtccttaatctgtatgtcacaagaagatccaattgattgactttaacgaacaaattaaagaacataaataatacaactaagattgagcctaaccatatcagga

SEQ ID NO: 311511 - DNA, 1397 bp, Cannabis indica
ctcaatcatagtgagtaagacggtggtaacaaaacccgaaggagagaaagagattcaggtttagatcttgataatgctcagcgatagaaaggaatcaagggctagagatcttgaacgaaatgagtcattatattctgctgcaactaatgtaaggttttcttaaacccttatgtgtttattttcattattttagagatattcatatttaggatgtcaatggacatacttgttagtaaatctaaatcctggtaaaatattcccaacaaacaataccataaggcttctctcgcctctattgcaaatgaagcatgtccctctaatatcccaagaagttcacaagctatagccaaagccccaagtacttttgttcattggcttccaccagcaggtggtacttataaaatggatatagatgctgcttatgatgctggaggtgcaattattggaataggagcaattgtttaagattattttggagattattcctgccttttctaagtcaattcgaaaggagatagagattactgcaatgatttacagtacaaaatggactctttcaaactcaattaaaaaatacatttcatttcattgaagcggactctctcttagtaactaatgttgtaaacaaattatcttctactaattctgtaactcatttctatgatttggtagacaatacttcctatttccttaaagcaatagtatcccatgttaaacacgatgccaataaaaccactcatggcttagctaagtttgctctttgattggatgaagataaaaattgttcttgattggaggaaatactttctccaatctaatctattgctgtaatggattctattcgttaataataatatttttttaaatatttttttaaattaatttctttttaaaatatataataacaaatatatattgtaaatatttctctttcttccacattaaggaaacaaagagatcattttctttttgtttttagtcaccttatcattaaagggtaagtgatgaaggatataaattgtatggtatgaaatagagatttaatttaagtacaaatttgaacaaaagaaacaaaaaacaaaaccttatgcatcacttattcatgtcccacaactccataattaataattcaatttttcaaaaaatacaaatggaatgaaagatttgggttttttcttataaagatgtttcacaaaataattgatatttttctaagtaatatttctaataacattcactacttcttataaagaagtttttaatcacacaagtttttttatgtgtgtaaattataaattcatctgtttgagaaaaagacaccaaatttaataaggggaaatttcaatttttgaccctaataatacaacctatatcaaaatttatacccctttataatt

SEQ ID NO: 311512 - DNA, 1364 bp, Cannabis indica
ttgataagatgaaccaaaacatacacaaatgaatgaaaaatacttctgtttctttattgatgttaaataaaatggattacattgaaatggagttttatttagggcataaaacccaacagggagagcttcaactactgtttttattaaaatctcattgccctcccaagagagaaattttgtaccccatgcttgaaggcgcttcaataatttttcttttaaatagcccaaagccgtagtcttgttacgactcatagaacatagaagaccaagatacaagctaccctcgttgcaatgcacatacccaacagctctggaaggctttctttatttctgcactagagttggcactaaaaaagattgaagactttgtaatattaactttctgacttcaagccaattcaaatttttgaggaatttctttgatccggatcgcttcctgatacgtagctttgcagtataagtagctgtcatccgtaaagagcatataagatatatggggagccccattagccacttttcatcgatgcaaccacccacagttctcatattttcaaaggagagtcgagaaaccctccgcacacagtataaaaacgtatggtgtcaaagggtgaccctggggaatacatctagccgggataatagggcttatctcgtgattaccatgtataaatattttttataaaatgcctgagtcatacaattcgagcctgggctcttgtccagatacatttggaataacgcttttataacttcttcatccgtatttagctggcacaacttcgaattaacataatcgagtaaaatttaatcaagacaatctataatctctctacaagatgtacatgctgtgtgaaaaagccattggaagtagttgaacacaacttcgaatagacccgtttcccatgaaaactagtttccggcctcatcacgcaactgaaaaatttgattattacgtttcctggttgtagcggccttgtgaaagtaactactactcgaatctccctcttttaaccaatgttgttttgccctttgtttccaataacattcccgccgttcaagagcttcaaatagtttttttcaatttcctgataccctgtattgaagcattgtcacgtttggagtggagagatttcaaatcagccttgtaacatgtaacaccctaactagcataagcgtattacgtgatttttaaacatactgtgcagctcgttgctaatcaacgagatttatggaaatcatgattaattaaaatttttgctttttaaataaaattataaaaaatttaaaaaaaaatactcgggatcccgattataaaacactttaaaaatgtttgctgactaaacaaaatacttgtcgcctagcga

SEQ ID NO: 311513 - DNA, 911 bp, Cannabis indica
atccattttaagggggtgcattgtagaatcacccaatgataaaaatactttaaattgcaagcaaacattaaaatagaataaaatttgtttccttttatttcattctatttcattacctccacccaatcactattatagatcttaaataaatgtagagtaattatatataattttcttgttgtttttcatattatttttatagaacaccgtaaaaatataaaaaagaatcataaaatttaagcgtaaaaatataaaaaatttacaaaaaaaataataattatgtaattatctcttactaatactatatatatttttttttggagagattgctaatactatatttattataagtatatatactttgtaggaaagagaaccattaatgtacttaaaattactttgcttctaagaaatgttcttgttcttcttttaaatgaaagtttggatatgaatttgtcctacttctcaaatttcattaaataatatgattaaatatggataaattaaagacaaaatggaaaaggaaaaaagaaaaagcgtatatgtttgtgtatagctttgttcttttgatagaaaagaaaattcaaatgggtgacttcatacttacattttaccgtttgtcatatcttattttgatatttatttaattaattaataattctatccacaatatttataaattataatatatctattttggcaaaaaagagttacccaacgacccaacgacctaaagtcaagttgggatataccagaatttcgttactcaaaaatcagtgtaatattccatcttgcttttctatttttcatgattcaaatccttcaaacactagccgtttagtaacgcttttgttttttaattttttaattacaaaataaaagtaaaatttttgtttttaaaaaatttattt

SEQ ID NO: 311514 - DNA, 618 bp, Cannabis indica
tacacgtggacagtccaccgtgacacttaactttgattttggacgaaggggtgcagagcaaaacggaaccagggtttaggtagttatgccgccaaaatttcggtttttgtggttaactgttaccaaccgtaaaatttaggtggtttagccaccaatatccctaaaaagaaatagttgtgtattttgtaaagtaggccaaagtgaaatactcaaaaattggctaagttaagccgtcccattacacaactcactttatttagggattatcttataaaaataataagaaaattacaaaaattaggtaaatacacaacaatttttcttcaagttttattaaaaataattgggcccgcaatttttcaaggagtcggccctctgttgtggtacttgcattttaagtgggaaacttacaaaaatactggaatttgggttaacttttacaaaaatactgtcacacggaaatcttttcaaaaatactgtgtttttataaaacaccagtaaaacacaaagcaagacaactcaaaacaacagtagaacaccagtaaaacatcagtagaacaccagtagaataccagtgaaaatttaacacagtatactgtagtatgaaacttataaaaa

SEQ ID NO: 311515 - DNA, 1975 bp, Cannabis indica
tatgtatgtattcatgcatgttttaataatataattgatatggtgtgatgattgttatttcttgttagttttggtacatataaaatatgcctctatcttcattactaaataattgtatgtttctcatcaacctcttttattgcctccttggataaagtaggaatattgtctaaggataaagtaggaaaaataaactacatacttggaaaatttaaattagactcttcactcaaaaaattagagcaatgctttcagacatcttatatatggtacctaacaccatattgatgtgttgcgttaattggttaacacttttctatgttattaaataaaaatgtgtgggatctaaaatttgcaccaataacaatacgacactcttatgatgcttgacaccataagaacatgtgccacgtcttttaagattctttgaaagtgtgaagagctagtcattgtttgtaatagattttgtgttgcttatataatttttttttttaaaaaaatcagatgtgtatattacaactacaacaacatttacatctccaaacaataccatattaatggactgaaagtattatgatcttccaaaccagtcaaaatctagcctagaaactttcttaagtcatcagcaatgcaagcaaaataccaaatagttaaatttaatgatttataaaataccaaaatactactaagtatctattatattctcgatcgtagctatttaaatggtatagaccatttgtaatatcctgataagcctaatagtaaataattagtgtatataattatattatgggttaattaaataataagtgagattatcctactaatttagttcaacataaattttaaatttgctataagtggataaataagcgtaatttataaattatggagatttatatggtatatgtgaatgtaatatgagttaccggtgtaataaaaatattttcaagtttgacgactttagagagtcgatcggggctaaacatgtcaaaccaatttaattgatagaatttatgggaatattatgataagttgataatatgggtattgggataattagaagtatgtgggatttgacttagcgccctagaagtataaattttttagtagctaagaaataataagataattattaataataaaattttattatattatattattattataatattattttttattataaaacttatcagtacgttttgattatatatattgatgttataagattttttattttaaaaaacagaacaacgaaaacgaaacctttctcctttgtcaataaattctttctcctcttatattaatttttttttcgatttttaatccaaaatctaacgatctaagctccagtagtagcaggatagaaaatcctcctagcgggaaaacttaaggtaaggtttaattccgttttaagtttaaaacaattggtttcgtatagggttttgcgaattagaatagttatgaaggttttgaccttataggattgttctcgggtagtcatgggactacttctgatattttcttgctaaaattgaggtgattttgggttagaaattgagtttagaactttttataacttaagttcaaacacaagtggcgtttgctaattacgggctcgattttagattctattacgcaagtatatatggtagtatatatggtatatatgccctatgaagtttggggtgattaggacaggttctggtagcgtttcggtgagtgcgtaaatttgaaaaatcatatttttgcccctgataaaccagtttctagccaaccggtttaccatttcgggcagcctcgggaactcgggaatcgtatttttatcataacttttcactcgggtgtccgttttggacgttctatataccgttttgaagcttgcaatgagctctaccatatggtgtatgttttagagccaaaatataagttttattttttgaactacgagttttggtaggaaacccta

SEQ ID NO: 311516 - DNA, 1264 bp, Cannabis indica
cagagcaaatattcagcaattcgcgcagagcgactaacacttagcaaattcagctttcgcatcgtgagtcatcagcacaatccctataacttaaggcgcaatttacgtggatatggcatacacacaatcccactatcagtgtattcagcctcaaccccacgatccttctattcagcattgatcccatgatttttctgtttatacgcattgtaacgagaggggaaactcttcctctccaacttactagccctataaatagtgatgcatattcactgggcaataggtcgaaaagcagttgagctaagactataccctaaatatgttacctaagaattatacattcagagatactgttgtcagagctataagaaaatgaatctttctccttgatcttaagtcaatacaaataacgaggattaaggtattaccgaactgctcggggctgaacctctataaaattcctgtgtctttacattgctttattatatatctattgttataaatcacttatcgcttattaaaatcgactcgttgccgttggctaaaaatgaggtcaacacatttatttttcatatactaaatgtaaaatttttacttaacaatctcggtatgtaatttcacgcacgaaaattaattaaaaaattataataaaagattaacgataacacacttacgttatgttttctactattcaattttctctataaaagaaaacgaatctctcacagaaaatatgtattatatataggaagatcctaattttttttttttttgcccattccattaatagcttcaagtatactatcttatgttgatccaatttttttattttgcgaagaatctatttaaatataatttagttttacatgaaactatttttactaacgtgattagaatataggattgtgttcggaaattaatatttaagcatgttgcttgattgttgtatctgtacagcatagttaagacagaacatccatatatatagatattaacactgaataaaacaagcaaagatcatagaaatacaagactccctacaaaatattctgtttttgttctttaccaacccatatattttcttactaaaatcggcggagccagcggccagccccacaaataagacatatatagggaatttttttttatgtaaacgagaatcataattacatacggttataaaaaaattacaatttttcatctggaactttgacatatatcaaatcatgttttcggaactttttttgctgttaaaaatttcccc

SEQ ID NO: 311517 - DNA, 1456 bp, Cannabis indica
aaccgcagttttaaccatcggctaatctacatgcttaaattgattgacgtttaaattgtaaattcattcttgacatcttaaatttaaatttattttcccatcttaaatttcatttcccttctcttaagatataaactcccctcccccctctcccaaaaaaaatcatatctcattttgtcaaagtcgtttgtaaacttcatatttcatttctcagctctctctcttccgcgaccatgagccacaccgtccctctcctccgcgaccatgagccactccgtccctctcctccactctcttgtagaagcataaaggtaagcacaaaacattctcttatttgttgtttaaatttttattagtcatgatttagtttgttgatcttgatcgtgtatggactaatatttgtcctagattcttaagtgctactgtaagttgatttgatttaatatataaatgttttctctaaaaaaaaaaaaaaaaaaggtgtttcaaactgcttttttgggtgggctatcaaattttcttcaaaaatgtatttaaaaatttgagtgagaaccgttgctagttatatgtagctccacctctatatgtcctctaacatattttatatgaacattattattagacaatgttgcctagtattattttgagaagtcacattagttaataatatttattatattaaattatatgagatttaatatttaattattttaataataatattacaccttaaacttaaagaatatagtagtacaatttaacatttttcattgtttcagaaagtggcatattttggtatcatttcatatatactttcgttgggctattcctattcacatgacaatattcatattgttatattgttgggttattagttagtggtatattaatttatgattaagagagagcgtacgtaatactttttcttttattgggcacatcaatcgtaaaaaaaagtcaaaagtaaggaatataataatatgatataatatataataaaacacaaacaaaagtgaagtttcttaattgttccaccaagtatcgttagcctgtcatttgctgctaatcccttttccatttttttttttaatgatattgttcatattttttttgaattaaagttgataaccaaattaagactaggtcctcttagataacttaatttttatatttatgttctaatatacaaaatctaaaattaattataaaaatcaatattatcattaatacttattaaagatatataaaataattaactttatttatattattgtaataacttataactataaaattattttgtttattgaatagtattaataaatagtataaatatgtaattaaaagatatagtatttattgtaaactaaaatttaatagatgctatcttttgtattacatttgatataacttttaacttagaccaaatttatgacacacatattatacatcacat

SEQ ID NO: 311518 - DNA, 1702 bp, Cannabis indica
ttttttttttttttctaagaaacactttgattaatccatttttcatttccattttttttttcaagatagttacactcttacaatatttatttcaaatccaggaacagttataaataaaattatctccctcattatagcatgtgatctaaaatttgaaatatatatataattttgaggataaattgtagcaaaattttcaataggttcactttaggagcaattaaccctaaaacttaaattttagcggtaaaactctcaaaatcacaataccgttagcaatttataatttttatctaacttagtttctttttttagattgattacttactagtgataaatcacattcaacggtctatcataagatgaactgcccatccaggccatagaatcttttccacgtgtcacccagatagataacacatcaccttatgcaaaaattgggataacatttgcccccaagtccgcatagggacttcttggtgagacttattcggtcaccaagctgatcaaatgggtgacacatgttcggtcttcaaaccattcttgatccgatgtgactaggcggttgtctttacgatgtttggagcatttaatgctgtcttggaggctggacctcgagacatgcaatgacggttgtcaagtacagcgtgcatgacatttgcactttttttaatgagcattaactgtcctttttcgtggagaaacccaaaatttaaattttagcttacgaaattgcctctttaacagcctatattataggtcaaaaactatcttatactcgtataaccattttaattttcaaacaatcaaagccatattttcctttttattccactcagagcttcgaagagttcttgatgaaatttcaccatactgaagccatctatgagcattttttaagaatttgcgaacaatgagtaaattttctttcacctttctatttcttttaatttcatgcatgactacttcgtactattctggaaaattttatgttcttgaaactgttcttagatgatcttaagctaagagatattagggcttttaattgctaatgttaatatacacaggacttctaggcttctaaatttctagcttttccttattttgctaggaattatcttaaatcgcccatttggggccttttgaaaattgtcctgatttttgctgctctttaaactttttggcttgggaatttcattgttggaatgaaattttttccttttttcttttgaatcagcctagtcggcatatcagatgtgttttaccgtctaaaaattcgtacctctggccggttctcacctttttgtcttctttcttttgtagatgaacccttgtgagtactaggaaggtaaccaccaaatcaatagtgaccttctccatcttcttcacgagacccatcttcaactcagtgcagactcatcttcatctagtgaaagttcatccacctcaagttctgacgattgggaattcaacagtgattcctcggagtctccgaagctcgcaatttgacatcattactaccctgaccggttaagcaaagagggatacaattgatttatttgggaatagaatagaggttgaaggcattatctcactacttcttggacgtacaaggtccgagccagtgtcattgatattgggaatattttaccacgatctagatttactaacaagtatgttgaattaacatcctaaatatgaa

SEQ ID NO: 311519 - DNA, 1088 bp, Cannabis indica
gaattatcaagccttagggttttctagcaacgtgtttttttataaaaaactcggtctatgcaaatgagcaccaaatatctatcttatagtgtttaggtgatcacacttagtattcaaacacaccacacctcatttctctcataaatgagtattaattcattttgtaacaactatatcatcataattttgaattccttaaattaaattgtataacaacctttttattacactaattatgtatgatcaacacaagagttacaagtgataacaaattgtaactcatctccaagttacagcatgtaggttacaaagtgtaggttaaaccataaattactcgtttatttaccatacacttaatatatattattcacataataatatatttatcacattttaatctatacttattatattatcaaataatataatagaatgtgtgtgattcttttcgataataaggtccgaccgtttaccgagataggtcgagagataaggagcaaatagattgagaaagagtgagttgagataaagagagagagagtgattaattcaatttttctaattagccacaggtaagatgaggaaaatatgtaaataaaagaataattttgtataattagttgaaggtctaaattttaatatgggacatttttttaagcttacaaaataaaattttcctaaataaattaaccaaaattagcttttcttttttttagaaaaggaagtttaaccagtattttaaacatcataaattacggttcttaatacaacctttgataaatcaaatatgtcttatcaatattttgtatatattgattcacttttaattatacttgaagctagttgaagtgaccataaaagattgcgtcaaattatatattataatatataaatacttaaattaaaaaaaaaaattcactttcgttcatcgttttttatttaacaattgtaattgtatttaaaagattttcttttcccttctaatagatccctaaatctatgatttatctctgataatatggtatgagtattgttaacggtgttcataaaatagtcgatctaatttaattcgcacgatccaatccaat

SEQ ID NO: 311520 - DNA, 1153 bp, Cannabis indica
tagtaaatctagatcatggttaaaacataattcaacatcttcgacaatgaaagttccaaggccctaggtctgattgaattgtctcaaaaaaataaaaatgaagggaaatgtgaatgtgaatgaattccatgagagcgtatttgaagacggtgaccagaagatggcattggactcctctactagctacaaacctctgaaatatctaacgtcatcagatgagttatttattttgtagtttggtttttttctcttgaagtcttttccattgggttttggacttatcctcttgtgcaatttgagtttttttttgtcatttgttttgactattgtgtttttgtgtattctcagagtaattatttatttgatttttaaatgttttattcaaattctcaatctcaatgtttatgtgtatatttttaatttcatgttaatttttcctagtcgttgttttattggattctaagtgagtttagttctggcattaaccttaatcgataacggttttgaatgttgaatttttctatgacagttcagtgatcagtctcaattttgtgaggtgggggcagtgaagatggttttggtaatttttttttgaaagaagatggttttggtattgcatcgccatctttcacattatcgtccttaattttggcttttatttcagttaattaattattttgtatattgtattttgttaactttttaattttttcatttaatatttttaattttttaatattattctaatttatataattttattggtattatatatattatttatgtcatttatttgctattaatagtcattttttctcttgattttttccttgtatattatatttttgtaaagcataaatgtgaatcttttcattttattaaattagaaatttcataattctttctttaattatttttattttaattagatttttttattattaatatttatatatacttttacttatatttgtcttatttttaatacgtatagaaattgattaatggagtgttaatttgtagtagatattaatagggaaattcaaaaaactatccataaaacactctcaaattatatccctaaatctatatctattaaaattgcccatatatgactacatttgattttttccccataatacccctcccattt

SEQ ID NO: 311521 - DNA, 983 bp, Cannabis indica
ggcataaaacccaacacagggtttgggtctcgaatcaaggtcagggtccggggtcctaggtctgagtccgaatcccggaagcagttttgggtcctgggttcgggtctcgggtctcgggtctgggtttgggtctaggtctgggtcccggtccctgtaggggtctgggtccatggttcaatcttggtcttgggctccggatcccggtccgtgtcttgggtcccagtctgggtccgggtctcgggtcagggtctgggtcccgggtcagggtccgggtcccgggtcagggtccgggtcccgagtcagggttcgggtctaggtctagggtcccagtcccagtcctggtctttggttccaggtcccagtccgtgtcttgggtcccaatccgggttcgagtcccgagttagggtccgggtccgagttccgggtcagggtccgggtcccgagtcagggttcggggctaggtcccggtcctgggtcccaggtccgggtcccaggtgttgggctttatgccctaaataaaactctatttcaatgtaatcttttctattcaattatcaataaagaaacagatttaatttaattacttgtttaatgtattatttggttcatgtgatcatttatttacttatttgatttatatattcatccaaatccttattacattgatattcttgtttattgtgtcgtcaacacagtggaaaataatcaagattatgtgattaaatgtattcctatgatttatcagtacacatggtttaactgatatgataatctacaatgtagtttactggcacattggataagtgttatgtcctttccagggcattggttaaagtaagcttgggttggacgcatggagtatgcatcggaagggaccgatattgaacttgaactagatatgataaacttactgtaatatctattcaatttaatgtcacttagttgatcctagatcaaatgatcttaattctgagatggttagg

SEQ ID NO: 311522 - DNA, 2947 bp, Cannabis indica
ttaatgatgagggatggtttcctttttgcttacaatctataaaataggaaattacaatgattacatagttacaatacacgaaacaggttgccatatatctctgactcaatcccacgattatagggattgtcttcatgtctagacattatgagatcattctaaagtaattatctcttgtaagtagctcgacacaaaagacttctgcctagttcgatgttctatctaccatcctgcttaggtaatcgacaattatagatgttgatgaattatgcgcaggctgttagggacatttacctctgtgcaggtatcaaaaatgtgagacacgtgtcgcttagtcctcttgcaatgttaagtgaaaaggataacatttgcccccaagtttgtgcgggacctttcaggtccatgtggacttcactcgatgtagagtcttgtccaaacaagtgacacgtatcctaggcatggattgacgaaccaatgtgaccctgaccaagggtctcttaaaatttggctcattaatgctgattgctagctttgcctcgattcgcatcttaatgtccgcgcgtgaagagagtcattctgccagcaatgagtacataacgtacacttttagggggaatctaaggcatttaaaatttgaaatgattgcttcttcctttcaaacaatctataaataggattgaaaatcctaattaatcattttagtcattttcattcttgaaaaaccagagcaaagaagtttttctctctcaaattcttcaattaatttctaggaaactcttgccagcaccatccaagcatatcaaaagattcaatttagtgagtaagttcttcatttattttttacatttcagcttaattttttgggtttctattctccgaatcttaactattcttgaacttgttctaggatagccataaaattctaggtttaagatttagaaatttggattatacttaaccacgtgtttgattctaactgcgctttgattctaaccccacgatattcattttcagttatccatttggagtttaatgagaatcagattccaattcagagttttgaacttttgggttgaaaattctgtttctgaatgaaattttgtttttgattcctcaattagacctggtcgatataatcaacctgtttttttatttgttgcctcgaccaattctcatcttcttgtctcttaacttttgtagatgaaccctggtgagttttagggaggtaaacaccatatcgaccaggatctacttcaattgttgtacgaggatcatcctcgtctccattcctatttgtcctcatccacttataacctttctaaatctagctttgaaaactgggagataagtagtgagcacatgccttccccaaaacctgaggtgcaacaccatttttatcccggccagatctaaggttaagggtacggtcgctttatttgggaactcaagaaagggtcgagatgctatcttttgtccgactaaacatacatagtccgtctagacattgttgatacttatcctgagggccatccaaacctttctgctacatgtaagcatgttgccacttttgtcgtgactatcactaggcatacaaataaagttccatccacaagtagaatgatggcacaaactaagaagattatacggaaatcttcattgtctgacccacacgtcactcgtctcaccaccttgcctagtgctaaataggtctgacctgctagtgaagaggaggacacaactggggatgttgcattccaagagatggaggacatagtcaaggtctatcgtactactcctcctgaagcagaaaggagatgaggaagagggaggagctcgggtgctgctattcagtggcttaattgaagaaggagaactcgtgtctaaggtcagagaggttttggaggccagtgaagactacattactgaagagtacaccaaggccatccccctgaggaggcaaggtgcactaggagattgatgggtctctccaccatacgtggtgaccatggcaaagatgaagaatttactcaactggggttacctagggaatgtggaatgcttccttccctcctcgatcagcttgcgactagcccaggggacgattattgcgcctggtcgggagtccatactaagcagagtgcaatgttgcccttgcttccacactttaagaggattgtggactattaccatataagtttgactaaattcacccccaagggcctcagtctttatccaccgtgtttgtcctctacaccacaaaaggattgggtgagccgtccccgcatgacaggaactggcttttttatctgaactcaagtcccaagcagaataggtcgggatacttctattttttccaaatctaaaagaagtggttgacgggcaccactgccaccaaggtaaccaagatagggagctttgtggacgaatactacttcgtcaaaggaatgggcaccattgccacctactgtcaccctctagttcacactggagctcaggaatagggcacaaaagattcttcaaccgcctcgtacgtgttgcacagaacatctccctcttgacttttgacaccaattttgtcaagtacaaactttttctggctaattttgtaccaaaggctatgaataaagtgaaagaggttgcgcccgaataagagactgtacccgaagaggagactccaagcaaaagaggaagaaggcccctccaagcagccaagtacctattaagttgtctatcatgatcagggaagagcctgaaagacctggtcggtaatctgctctagtggcagaaaagggaaaagctatcctgacggagcaagagccaaaagactcttcagatgatgagcctccatctttgcttgtttgggagaatgaacctgcctaagtgcatggtattttaactcatatttaattttatctattttggcttatatcatacttgtttttaacct

SEQ ID NO: 311523 - DNA, 869 bp, Cannabis indica
ctctctctctctctctatctaaatcattctcagcccgatctccccagtgcccctctctttgagccccggtctccctctgccactctcgttgagccccgatctcatagtcgctggataaataaacaacagacgacaatgaatcttcctcagtcaaaagtttccaaagacaaagcatcttctcatcaagctttagcaaaatcacatcaaggacctcaaactgcttcttttgtggtttagcttggggtccttatcgatctttattcacacgatctcgtcctggtaaatggagagactgagctcaccattgatgatggtgacatcatgggcaacaagggcacattaaccagggctgagatgttgagctcgattgcagaatggggtctggttgtggttcttgaactcttccttcttccatgagagaaccgggcttagaatttaccaccctgagagagacgagacaggctcaacagcgagtgagaaaggggtcagaattggggttttttggttctaaggatttttgaggatagatgtaacaccctactagtttaggcgtgttatcgtaattttatactaattgtgcaatctgttgctaatcaatgggtttgttaggaaaacatgattaattaaaactttacttaattcacctttaaatgaaaataaataatcttttcataaacggagatcccttattattaatatttataatcgtattacaaaatattagttacaaaagttgccgcatagtgagtaatcaaaatacatcttgctgtcccaaagatcgtatactctaggcataaccaccctaacatgtaaaatcttcatctactcgcactcactgttgctcaaccttagctttgcctttacctaca

SEQ ID NO: 311524 - DNA, 535 bp, Cannabis indica
tctttttttaaaaaaattaaaataatatagagccaattattcattggccatttttaaaagctagccatgtcttattagtaaatatcaccatcaatcaagaaatgaagttcaaatttaatagaaggaatattgggtccataaattttactctacaagcttcccaaaatttatgtaaggaaatatgaagatgtcaatttctataacttttgtttgtttggacagtatgagatttgatggtgaaattgtttgtttccctcaaattctgtatctctgtccacattcaatgacttatattttcacattgggatattaagtcaattaattcaggtttaagcaaaaccaaaaagtcaaccaactaattaactaaactacctcatacacttacttacaccaaattgagacaatctagaataatacactctatatttcttataggattaattttgaagtattctcataaacttttatcatcattgtatcactatcagggccgtctcaaggtgttgagaggcctagggcgaattttgaaatgagg

SEQ ID NO: 311525 - DNA, 694 bp, Cannabis indica
ttgttgtagttagcgacatgtgacgacacatttgtcgacatgtcgggacatatgccttggggattttttctcacagattatgtgtatgttttagcaattactattgatatgtggcgactttgttcgcgatatgttgcgatttattttgtgatgttcggcgacacatttttatgtgttttaatatgtttctttttttttatcttaaattttgcagatgactcctaaacattatttctacaactatcgacacatatcatagacaatgtcgatagacatcgcaaaattcataagtgaaaagcaaatattttcaattgtcgataataatatcgctacatgtcattaaaattcatccctaacctttagcacacaccaaaatcgctagatatcaataacgacatcgccatacattgctgaactcgagaaaaactagaaaatgcagaatccaagcagttcgagttccaaaaagaaaacaaccaaattaaaagagtgatatatatagatctattcatataaacctaaatacaattaaatctaacaataattactaaataaattacatacccattttcttttttcaagatttatgttggtaagggacattgggttgcacacttagttgtcaagctaagttgatggactctggtaaagggtgctccggcaaagggtgtgtgtgtctgagagagagagagagaga

SEQ ID NO: 311526 - DNA, 1129 bp, Cannabis indica
aaaaataccatgaagactttagcaccagaattaagtgcattaataaccatctttctctccaccggaccagtgatctccaccttccgatccgccacagctggcggcaccgccgcgcaaacccaatcaccctccctaatattcttagtggcgggatcaaacccgggggcagatccgtcattatacctcttctttgcctcttttctacactcaagcgcgtacctcacgcgctgcttaaactccctctgtagctgcgccacaaaattaagagcgtctcttgttagaatcttcgcaaattctacgtcataacggccccgaatctccaccccctcgggcgcgtcatagcccgccgttggaaatggttttgccaccggcaccgcggtggcgccggtgtaatatgatcctgttcctacaccgttcatagcatataaataattttttttcttttgttaattataatgtatggaacatttggtatttatacgtgtatatattatatattatatagtgatgaaagagttatcgttatggggatgatatataatttatagaggcaaacggtgcatatgtggatttatgtgcgtaagcattatcgattgtgatgtgtttaattattaattttttataatatttattaaagtaaaataagtgagatttaatattaagttgagttttttagggtttaaaaatagtaatattatagtttataaaagtagggagctgattttgtgcttagaaatgcaaaatacgaaatgtattcagttgtacaataggtgggtttcaggatatgtaataatgtgtgtaaatttatttatgggtcctaagatatgtaataatgtgttacagggtacgttaccattttttaatcctaagtacctcttgatcaatctcagtcctcaaatcaaataactactccatctaacggctgtcgtatattacaaaatatatcccctaaagtacactaacagaacaaaatcgtgtccgtataaaagtattaaacactataaatattttttaacatttatcattcaaaatgttaaaagatatattaatactctttcaatattatatttttagagatacgattttgtcccgtgatgtacttttacggaatgtattccgtggtacatta

SEQ ID NO: 311527 - DNA, 626 bp, Cannabis indica
tttaacgaccttaaaagtccaaggggcatgatttggtacatgtcaaagttcaggggacaaaaatcctagttagcatatatgtcatgcccttaaacatgcccttattaaacgaatgttgttttttttcattttatttttattatttttgttgtttttttcattaataaaggataattagtattttttattatttttatccttgtagctttgatatatactatgtattaaattgtatttttttgaatttttagacttttaaaaatttcttccaaactattaagattgttaaatttaaaattttctgtccaattcaaatttactaaagtggcgattctcaatgtaacaaattgtgtcccctgaacttttgacaaattattaataatttttttgaacaattttgaaaaaccaatcagccctaatacctagaaacgttctcttgaattttattaataattttttctttgaataattactaatggttggtaggatttttttaatggaaatcattatatatactattttttcttttacttttatggtttggattgctctggtagtttttacttaggttgtgattgttgagttttatgccctaaataaaaatctttacaatctgattagttatc

SEQ ID NO: 311528 - DNA, 770 bp, Cannabis indica
tggacctataatatcccagggattcagacagcaaacacatggatcgaatccattatcgagctccattcccgaatcctctatatcatctaatatttcatcgtctgatagtagtgttgaatactcgagccctaacttgagccacaggagacccacaaaaattgaagaaccagaactttcttaatgcaagctttctacagtagttttgtctatcagttttagtgccttctgttgtccttattcttggtcgatggaaaaagggagagggagacagttgcaatacacagtgaaaactgtcgtctgcttatatttcaggtgaaagttcgttggagcaaaatttgacaatgaaaaattctgtatactaacatcattatatataaagaattgttcaaataaaaaaaaaataaaaatattatatattatcttatggtaaagttgtattatattactttatgaattttagttgtattatggtaaagttaggattcagtgggttgaggactaagtccaggattggaaactcggttggggtgagggtccaaagtttgggttccaagttcaggcttggggtagagtccaggtagattaggtctaggtttgattctctggttaggttggggctaggtcctgggtctacgctatgagtcaggtttagggttggaaatatttattttaccaggatcttagatctacttacaagtatgttgtttaaacaccttaaatatgaactttctaaaacgataaattacacatataaagttaagaaaatctta

SEQ ID NO: 311529 - DNA, 2442 bp, Cannabis indica
tgaggtgagggacttcataagtctcctaaaataataaaaaaaaaaaaatagttgaacattgttgaccgtattttttgttaatttagaaatttgattaaaaataagagtgaatgaagatgaaataaaaaacacacaggataaatatgtggtgaaatggtaatgaaatttgaacttacagtctacaagatttaaatttttacaatggtgaatctgaagaaatttcagtaataatacattccatttatattttgttgcaatttagtatagtttttttgttacactattcattagattggctcatgatatatacttaaaatttaggtgattttgttacaaactaggtggcgacatgttacgcatgtgcgaaatgtaaattttgtcggtatatttagccaattgcgtcgatgaaagttgccagcaaaagatcaaacatgaaagagccaaaacatttagccaaaacttttactgaagcatatttgctaataaaagcaacctgtactggcgcaatccagtaaaattgtgaaaattaaccatcttttagagaaaacattttttagaaattgtttatctttactggaagtcacatatttttacgggagaattcctacgtgcaaatattctttggcgggacagatgactttttcccaacgaaaatatgcactggcgaaagccaacaaaaagtatgtggaaaattttcgcctcgcttttcgataagcgaaaaaactttagccagcacaaattttcgccgataaaaatataatgaaatggtgcatttcatttttcaaggcttttattattttgtgttggcgcattaagaaacttttaccagcacaacgaattgcgccagtaaaagtttcttaataagatacgaaacgaatttttctttccccatttctcctcctcctcatcctcctcctcctctctctcaactatctctctctcattctctctatagtctctctctctctcctctctctttgtttgccacccactgtcgtccccgtctactccgccctgtcccctgtcccccatcctttaccactctatcctctctctctctcagtatataatttaaaaaaaaaataactctggccacctacttacacacttccaaccaccacccgagcgaaggacctttgcttccaccattactttgttattaattttgagtaaatcctaacactactacaaattacactattcaaatcggtcaacactactgttcatagcattgaccgacgtgaatagtgtccaaataattagacccgtctatttaaaaacgacactaataatattatttgcgtcttttgcttaaatgacattgttgtgataaatccaacacgtaagtatacgtatcattttaacaagtaatactcaagtaagtgagatcgttcccacgaggactatagttaagtaccaatcaattaaattcttatttctatttggcaatcgaataaataaattttgaactaaataaactaagcaaaatttaataaaacaaacaaataaaatgtttaacaatggacgtgaaattagggagataatttcaattgctttgatttcaattatttcaattgctttgattatccaattattaacactaattaaccatttttcttcctcttatgtgatgacaaattataaattaacctaaactctttttcaaatcataaaggtcctaaattgtatgccaattaatatttcaagtatgataacgaacgaaaaaaacttgaacacattccattaaccacataaaaatatgaaaacataaaagttaaaaccttagcaatatattgataagctaagaaataatacaaccaacataaaatttaaaaaaaaaaataagaagagaataaaatatcatgatattaatcatcaataatgggaaaataatgaacgtacaaattaagaaataagaacaaataaaaatacctgtgaaaaattttcattgtcttgtttacaaagagaagtcatagcttttctatcttgcacattgacttcttgtagaaattaaaacttttaaaaatactttagtagaatagatttataaaatttgggagtttttttaggaggaaagaataatcatcttcatctttaaatattcagagataattaggaattacaaaataaaagtctaaaagatatttggtagaaatgaatactatggggagtagaagagtttttttagttagtaaatgaaaaaacgagtttttgcaaatgtcaataatatatacgaaaatataaaactgtatacgtctgcagaagtagaatgtaattctgttactgcagaaaccagtttttcaacgacaaaacagaacaggcagaatataaaaataattgcagaaaattaaatcacttgacaccagagatttgtacatggtatcagtgttctttcgaacactcctagtctacggggccacgcccagagaatgaaatcaatta

SEQ ID NO: 311530 - DNA, 2366 bp, Cannabis indica
ctctctctctctctctcgctcttactcgtgcacctcactctctctcaagggtggtggtgtaatccttgtttctcatattcacagtgtctcatgagtggagtacacactatgatagtaaaattcattccttaaaatacactacacttgtcctattgtgttgaggattggtctgaaagacactggtataaattcttcacaaatcaattttcttttggattggatgatcgttaaaagatataaaaatcgaggatcccctgatagacattaagaggtaaaatttattttcatgtaatttagatataatttataaatatggtgagatcttgtggcttatggttcaaattagtttcatcataaattgtttttctaaattttttttccgctttctactctgatttggactatagaaactaacaaatagtacgagagatgtttctatatttacataaattgaatattttgaagtgtgtttttatgcatttgtatatatgtatgatatatgatgaatggatggttaatctatgtttgaatgtggattgttaattatatagtaaagtggttaaaggagcctatctgttataagattgttgaggactgttggctttcggatcaaactatgttggtgaagaagaagctcaacctttgtgcctctaagttatcgcagtggggaaaggaaattacaggtaacttccgtcaacgtatcaagcggtgcaaaacagagctaaaccagttaaagaataagagagactctgcttcgattcaggcttatatagagatgaagaaaaaattgtttgacatccttgatcaacgagaagtattctggaagcaaagatctaagcaaatgtggcttaaagagggagaccaaaatagtaagttctttcatacaacaacaagctctcgtaaaaggaataatagcatcactaagctgaaaaactcgcatggtatatggattgactgggaacacggtttggctgaggttatttatgagtatttctcagagttattttcttcgtctgatgcccattgtgttgaagttttggaatgtgttacccaaatagttcctgagatgatgaaccttgatctttgatagaccaattactgaggaagaagttcataaggctgtgtttgatatgcatccggataaaagccagggaccggatggtatgacacctgcgtttcaccaaaagtgctggcctattgtgaaggcggatgtggtagcctatgtccaacgttttttcgaatatggtgtactggaggagacatgtgctactgccaatgtagtattaatcccgaaaaagaagtgttccgattctatgaaagatttgaggcctattgccctgtgcaatttcatttataaagtgatcacgaaggttatggctaatcgaatgaagccgtttatggatactatcattaccgaatcccaaagcgcctttatccccgatcgattaatttctgacaatgtgcttatctcgtttgaagtccttcattatttaaaatggaaaaggttaggcaagaccgacttcatggctttaaaaatcgatatgagtaaggcatatgatcgtatcgaatggtcgttccttgaagctattcttaaaaggatggggttcttggacagatgagttaaaccaattatgagttattttagggttgcacacaggtcagattttttggtttttggatggtcgggttcggtttttcagattttgggtgttttaaatgtgtaaccgaacccgattttcggcggtcgggtcctgcgggtttcgagtcgggtatggcgggtttgctgcggtcgggttcggattgacacccgaatcaatatttacatagaaaaaaatcatagtgtacagtttaaatttctggacagcactgtaaacgaaaaataaaataaaaacttgtgtttatttcactctggtatagaaagtacaagtaataacttttatttttatgaaagtaaaataaaaaaagaaaaaataaaacaaaccaacgaagcttctttgttaagtaaaacaatttgaatatgcatatcaaataaaaagtacccacgtggcataagaagtatgacctacttttataggtggcagaggtaaagaaaacctctatctcacactttcttttcttattttattatccaccataaaaatctgtgcttttgttttgactttcatagaacgaaaatttgtgctgtgcttaattttcgggtttcggattaacacccgaaataatatttagcttattttaaaatctgaactcgatacccgtgtggagtattttcggattggagccgactcgaccacacgggtttttaattttcaggtttttttcggcagcgggtcggggcgggttgtcgggttttcgggtttgcgggt

SEQ ID NO: 311531 - DNA, 860 bp, Cannabis indica
tcattaggccaattatagctattggtggccatctcctccaataaattaatggcttcagttatatgtttagataataatgctcctccaacagcagcatcaattaaagtcctagttggtccattcaacccgttgtagaaaattgagacttgcatccagctctcatagccatgttgtggatagtgacgtaataagtctttggatcgctcccatgcttcataaaaaggctctgaatcaaggtgtctgaattgcccaatctcacttctcaactgtgcagattttgatggaggaaaaaatttcaccatgaactttctagccatttcatcccatgtacttatggaacatggctgcatagattgtaaccactttcttactctatcccttaaggaggaaggaaagagtcgtagtcttatggcgtcatcagtaacaccattcatcttcacaatagcacatacctccagaaatatggctagatggatattgggatcttcagtagccaaccgaccaaattgattatgttgcaccatattgattaaagcaggcttcaattcaaaattattagaagcaatgaatgattagcaatacaagtcagattttaatttaccactggtaagaaataatcacgaacagctcgtggttgtgcatcaattacaacaagtgttggttggttgttattaaggccaatgttgttattggctgccatggtgaagtctagttttttcttcgcttttaactgctttatagttctttcaatctcaggattcagcggtgtgagtggtgtagcacttcagtttcttcgcataaactgaaccacaaagcaacaaacaaaataagagaaaaaaaatctaatttaaagcaaaaaa

SEQ ID NO: 311532 - DNA, 3883 bp, Cannabis indica
aaaaaaaaaaattagtgttaaaacaataattttttggtattgatttaacaccaaatttaaattttactattggagataaccttaatagtgtgattgccgaaattgtgttttccgtacgggaaaagattaggtagcttgtacaattccatgtcacctggaaatgaagaaaaatcaagtgaaataattcagtttgtagatgtaagactatgctaaacaaaacttaaatggattatatacatattattttttaatgataaatgaattatatcagtttttccagcaagatgcattttatttttcagcaataacactgcggaggggatgaaaagaagcatcatccaggaacttggtctcaacaacactattgagaacatcaattacttgggtcttccgttgtttaggtctcgccaaaaaaatattgattttaatttcattctggataaccttgtctctaaacttcatggctggaagctgaaattcttgtccacggcaaagtgagatattttgatcaaatctgtggggcttgcgttgcctgtttataccatgcaaactataatgttgtccgaaaaactagcctcgaatatggatggtatggttagagacttttggtagggctgtgagcaaggcaatcgtggtctctgtttaaaggcctgggatcacttgtaccttcccaaatctcggggaggcctcaattttcgcaagtcttgggaaatgaatcaagtgttattaaccaagtggggttgggcccttctcaatgagaaccagtcattgtgttataaagtattaagggccaaatatcttaggggtaaaaaattcttctagtgttttttcaggagttctgattcttggttctggaagaatgtggtgcgtactaaagatatactgagaaaaggagcatgcaagcttattttgaatgagaaagatacgagtatttgggatgacccttagataattcgtagtcggaattttgtccctaagtccattacctggccttcgaagggcttgaggcttgttgcagatttactcttacctaatggggattgggacttctctaagctctcaaacctctttgaccaagaaagaatcagtaacattatcaaaggtggcaagttgagtggttaggagtgtgatagattggtctagaccaaggagtcgaatgggttattttctaccaagcccgcctatcttatccaagctctcaactgtgctcccttgtgctgtgttgccccggcgcttcggaataaattttggagctctaaaatcttggagcggcataaagttttttggtggagtattctttcatatgcactgcctatccgtgcttctcttgcgaggagaatggctattgaggaggtctcgtgtcccatgtgtggggagggtgaagagaagatggagcatcttttcctctattgtaactttgcttttcatctctgacgttcgtcaccttgaggggttatgccgatcttgaattttggggcccgtgtttgggattgggttcagttcctttggaatcttagatataaaggggtggacactgacaaattatttctctatgcttgttgatacaatctggagagctcgcaatgataaggttcacaagaatggtctaggtagcattatacattatatgcttcaatagtggttgatacagtctggatagctcgcaatgataaggttcacaagaatggtctaggtagcattatacattatattgattctatctcttcttgttacgcagattatggatcttgtttacttacctcttcgaagactgttgggtctactcgttgctcgtcgcctcctgaggattgggtcaagatcaactgcgatgtcaaagttggtttcgaatccatgtgtacggtggccaattctcgagatcacaaagagtctattttgtgggtggctacaaacttgctcaacttctctgaccctctcattggagaagttgtggcttgtttgctagccatggagattgctacagcgaggcatcataattttgtgatggtggagagtgattcaaagacggttatcaagaatctgacaggtgctggcactaattggggaattgataactatgtgcgccaatgtaaataactctctaattttatgttatgttgtaatttttcatttatttctagatcttgtaatttcatggctcataatgttgccacatgggcttttgccaatgacttatctggtatggtttatatttctttgataccggcttctgtcctttgtaatgaccatgaggtctaactttatctatttatatgtgattcgcttgttcaaaaaataaggtttcattaatgacaatattttaaatttatgttatttttaccagtatatttaattatgtatagcatcaaattaaaaattatttatattattttttagggaaattatatgtaaaaatgtaaaaaaaaaaaacgtttgaagtgtaaaaatgaaaaggctcctattttttatcattgtaataataataataaagttaacgataaaattattacatttttaataaaatcaataattaaacattaaaatttgtatcacgttttgtaattattaattaaattataattctaaaaattaatgcaaatgtatttcaaatttattttttctactaaatatagcataatttccatatttttcacttatgcataaattgtatctaaatattactgtttagtgaaaaaataatttttgttgttactaaaaatgatatatttagtcacaaaaaatttatgttgtgactaaaaaattacatttagtatattttttttagtgatttaaaataaaatataatttgatttttaagaaaagtatttatttttcaaatttaattaatatgtatcaaaaataaataaaataaggaaatttgattttttcttcctctactacttaaattgttttcttccttttaccaattaacaagcaacacccattattgctataagaaataaatgaagcatcaataattacaagtgtattaaaattaatattctcaattataataatatatatagaatagtttttattttattttaatatttttttaaaaaaaagatattcgaaatacaaaagaaatagttctaaattttaatattgaatataaatctaattcaatcaagttctggttcttgatgccccatataatgtattttatttttaattcaaataaattatggtgttttgtataatgtgattcaagaacctcattattataatactgtactatgacttgatattgaaaatgctaggccactcaaagtgccaccaagtcaagaacaacaatacaattggaacacaaaacattctcacccttccaaaattgccaatgataacatttctaaggcaggtcaaatgtatttatatatatatatatatatatatatttatatatatagagtgtataatttgccccacaaatacttaagtttaaaggttaagtaaattgtcacgtaacgattcttgattggtccaggtcattaaatttttatttttataaaaaaattaatttaacaggtacttattacagagttctaaaaattaaacttaggtatttatttacaattgaaagttaaacttaaatatttagaccgcaaataactctaaatatatctatatataatatgtgtctttgtaatagaatttttggtttataacagtattttttttttaattttctatgttaattttaatagaatatactattacttaaaaattacttttataatattattatatatatttaaatataaaaattatataaatattttatataaggaaagtttagcttaaatataaaatagggggaattatctcatatactattgttttaactttttttcttttcgaatttacggtttgggtttctaaagtagtt

SEQ ID NO: 311533 - DNA, 937 bp, Cannabis indica
acaatgaaataaacagatataaatttatagaaaatcttacattagtggcagcagaatataatgactccttccattcagatctctaacccttgatcctttgtgtcgcaaagtatgatcaagatttgaacctagtttctcctttaaggtgacaaaattcttacacaatcgtccacactatatttgagtactgacttaaaatgtgtggaaaagtactctctcattatagggcacaaatcaagagagaagaagctaaagaattttaaaaattagaaagagctctcttattttatctgacaaagtgaaaactaggttatcatgttatcaagttctgaaaataagagcttacaattttctatttatatgatagtgttaggttagaatttaaatatggaataaaaaaagataaaatggctttatttcaaaccctatggccgaaatccctattgggtccattgggtttcaattttactactttattaaaacttatatttcttttctcaaatatcatatttaaattctatctctataaattttaattttatctatttaataattataatcaattatcaaataaaattgcaattaacttatttattaattagacctttcaaagtctcttaattgataaacaaatcctaaaatctcttttcttctcaaatacgtcattgcttagtaaaaatttacaaataagacatagtctaatttggaattctaattgattaattaaaattaattaactgattctataagacaatattatctcaactagtgcggggaccatgggtctatataatcaagctcctaattagtagttttagaatttaccaagcaaattttctatcttattaattcctcctaactccactacaaattcgaaattgtactcctgattatgtagaacgctctataccaagtatagatatgttatgaattatcc

SEQ ID NO: 311534 - DNA, 1578 bp, Cannabis indica
cgcgcctgttggcgcttcatttcattacttttaccggcgcatattcattattgcaccggcaaaacatagtaataccggcgcattattgcgccggcaaaaataaagcaaaaatgcaaatgggatttcagtttttgctttacgtcgacaacttttaccggcgcatttgacgatctgcgccggtaaaaaggccttttcttgtagtgtctctttgtaaatccaagttttattggggactaggatttcaggatattgttcaccacaaccaagccatgctagctaaacaagcttggcgtatccttacgaatcctgactctcttgttgctttccttttaaaagctaaatactttaaaaacaatgattttcttcatgccaaaattggtcattttccttcattttcttggcgtactctccttttgggaagagatctctttcttaaaggtttagtttagaaggttggggattgcaattctattcacttcactagcccaaattggattccaggatcaaattctttttacttcaagaataacctcactcctccggatatttcgatttcttgttttattagtgaggatggcctttgagatctaaataaactcaccacttatttttgacaatgatcttgttaagtcaatccttagtatccctatcaattccaattctaaggattgtcttatttgggggcatgatccttcgggttctctcactgtcaactctggttaccaccttgccaacacctactcactccagccctagctcgtctaatgcagacacgtttaagaagtggtggaaatcgatttggtccttaaatattcctcccaaaattaaacacttcatttggaaagcttttcaccatcttctcccctctaagcttaacctcttcactaggaagattctctaagacccccactgccttttttgtttcagccatgttgattccaattcccactccctcttacagtgttctaaagctggtaaatattggaggtacactactttctccaccttctattctactaataaataatgtgatattaaagaattcttcttacgtggttatgaaacttttaacacttggcaacattatttggtattttatgggttatttggaatcatcgaaataaatctctttttcaaaatgggaagtctagctataaggagatagagcctgttactgtttcttgcttccaggaatataaggaagctcaatctaagatcctgcaccaaccttataacaacctccaagttcagattgcaagcaagtcgattgaagaaggccttcctccacatcctgatctttacaagttaagtgtggatgctgcagtaagaagtgagaataatcttcatggttatggagctgttatttaagattctattgatagagtaatagctggtttccattcttctgcaatctcaggactgccacctatctttgctgaagctgtggcacttcaccgtgttcttgtcaagtgcgcgaaagtgcatttccctatcaggctggtagtgttggaaatattttaccaggatctagatttttaaacaagtatgtttcattaacatcctaatatgaattctcta

SEQ ID NO: 311535 - DNA, 2462 bp, Cannabis indica
tataatttgattagtataatatatataaatattttagtaatattctttcgtttttttgttattgttagtatatacattttagtgaatggtatataacctctgtggagaaggcatttaaatgaaaccacaaaacaaaatgtaaaaattttcataaagagtaattaaagtatttccttttaatgaataaaagataatagtcaaaatagtctttgaaaaatatttgtatcatcaatcttaaagctaaaaactattatttttttttcatttattttattttgaaatcacataacaatttctctattaattccaccattttttatatttgttataatatcaccatatttctatatattttaaaaataacaaattacatttctaatttgaataatattactttatttataatcacacattaaaatgttatattttagattatatcatggaataagtacaaaaatatatataaaaaaattacataagttgggtaacactacgcgaagcgccacttagttctctagtattttataaggtaatatttatgtgctatttataacaaaaatctcatttttactcaattagtcaatttaggccaaaaagattaaaaaaagctaattctctttcttcgaaaaaccaccattaaaaatatacaaagccaaaatctttgaaatttttactgagataaaggtacgccgcctcaaagtaggtcttcgtaaatttttaaattatttagaaagtgtaactaaacaaactgtttttacaatttaagaacacatgctgtccaaaggtagatttttacactaactttacacaataaactgtaccaaatcgtgaggaataaaaatctaatcttttttacaggtaaaaatttcatgtcttagaagtctactttaatttttacaagttttttaggtcagtttaaatgttcctaattatttttacaaaaaaattgcctaactagaattccagaaaaatagtttagccgtaaattttgtaaaaatcataactttctcattttaattatcaagtgattccaaaactaaaatgagcaaattaacaacatgaaatatttcaggtagctttgacccgttaaatgtttagcctcaaaactgtcaaaaaatacattcatatcgatttggtagaaacattatatttctaccaaaccaagcacagcccctagcatggcatctgacaaaaaaaaatagaaaacaccttgaaatataaaactaaaaattctcaaaccctcacataaagcaacaaccacaaagagcaacagaatactccatgaaaagtgatttttacatcttgatgattagaatttcaggtatagtttttggtagagattccaaaggttctcttctctcccaatcttaatgatttattaaacaagaacaccatagctcaaatgggggagaggtataattagggtttcggccctatagaaaagaagaacaccaaccatagtctcacattgctttgtcttcttggatgagcttcgcttaaggcttacaagaagtctcgtagtggagatttttcccttgaaagataagaacaaggcaagatacagaagaaaataatgagaagaagaactcgatgagaaggagagagtagaaagtagagtagaacttacgcttggtttttctttgatcaagcttgcatggaagagcttcaatgaggtttcttttaagagagaaaggagagactctctctctccctctctagaattttttcaatattttgaaaatgaaaagagtctggagagaaagagagaaggttcgactctagcaaagagaagagaaggagagaggttgagtgtagggtggaatggcctagcgtagggtgtatgagtgcatttaattggaaagccatgcatgagctttatttgcatgaaaaataaaatttgaccaatccttttactggccctatgcatgtggcttcctctcaaaatcttttccaattttctcccaagattctctcttaactacaacaaaggccttataaatttttttctccaaaaattgtactataaagctaactaaaataaataaaggttaaataactgttgggattttatgccctaaataaaacccatttcaatacaatctgatttgttatcaatagaagattgggagtcatttatgtttacatgtagttttcatgtttatggtttaatgtgtacaaaatctgttaaatccagaacatatagttattcacaattacagtgatgtcaacacagtggaatgtaattgtgattatatgcttcaaaagataatgtccctcgattcatcagtgcactggatttacactgatgtgataatcagcgataaagtatacttacaccttggataagtattatgttctttccagaacattggcaaagtatgctagtttcggatgtaaggaagaaaaaatggactgggaccgatattgatcttgctaaagatattataatcttaccgttgtat

SEQ ID NO: 311536 - DNA, 501 bp, Cannabis indica
taccatacaaactaatgtttaataataatgaccttacctttatgtttgcttaattgctctatgtaccattaattgaatttaatgaaatatgaaagtaatttcttttttaaaaaataataataattaatttaaatcccaaaaaacatttaacatgtactttccgtagacagctatataaatttgagagctaagtaacatcttatatattgaccccagtaccaaaagatatttaaagaattaataataagtattaattatttaattaattagttaataacatagaagctttatagatcaaatattaattattgtgtttattccttttggcccgccataacaatgcaatgacttaaaacaacatcattactcaacatcataattttttgaaaaattattattattattattattaaatttcttgatcctcaaacaaagatcaaataaaaactttgctatgtctttttatttttataataatttgatatatacatatatatatat

SEQ ID NO: 311537 - DNA, 1335 bp, Cannabis indica
tttttatcatccaagtacacactatgaatccacttcacctacaaattatcttgcttggtaaaccaaacatatttcctaataacagcaacatttcactgaattgtccttctaaatctcaatcctcgatcgtttactttttagtttgcaaatctcatcccaaagagactagacgtgggccatcataactaactatatattattaggatcttaactttcaaaaaagttttatatccttaaatacttagtacacatgactaattatatattacctaagccatttttattacttttgaaggtcaaaataatatcagtacttatttaagaaagatgagttatcactaaaaagaaaaactgaactctaatatttaattaattacgatctaactaccctagctaagctataactaaattcatttaatactacgtactcttatatcatgcatacgtagcttttttcatgcacactactccatatacgtacaagttatatatatatatatatatatatgagtacgtagtgttatcgatctataatacaacatatagataataagtggtatgagtatgcatagagaatcaatggccactccaataattttgggtgttattctaaatctaatccttctcctcccaaaatctctagctcacatttatagtgataatgatctgttggaattttctttaaatcttgagtatgtgggagctgaattcttcttgcacggatcattgggttatggtttggacagagttgctccacaattgacaaagggtggcccacctcccattggtgctacaaaggtcaatttcgatattttgataacagatttcaccatgcaaatggggttacaaggagttgaacatatcaagtatactcttgtgtttaacttcttcttattattattagcggaattttcatttttatgattttttattttcaattattattattattatgatattgttaattttcctgatattatatatatgtgcagggctattaaaaattttgtggaagggtttcaaaggccattgttggatttaagttcatcagtatttgcaggatttataaacagtgcattggggagagagttaaaacctgcctttgatccatacaataacacccttaactttcttatagcctcatatgcaattgctcatattggacccactgcttacgttggatataatcaaaacctcacaggaattatttccaagagggtatatcactaaaatcactattattattgcttatttaatactattttatatccctatttttatttttatttttactaaatagcacatatatataaatctattttttaaaaaaaaaat

SEQ ID NO: 311538 - DNA, 994 bp, Cannabis indica
aaatttgaaagaaaaaaaaagttaaaaaatagtatatggggtaattcataatagaataaatgaaaaataatcggaattaatatttgtaatacgttgtttattaaaattgcttgaaaatgaaataatagtaatttatctcgtttactttatcaggaaacgtaatcagaatacttaaatgaattaaattgcctttttgaattaaactatagtatgtggtaattattttataagatatattttaaatgataaaattgtcattataaatttaatattaaaagataaaataaaaataaataaaagatagtacccttaatgacatttcttagaaaattaacaggggaagttctctatttttttttttttaccttatttaaacaagttttttcctcttctaaataataaattaaataaacaattgtaaaggaactcttttatcattgctgaatagtaaacatgctgtaatgtaagaaaagttttttatttctaactctttaggttacttgtttttgaattgaattgtatataattattggttaccacataaaaaagtaacctaacaattaattttgaagcataacaattctaagacaaaatctatgcttaccagttaccacatttcaaaataaggttagtttgcactagtattaatatccttgagtctaaactgtcattggtggcgttttgaaaaatgccactaacttattttacaagtaacttttgtaatgtgaaataagcaataaataaatatttcaattagttttttttttttgtaaataaaattagttttatatcattaattaataatttcacaagtcaagacttgatattatctttaattttaaactataggaaatgttattaattttgaattaataattgtaacatgttgctggagttagcaactttttagggataagtttagaaatattcttttttttttattcacttttatgagtgagttgtctagtataccctcactctctacttaagttta

SEQ ID NO: 311539 - DNA, 587 bp, Cannabis indica
tgtgagaagtctatcatcatttataatgaagatattttgtttaattaatttgatttgtcatgaagaatcgacaatctttgttgatctaatccacatatacataggtatataataaaaaatagaaaaataattatataaatgctcacatctttagctaaaaagaagaaacgtgtgaatagagatgagataagggagacctcaatgtaatattgctatttgtatattttagtgaggctctaattaaaatattaattaatggaatttgatacttatttagtgttatacaccatgatactttagtactttatagtaatattgttcaatatttttaatatggaagctctcataaaaaccaaaaaataaaataaaaggataaatatttacatataatatattctaacaaaaagtattgcttttagacgtacattatggtgcccaaaaccacccttaactgtgtcccctataaatattgtataatttttttataaggctaattaagattttttcccctcgaactttgacatgtaccaaatcataccccctgaacatttttagccgttaaaaattccccatgaactattgagatt

SEQ ID NO: 311540 - DNA, 513 bp, Cannabis indica
aaaaaaaaaaaaaaatcattccattataaaatgagaaaaaaaattaattatttttttgtcaatatttttttatgaattttaaatttgattctattcaattcttaatctcattcccattatgttgattatggttataagttttgtcgtccgggattggaagctgtgaatctggagagcagataccggaagctagtgtggatccggaaagccctgtgcaaaaggtcttgttgaatctagaaggtacttccaaataagcttgtatcgtgaatgaaatgtctctcccggatggcttgtcactaatccggaggtgtactcccagacagctctgtcagtcttgaagcttaatccgggaatgaagtcatgtacgcattcagaagacttttgtgttacaaagcttctagatttttcgtactgaaagtatgtgtttcaagatgatgttaaagattcttgtaaccttgtaaacactgatatcaataaagataggaaaattatagtaaatggccccaaattata

SEQ ID NO: 311541 - DNA, 982 bp, Cannabis indica
gtaaaaataatttataataatataataaattataattcatataaataataataaaaatatttattattttattaaaattatattgtaaataaaaaatggaagtgtaaaataattttttaatgtataatgtacgttttagttaattttttttaaaagtttttggtttgttatatgtaattttttgcttttttggtttagtagaattgtattttaagaaacaaaaaaaaaataaaataatggaatataaaggttacacgtgccaagactggcaccggcttttgaccgtagccgacagcatgacccggcacgtgggagtgggatatagcctgcttttctctactctgtcctacgtggcagtctctctattattcggcatgctgacgttaaccccacgtcaccttcattccctctctctccttgactgttgtcgacatctttctctttctctctctacaacgatatttttgtgtaagattgaatcacagccgttggatcttacatacatggcacttgattagaggattttgctcatcataaatataaatacccatttcattattgaactatatacataccaggagtcttgtttagaaatagttagggctggtttagtaaggcctattgaatcgtattgtgttgtattgtattgtattagtattatttaatacaatacaatatttgatattgacttgtattagttgatcgtgtaaaattataatatattttaatacactcgatccaacaccaactacgtgtcgggtcccgagtcctaggtctaggttcgggtcagagtctgggtttgggtcggagttcgggttcaggtcgggatccaagtctgggtctgggtccccggatgggtcccgggtccgggtccgaagtttggttcgagaccgagtctgagttacggggtgtaggtttggggtttgggttccgggtcgtcgagtccgggtcgtggatctaggtccgggtcccaaggtctggg

SEQ ID NO: 311542 - DNA, 1871 bp, Cannabis indica
tttaaatataaatattaattgctaaaagaggtcttgttgaatatttaattaattattttaagaaaatagttaattataattaattaattctaaaaaaggaatgtctactatttagttaattattttaagaaaatagttaattataattaattaattttaaaaaaggaaagtctacctattagtaacctgctattacaggtcaaagaaaaatgtaaccatatggttacaatgtaaccattgaatagtcacccatatatatatatataaatatatatataaacagaaattatggtagggtaaacataagtagtcctcaaagaataaatataaaagtaaagaccatatttaaggtaataaatgtcaactattaaataaggaacatgaaaatttcaaaacaatttggtcagtgggagccaagaataaaatacaacttccaagctatgtgatgaatagttggtatgtcaaagatgtttttttcaggaaagttcaagagccagcgattgtttactgaaccttagattggggcagcaagacaatacaaacaaaatttcagtttaccaaatataaatcttaaaaactacagatagtaaatgtaaatactttaacaatcatgaaatgctcttaaaatatatagaacttgtgtgatgtatgctgcattgtgaaatttcttcaagtagctcataacttcaacaacttaaccataggtactacaaaatataaaacaaaacaacatacatataacaacgaataaaataagaaaccatcctataaactttactacaaaaataaagaaatataaatttctctttccttagatataaatattttttgcaatgaaaaaatttattaaaaatataataatatcaatacaagctgctagttatgaatactatacatttcatgtttatcaaataaatactatttatggcatgataatcagaataataagaatattcatatctagtcaaataagttatatgtatttatccgaagattatgcacaactaatccataagcaacacagattagagacactcctaaaaatctggataacaaactcttaattaaaaacttctaataattattttaaaatcttttgagtagggaactctcatagtaaaattaatcatagtgtaaaatcttggtaacagactacaatccattgtcatcatcagtgccacgccatttattttaaaaactctatggtatagttcctccaaataaaaaagtctgcaaaagttattcttaaaaaaggtgtcttctgaatgttattcttagatagctaacttgtccatcccagaacgattcttgtggaatgatagttgagtccgaaagagagttcctagatgactatcatgcccacttcgggctcagtcttctaagatagctggccctcctccaaaaaggagttccagacaggtagttattcttcctagaaggttgttctccctcgaaggcagttccagatagtcgactcaacctagctctatcctattcagaagcctctccagcgagtacctttggtccgtgattttggtagcacgcatatgttcccagatgcactaagacttatgctgacatggagatctcgcacctaggagagttagttaagattagttattgtctaactaacttaataatttcgattctttgagccaccgactttaagatttcaattctaagcctataaatactaccttgacttgtcattttaataacaagatccagattgagattgagagtaagaggagaaaagattgagaggtagagagagaggtactgagaaaagagagagattggatttgagttgtgtagaatcttttatagatgaagaaaattcttggataagagtgtgagaattgaaacacttt

SEQ ID NO: 311543 - DNA, 759 bp, Cannabis indica
tatttaaataaaatataaattaacaaaataaaaatcaaatcagataaaatgccgaataaatagcacttatctaatcttataatttaaattaatagaatatatttaaaaaataatgttttttgaaaaacttatatttatggttagcaatttaaaaatatctagattatctttaaattttattactattttaatgtataaataagatcatttcatattttattaattcaataaataaaatatgtaaatatttgatcttataattaaaattaataaataaaatgaaaataaaaaattttttttaaaaaaataactgtaatagaaaatttgtagaaaaatcaatatttcaaatttaaagcctactaatatctaaaattaattcaaattaattttaatttggtaattatatttttatttgaaaaataagattttgcacaaaaatctaccaaagtttgaattttatttcataaaaaattatttttaaaagttaaaaaagttgaaaatgggacaaaatattgcatactcccccgcgcacgcatgaggtgtcacggtcgagtgggtagactgcaatggagcatttgcgtgcgtgtgatctcggtcaagggaagacacgggggcaaaatttggaaaaggccttgtttcaaaggcctcttgtccaagcgagttgcccaggggatcctccatccgtgcgcgtgctaggggaaaccctagcccgatatttctaaaatttcaaaaaatcataaatgttgcccctaattttgc

SEQ ID NO: 311544 - DNA, 2267 bp, Cannabis indica
cctatttcagctagatctccctgtagagagtgatatgtccctccctgtagagtgtattttgtgcttttatttgctgagacgtttggtttttggtattctgagttttgtgatggcctcctctagtaaagaagaccattctttgacaaaaagatgggcagagatatgtttagaagatgaggaagaacatgaagtctccctggccgatgattgcgaagaggaagaagacttgaattttgatgacagatggtgcctagtgggtcgattgttgtctggaaaagtctctgatttccagatatttcaaaatattattgttgatttatggaagcctgggaaaggtatttttattaagattttggagcagaataggttcctttttcagttctaccatgagatagacatccaaagggtgattgatggcagcccatggacgtatgatcgtaaacaacttcttattgagaggcttaaaccaggtggaaatcctaggacgattgctataaatacgttggacatgtgggttcaaatccatgatctgagaactggctttcaacctgaatgggcaattcgagaagcggctcgctatattgggcaatacgttgagtccgatcctaataattttcaaggcgtatggcgtgactatctaagggttcgagttagagtgagtgttaatgatccattgaaaagacgaatgaagtttcgcagccgaagtggagaagctttttatgcatatttcaaatacgaaagagttccgaccttttgtttcatttgtggtgttatgggacatgctgaacgtttctgtgagagaatatacgatacccccatcgagaacattgtgaaaccatacagtatagagatgaaggctccgacaaggcggcagagtttcttgactgcctctccatggctgcggtcaggcaagggaggtcaagatccagcgagacagacgacatcagcatctccaatgtttaatgctccaatggatattaggggaattaatgcagagaattgtgatcctcatgatagacaaccaatatcacgttttaattctctatcacgtgattttgggaatcagcaatcaaccttaaaagagcatgttattttggtcaatgacaactcagccgaattcactagtgacgagatagttgaaatctctgatttaaaaaggaaacgtttggtgactctttcacatgctgggccagcttctttgacaaaagacttaatggaaacaaaggatggtaaagaactaaatcactcaactcaagtggtaaattcaaaaaacgcagatatggtgggtcttggtttccaggcccaccaagagccatgagtaccattagttggaattgccgtgggcttgggaacccacgggcccaacaattcctttttgacatttgtgtccaaaagaaacccaagtttttatttctttgtgaaactctgtgtactaaagatgttgtggagaggttcagattaaaggtgggctttgagggatgcttctctgtcgatgtgaatggtagaaaaggagggcttgctatgttttggcacattgatattgaagatagagttcctggtatggcaaagtggagactctctggtttttatggagaaccaaaaaggaatttgcgatatcacacctggaaccaccttcggtctatggctgctgattcaagactcccatggtgtgtgataggagacttcaacaacataattagccatgaggataagaaaggggggagaccttatcctgcttctcttatctctggatttcaggaagctgtttcggattgccaccttattgatttggagcttcgaggataccaatatacgtgggaacgcagccgaggcactagcagagcagtggagattcgtcttgatagagccatggttactcaacaatggctggatatgtttaatgaggtatctctcactaacttggctttttcttcttctgatcattcccctattttcctagaacccgaaactatgaccagtgggaattcagtgggtttatttcgttatgaaaattcctggaatagagagcctctttgtgctcaaattgttgctgatatatggcagtctagtcctcaactgcagctcacgggtaagctcgagctgtgtttaaatcagttggctaattgggggcgatccattactggtaacttcaagtcacgtctttctaagagtaagaagttacttgctaaactgaaaaactcttcctctgctactggtgtggaaagttatgtgcttgaaaaaaccaactattttgagattcttgctca

SEQ ID NO: 311545 - DNA, 1105 bp, Cannabis indica
aaaataatttccaacagctactagtactagcttcgccacttgtttcatcactggcccccctgcattcctcgtgggtaagtcgctctagtggatagtagctaaattcagcaggtgcgacggatctaacatggcacctcacttttgattgatgccacaagtccttaaaacaccaccaacatagtcccctatggcccttattctcgactcaatgagcacggcctcgaaagtgacgttgggatcttggggagtctttgacttacggggcttggacgacataatttcaaagtcaaggtcacctggtgaaaaagcaattgtgactctgggtaaaaacaagggtttagccaaagatatagaagataaatattggggctcaggccaggttgcatctcgcaagtagcgacgtttaccctctgttatttcttgtaggaaattcctatagcgattagaaacttcttcctgatggtttttattaaatggtctctaatttttgcatcgtttatctccagttttggctgaggtttagaaattctgggtttgtatggaaggctaatttcttaggatattctatttctaaggactctggagaataaacttcagaaccaaattgtgacatttctacaaaaagcacaatcccaattcctggatgaaatttattaaaccaaagacttacaaatatgataaacctaaatttttactcggcctaaaccctaaaaattacatagaaaatttaaatcaaaatcactaaaaccaaatggagtgacaaagatgtagttaacaacataagaatcataacccaggaaatgagaaacatcaaaggaaagaagatggataacttatccttcgaagtcgagttgtcacacgatgaaaagctctacaaccgaggacaggatgaatgacgtgttgacttctgtggattcctaaggatgagcagtatatccgagtagacgcgcaagaaatatatcaatgacaatgagggcatgcaaggcttcgagaaatcagaatggttttttcgcagaaaaagcttgagattttttttaaaaaaaaaggtagaaatggcaaaaaaaaaatggttcctttttcaattttataccttgggtttgatctc

SEQ ID NO: 311546 - DNA, 1110 bp, Cannabis indica
catttgtggctgttgattagtttgatgatgatgggggatgcgatagcggatgttgatgacattgtagctatgactagtaaattgggagttgctcaggaggaggactgggaggaaaattctaatgcagtggcatcatttgggggaagttctctagttgggaagattatatcgaagcgggacattagtgaacgattgttgatgaatatgtttggtcgaatgtggaaaggaattaaggattgggaagtgaaggtgtatgaagaggaaggggataatcatattgtaggtttttccttcaaaaccccacaggatgcaaacttagtgttatctaaacaaccatggtattttaatggaggattattggtactagaagcttggccggatacgggacagtggagggattataatctgaataaaatatcctgttggattaagatgagaggatggcctttaaagctattcacgcagaggaatgtcagccgtatgggtgaaatggcaggggagattgaggattttaaatggcagaatgatcgcaggatgtttctcaatggctacgtccgaatgcgtattggttttctgttgaataagagtttgttcgtgggccgatttctatcgagcgatgggaagcggttttggattcaattaaagtttgagagattattaatgctttgttatggatgtggtagatggggacatgaaaaaaaggattgtgataaacaagtagtgatggaaaaggatgagcatgagcagctggttcccaaatatggcccttggttgaaggaagatgatcctataccaaattgttgtgtggcgttcaaacaaggccaggtgatggctagtgatatttcggtggagcaggaggaatcggagagggagatccattggtcaccaagcttggaagaggagttcatttgatggagacgggtgaagggaggttcggcgatgctgaggtgatcggagaactgttagtggaatcggacattcaaggcaatgctgagaattcggggatcgtgggtgataggttggacaaaagcggttctgatttgggtacgtgtgaaaaagaaaatggaccaaagtgttgctataattttaaacactatgcaagtatacgca

SEQ ID NO: 311547 - DNA, 2045 bp, Cannabis indica
taaaaataacaatcaaaataacaacaaaaaaataacaaaaaataacatacatataacaaaaaattaacaacaaataaacaaaatttcaacataaaaagaccgtattttatgtaaataaaatcaaaaaaatcgtaaaaatatttaaaatttcgtaaaaccgtatttttattatttttttgttgtttttgtgcatttgtgaaattaacccgtttttttgtagggaatttagagaaaaataggttatttaaaaaatactacacaaacaaaaaaaaattaacgtttttaggtaactctgtaattttttttaatttttttctatatttttacatgccttttttttctaattaatgtttacactatttttacgttgacagaaatatagtataatgttagcaaaaacatagaaaaaaaatgttagaaacaacacacaaaaactaaaaaaataaataaaaaaaaaaaagtttagtataaatatatatatatatatatttttaagtgtattgtgtaaatttttcttcaaaaaatatacagaaatttaaaacctatgaaaaattcatttatctatatgtgttgaactgtagatccggtcctgggtataggagagctaggcctgtgcctagtgctcacctagtccagaaacaaaaaaaaagtatttttcacttttaaaattaaacatatttttttattgatttttaaaaagattacatttttttaaataaaaacccgaaaataaatttttttcctatgacccattaagtttcagggctggctgacgtttgtttggaggtaatgacatgaaatggaatggaaaagaaacaacttttgtttcattcatttgtttggtttcattttaaagtattggaatatcattcatattctagatatgatttcattcctttcaaccaaacaccccttgatgaggtgtttattaagtgagtttgagttggacggagtagactttgagagaatatgaaacccaagtgttggaggtaatttacattaccattattttaatttgaaaagtaggagctagttggaaacacaaatccattggtcattaaaatttaatttagtttgacattctaaatttccaattcccatcaagtttaaatctcataccaaacgtccaataaaagactgaattggaggggtgccccaagtccatgcagtggtgcaaaaacttggatgagtcttgtttggtgctattattattgttgttgtagtcattgagtttctgaattttttaagctgatgaaagctctattatgtgctattttctctctaatcgacacttataatatagtagagtaaattaaaagagattgggacatatctaaatatataaatacttcaatttatttttattgtcatgacagtactttgtcttatttttattgtcaaattcaaaatttttagagaaccactcgaggctagctcaactgcgtgtgtgggaatcttggaatcgaattatatagagaattgagcatgtatatctttctattcaaagttctcatatcatatataggattaaccacacattaggactcatggaatacttcaagtttgaatttttaacggtgaaaaaagtaagaaaaaaagcacttgaatcctgaaaacacaagtgaacatagtaaacaacttttttttatctttattgaaaggcataaaagccaagatagcaacaaagtaccaatacaatctctttcaacatgaatcaaattgaagctagaaaaagattgtttgaggtgttttgcatcttgaagaagcattgtttgctttccattaaaaccatgataacgattaaagcaatgaactacaaacaaagattgaactaagattggaggggtgcgccaagcccatgcaatagtgcgaagcatgggcaacactcaagagccccaatagcaagctattgtggtggactcttccccttaaaaaataaatttaatatcgtgtgagccattggctcacatatcagatattaaactgataagaacagatactacacttgatcttagccaaaaggccgagaaaggtatgatttgttt

SEQ ID NO: 311548 - DNA, 573 bp, Cannabis indica
caaccaaacgccacctaagttatcactcttaaataatggtatttcttttattaatttctaattttttttttaataattttttatttatttttttactttaacaaatttttatataaatatatattgtcaaatattaaaaatatattttatttatataatatgtcaaatagtacaaaaaaacaaacaaataacataattttttttttactttttacagtttacctatataaattatattttaagatttatgttaaaaaaaatatatgtataaatagaatatatttaaaatatttaattaaaaaaattaaatatatataagaaatttttactccaaaaatataaaatggaatttttattacatatgtacttacacacaattgcctaaacatttttaccttttcgctttattttattacatatcacatgcacactcccccatgcatatgacacgtgcatctcctccatccctcttcaatcaaccatcaatcacttccctctctttttatcattttttcctttaactttttatttcttttcatttttttttaaatatcttgtaacctccattgatga

SEQ ID NO: 311549 - DNA, 1000 bp, Cannabis indica
tcctttaaccactaatagagaatcagtttctatgtagtgaactggtaattgaagatttttgagccattgcaagctataaatcaaagccatagcttccataacttctggtcgaaagcatccttgtaaaggcatagccattgcatctattatgtctcctatgctattacgaaggactgctccaaaaccaatttttttattcattgtgttacatgccgcatcggtgtttagcttcagtcgacctgaaggtggattcatccaaggaggatcatgctgcaggggtctgaaggatgaaccagcagagacagtcgcagcaactggtttagctcttgcagcatgatattcctccatgtaatcgactgcaaaaaataaggcaatctccggcagttttggtttagatccatgtctctctttgtttctctcgttccaaatgctccataggatagtagcaaattgctctatttgtttagtggaccaaattgaggaaacctgctgtaagaagtccattagagacatattatttgacaagaaatcattgatggagaaagaggatagctgccaaatttttcttggtcgtttgcaaatgaatagagcgtgtatgattgtctcgttggatctgttacataaagtgcatatagccaagtaacttatatgtcttttgtgaaggattccagccactgggaaacattcatgtgtagcacgccataagaagatttgaattttggacggtaaggataaggaccagaactttttccaccattgaagagaaaggttagaacttgttgtggcctgctgttcttccattctggtagcaagggcataaccagatttgacagagtatgtaacgccctaaataattaggcacgctacccaaaatgcttatgaaaccctaatcccctaatcgggattactaatttaaaatagcgcagaatttaaacttttatattaatcagaatgaaaataaacttgtaatatatttaaacttttcaaaatagttgggatc

SEQ ID NO: 311550 - DNA, 1433 bp, Cannabis indica
gagagaagaagtgatagggggggggggtgaaggaaataaagagggtattttgggacataatagaaaaatggtcatatattttaaatatggggtattatgagttttgaggataaattttaaattaaatgcaagcatacaaattcaaatttcccatatgaaatagctactagaccagttttttttttttgggtagaaaaacaaatttattaaacaatgagaactgtaatggagaggaagtctttatttttgctttcattgtggtggatggcgtgccaaaaatgagaaaatccacaataactgcttacttaacttgcacaattgtattgactctatctttcatgactttacagatttgaaaattgctctgttactcgatgtatctccggtccagaggaatggctggccccaaggattggctgaaacttaattatgatgttagagttggtttgagtatttcttgcattgcggtggttggtagaaccatttgggggaggtggtctgggttcgttcggctagactggactttgcggatgctctttctggtgaggcagcgaccctgttgcttagccttcgaaaccgcaaagctaaacagtcataaatttgtcatcgtggagactctaggagcgtcatcaactctctcaatcgcgtctcgtcgtattgggagattgagaactactctaatttttggtttgagctctctaatagttttatcgattgtatgttttcatgtattcccagatcgtgtaattttgtcgcacataaatatgtggcttggtgggccttcgcccaccaccaatttagatgtttttcgtgttttttatctctcaaaaaatttattttgtaatgactatttggtctaattttctaattaatattctttcaaaaaaaaaaaaaagagaattgtaatttacagagacaattctcctcttttactataaaaaactcagtcatgcttacgagtttcactgatcaaattgttcactaaacttgacctagttgcgtttaatataataaaaagaactaaaagttaagacatgtttaattttaagagcattgctattgggcaccagtagtgcctagcacctttaagacgtgtcttcttgtgattgactagcgatactccctaaaaactattatattaaactatatgtgacctgacattaaattatatcaatagcgatattgacacgtaagaaagtgctcggcaccactggtgccttttagcatttctctaattttaataatgttataaaaaactttttagttaacttccaattaagaacagtttcaattggatatttggatttgcattagggaattttttataaatatggaatttcttaaaaccattttgaaaaatatggacatttataaaaaaaacttaaaatctggaaaaaaaataaaaaacttaaaaaatggaaaaaatagaatac

SEQ ID NO: 311551 - DNA, 1434 bp, Cannabis indica
gtaatccttattcattacatatacctatgtaattagaattccatcgagtagtgtaatacccatatacccattaggttttcaaagctcaatattacctttgaggtccattcattaatgcagagttgcctaacaatccaagctatatctggagaagcatacttgaagcaaaatacttaatttctaaaggaggccgattgcttgttggttcagggaagagtgtctctattatgtgtgacccttagcttcctgatgaggacaatcctcatgctacctcatctcatcctagtcttctttatcaaaaattgagttgtttgttggaggttaatgacaaaagatgggatgttgaagtcgtctcagatttgttcaatagtagagacaaggaattaattcttaaagtacctatatccaccacaaatgtgacagatatttggtattggagtaaggaggtttcggggtctactcagtcaaatcggcatacaagttgattcaagagttgaaaccttcacccgtctcctctattaatcctggtttttgggagctttatgggccttgaaatgtccccaaaagtcaaagacatgatgtgaagatctgtgtcaaattgtttgcctacctgtggactactactccaaaggcatgttcgaatatcttcttcttgtcccaaatgtgataggggggttgaaatagttatccattgtcaagtttcttgctcttttgttgcggcttgttggcgctcttctggcttgtatggaggcaatcctggtgacatatcatttggggagtggttgcaagaccagctcattacctgggagtcaagagagagacatatgggggctatgctttgctgggctatttggcaagatagaaacaacaaggtgtggaatgggaaaaccaagtcagtccaaaatgttattgtgtttgctagatgtgatcttgaacaatggatttttgcttaagaaaaaactttcagtccttcctccttttcgattcagagtggggaaggggacaagcaataatgtgctccagaggtaaataaattcaagattaatgtggatgcggcaacatttgaggataaggacaggtttggttatggttgggttcttcgtgattctagaggccgtgtcatggaggcgagaacggggtcttggagtggaagtatcaatccgactcttgccgaggcatttggggtgaaagaggtgctaagttggatcaaggcatctaatgtttctcatgtcaccgtcgaaacaaatagtctcattactgttcaagctctccgtagcctggtgaatactagttctcctttcgactgttacattgctaaatgcaagagaactatttctgatttgaatgatgtttgtttacgttttgttaaacgttctgctaattgtgtagctcatggtcttgcgcgagtttcatggttatatgttgagcgtagtt

SEQ ID NO: 311552 - DNA, 516 bp, Cannabis indica
gggcataaaacccaacatttcacgcttcaaatcaatgccaaaattcttgagttcaaaacaaagcttcaaaatctcaaaaaggaaatctttgtctcaatgagtactcgcatcgaatcatgcatcatgtggatctgctggcgtctgttggtaaagttccatttgctcgtgattacattggagctattttcaaaggtttgctcagtgagtatgacacatttgtcatttttgctaataccagaatcaaaggctactctctagcggaaattgaagccctacttcttgcatctgaatctgtaattgagaaaactgatgctgagtattatctcagtgctaatatgatgacaagtgaaactgagattcatcctgaggtaaacaacacaaacaatagaaacatcagacaatctcagcaaggcaattacaatcaatttcacctttcaagacgaaatttcagtggaaacttcaataggagcacacattcacaaggtaacagtcccaacttctccacaaatagttctt

SEQ ID NO: 311553 - DNA, 1261 bp, Cannabis indica
cacaagtagttgtttgttgaccaaaaattacatttagtcaaaaaaaaatttatgttgtgactaaaaaagttgtcactaaaagtaactattttttgtagtgccatacaaattaaatccaaaattcggttttttttttttttgagtaaattacttttcccaactaatcttcaaaatcgacactttttttacaaggttaatttctactcaactttacaagaacggtgttaagaattggaaacccttcaactcaagtaaatctttagtatatattatggctctgcttttgtgtatttgatgattctaaactaccattattattattactattactaatactattgaataggttttaatttttatttttcattctaaaataatatcaacggtaaaaagctaaattttaattttttggttttgggccggacgtttaatttaggcccacaatcggtccttatacaacactcttttataaatgtatcatttctattgtaatagatttggctttataccaatttatttggaaaaacaaaaacaacagttttgttacggtaagggaaaatataataatatgaaatattattttggactatttattttgtaaacgttattgattagactttttattttgttaaataacaacataaatttcgtattttttaaaattatacaaaatagacactgaatttaatttttgacaatttatgttttcgatataaccaacctcaagtcagtatctagcatgaacaaatacaaaaaagtgtaacgaatatgataataatacctataggttaggttattattaagttttaatttaatgaaattaagcttggagttcgtgcaattatgaaaaacacatagtataaattgtcatttaacaaaagagaatggctaattaattatctttactaaatacatgatccaaaataatatttactcatataatatataataatagtgcatttactatagatagatataataatatacacaaacactaataaattacatataaatatatatatatatataaataaacttatagcatacactacaatatatacaaaatgggatttttgctcggctcaaattttgctaattttgagatatttgggagttcatcacaagagcaataatttttttcgtatccgtacatgtgacagttagtagtcctgtgatccgtaagagaaatactaggtaagctgtacaatcccacaccgtctgaggaaggtcaagtgggatggattctgagactgtgtaggta

SEQ ID NO: 311554 - DNA, 760 bp, Cannabis indica
tactttcacggaatgtaatccgtgatgtacggcaaccgtcagatgagggagttatttgatctgacggttgagattgatctaggggtattagggttaaaaagtagaaacgtaccctgacacttatttaatgtacccggagatccatctaatgtaccattccgtgaaagtacatcacgggacaaaatcatatccctatatatatctatacataagaaaacaatactgtgcaccaagggatgcaaatttgtttcactaggaaagaaatttagtctaattttatttcatgattatttatgttgcagttatttaagaacttttgtaaaattgtgagaaatccataaaattttaaaatactgaaaataagattcaaatagtttattacactcagttatttaagaacttctataaaattgtgaaaaatgcaaaaaaaattataacgctgaaaataagattcaaataatttgttatatgcgggcctttttaattttatacgcgtgcaaaataaactatttaaatattattttatacattgtgattggaattgttgcccttgatttcgcccaatatacgtggaccaaccggacagggacacgtggatcagacaatttataagtatctgctaagtctttgtatgccaccaggaaacatcctggacataggtcccagaggaggcacccggagtgcaaggtgctcccggaaactcgcatagcataaaacctctccgtgaggtgtcaggcttctcctgagccatcaagtcgca

SEQ ID NO: 311555 - DNA, 6947 bp, Cannabis indica
tgtttaaacaacatacttgtgagtagatctaatatcctggtaaaataaatattccaacacaaacttgctgtgagctactaaggaattagaggctactagaatggagttagcagaatagagaaatctcactaagaaaatgaagagaattatggaatgtctccaaaaaaaattttaggacttggaaaagtctgaccaagacccatcggtggaagtaatgactgaacaatgtgctcttcggaaaattgaggttgaaacttcgagtcctcgcaaggataaaggtaaaagaaaggtaggtgagcctccacagaattctgatcctaaacctcctcagagagatgaatttggttgaccagtccttaaggatacagaatgccactagtgctttcgagcctcgatgcctttctactcgtagtggaaaaaccgtgccaaaaggtaaaagtatgaaagtaccttagtccaagaggtagaaaaaccacccagttaatttatcaaccagaatcaaaggataattgatgggcattctgaggacagatggtccactctagatcttcaacggtgattggataccaagtccgaaaggtacaaaatcaaaaggccaagccacacggagttgaccttagaaaccacctaagttacaaaatgaggagggaagatcttcccaaaagtgagacaaaaaggttacaagagaagatagcaactctaaccaatatagtcagaaagtagagtggggccctctcagattctaacgatgaggaccccacaccatgcgtaaggaggattatataaaccctactccaaaaaaaaattcaagatgtcgccaatcgcattgtatgagtgaagaacatatccgtgagcacacttgaaaaaatttaataaagcaatgcaagtggctcgtgtgagtgactatgccaattgcttatattttttcctaattgacaaagtctacggaagactagtggaagcgactggctctagactcgattgatagttggaaagatttatagtttaccttccacaaatagtgcattgcagcatgtgatgtgcgatccaagatggtatgatacaagctaggtgattcccacaaggtggctaagagatggtcaagttgtggcacatgttggtttgcatgcttttacgacatttgaatttttgtaaatatcttcaatgatgtttggatcgggacgtgacttgtattcgccttttatttgggttaatgaatgcaatggttcaatcagatttgagaaactctatgatttggcatatgatgttgaccatatgtctacagatcacagtttggcagtcgtacacagcaatcgccaatcgcgatcttgaataggcaaggtacctagaacctcgacaatttctctgcggtagggtccagaataggtcgagctagtctatttgcgatcaacaaaagaaaaacattagtgactttgcaaggtactaaaaatatactaagtgttgagatacacgacatactagttcaacgattaaagtcagtcctaactcctagtactttaaacgcgcagaaccacttagattttcaatcccccatattggaaacaataccttctacctcgttaatctctaaattggcccatttactaaatcagtaaaagctgttgtcgtggcctacgttctttatatcgtaaaagtagctaaagtcctccatcaatggctccccttggacataacccatgtacatcgcataacaccccagaactatgcgataactatttgaggttagttcgaagggagagatatcgtaatgtctaagcatggctttaataaaaggatgaaagggtaaagataccccacatggagaataggaattgaaataaccacgtcttgcgtggggatgatcgttgggttgctaaaagggagatgaggtctttgagatgttgaatgatgcatggtccctagtcgcaacaaattcaaccgtgcaaatatatgtaggtcagatttggtaactcacgagactaggtgctcacacgggaaagtctcattcagttgagcgtcgtcaattgaatctgtctcactaccttcaacaccttttcctcctctgacccgcgatttggggcctcgaatccttccatttctttaactttgatgtcaggggcatgtctcgaatgagtgagatattcgcgagctgacaccgtagatttgctatcacggatctcaatcgttcatggttcagcaagttcctaaaccatcctacctatctcatcggtagatagtgagccttgacgcacagacctggcatcaagaacctcctccccagagattgagggaggtatgaagctgtctctcttctccacctcatcaacaaaggccccacctcgagagccaaacatctagctatacttgaagtctctcatctaaaagattgaagatcttttcagtgtggtgaaagtgcgagaataaaaagaagtgccctcactcgcataaaataaggttctgaaaatataaaggattaaccagacatctcaagaaatggctgggattgtctcagtaacataataatcatgtcccccaatgagaattaaggtaatgagacacacccaccattttgacaactcagccaatccttgcaaagtatgagtcgcacatgtacaactaaaggtgtacctcaagaaacaactgaggttccccagtatcccaagcagcatgcattcctcgcatgaacattgagttaatgggaaatcctcactatttcgagaaacctggtttgtcctaacacgcgactaaaaaagcaagaaaagtgaaaactggccgcatgcctcaaatcactgggtgtatcacagtgacccaaggaacatgcattcctcgcatgaacattaagttactgtggcacacccaccattcaaaagacttagccaatatttgcaacaaagacacatacataatctggaggctaaaaataaaccctagactctaacagggagcaaaatagctaaatttcagatttactaagatattcataagtgtgagcaagaatttgggatgatcatctctaaactggcgagtattcataatattcaacgagaaatgtgcgaacactccaattgttcttcttgaaacccatgattattcaagtttcaggcttatatttccagatatatgcaaagttttgttagaaaacaaaatttcacatatgtacttcctattgtcacatgcattttctatctcctaaaacgcagaatatagattgattctcaaattaaaaggaaaataattaccaacaattttctactaaccttgagaatgttgatattctttagagaatcagaagcttctaaatccctttgtggaaaataaaagaaggaaggtggaagaggttcatgtggtttcaaaaatcagagaaaaaggaagagaaaaacaaaaatgagagggaaaagaagtgaaggataattttgtatctggaagtttaaataccaatcccttattaattgggatggagacacatggcaagagaatgcctaaggtctcacaatcaaacatttatccataataacgcctacatggactctaaagagttttgatgaagtggcaccccaaatgggttaagtataaagattacagccgtgtttttgaaacactcgattagacaaccaaaagtcaccatctcgtgacaacccttcgcctgtctctcgcttatagtttccctcaagacataagctgtcagtcgcggaactaggggatctgttataatgagaatttctcacctggaaactcgagactgggttcctataagaatgacacgtggactcactctcctcgaggatggttgagatgtcagttagagatcccttgagtgcaaacctcgcctgaactagactcagcaagatgatgtgaccttgatagtgtctagtcgcagtcgaatagctcgcatggagcaggactgaagaccgagttaagactcgcatataccaagaagtatgcaaggactataaaggtcttcctgggaagaggaaaagattgcttccacattcatcgagctggtccggatgacccaataacctcgataactcgataaggactcgcatgtcttaagttatcgacctattacaagatgtctgtataagcgacttgaacaggacgcagacatcccagacccgattagtcttgtacggatcttaagcttgcaagcttatgcaagaatatgaacagataactcgcactatagaagtcacatatgttgttgcatttagtgaattgggctgaaactgttcttcatttattgtgtttacttttttgttgatttaattgttataattcaatgtaaaaacggattgataatgaattcaatctctgtgtaatcaatggacacttgctttataaaacggagtaatccaacgtgaataaaacaagacaaaaaagccttgcaacagtggactaagcaaacagtggactaaattatcaacctcagaaggacatgggaaaagcttcagctcgttgtcagggttattattgctatcccaaggagatgacccagtgagataccctttgcagcgtatctaaacccacgtcagcattgacctagtaaaagtgaataaatcacagctgtgtgattttcacataataaccgcaattattttacgtgagacaaaatcaaattccataattttagggaaatattattgtgggatatgaatctaattgtaattcacttccaccctatataactataaataggggcaaaatgtagtgaaacatggacaaaaaatccttgagagaaaaaaccctagtttgtatcagagaaatctaataagatagactcatggactatgcaaaattttaactgcaaaaccacatataaaacttggtgtgatcattacattattcttcttatttttattttatattatttctgtgtgttattccattttttgcactatgatgtggcacacacatgctggtgacacgtggctcctatttcctacatctggctaaaaagatattttgaacagagttctgcatacacttgcacggatagaatctgcctactgagcagagtaggggtagatggttcgagcagcgtatcaacactttgcaattccaagattggcatcgtgaaacaagaaagcaatccccataattcaaggatcgtatcaaagggatatggcaagttgtccgaatccgacaatctatgtattctatatatgtgatgtatgtctttactaattatagatattgtaagcagaagggaaacattccctttagaatttaactttataaatagtaatccattctcactggtataggggtcgaaagaattacttcagagagatctaagagaatacactcagagatttcattgtgagagctttaagagaggcaacactgtattctttgttcttgagttaatacaatccaaggtccgaacatctttaaaatcttgtgttctttactgttcattagttcttattttatattaattatattttctatcacttattatttgactcattgtcaatggctaaaagtgaggtcaatattttggtgctttcattgagagcaatagtccaagtttgctctttgttttatgtttaaccagacacacaaaatggtggttcaaactcgcaaaggcgtagtatatcaagtttatccattagtagcaggtcgtacattacagactcctggaatgctagggtcccgccagctactaatcctgagcaaccaaatgcgcaaccacctactgtgcgtcaaggtgtgagatctcctctggctgggataacacccggtgtgcaagagactggaaacaccaatttagcagccgacctgcgtacacccagtactagaatcagtttagcaacaaatgttcagacgaccataagagatgacactgaaatttagaacctctacaatgcgttggggctcatgctaggtcataccaataccttgcatcatgatcaggaagagctccgtgctgccgtgaatcttgtgtttgaagagaaaaggcattagttcaatgaatggagggatagagagatgaaaatgttgaaggctcaacaggcagccatcgaagaccgaacaagacaggttaccgtactgatccgaagagcctatcaagttgctaaccgccaacaagctgcagcctccagcatcccactaggtagctcaagagaaattcttgctggtcataccacccaaactctgaacggtcagtcgtccaaagcccgatcaaagtggtaggcggcagaccttatttggcaattcatcaggtgggttataccgatactccgccaactaacagttctggccaactgactgaccaaaccaactagttgctgagacaacctattgtttgagtattcaatagacagggaacatgtcatgatctcagggatgatcaaaatagaaggaggggtctggacaaacaatatgttcaaccagctacttagcatggtatccgtatgtaagatcaatttcaaagagatcctaacgtggcattgatcagccaagaggtcgaacaagttcacccatccatgcaagcacagttggatgaattgaaaaatatgttccaaggcctggccggtcaaaaactccatgatctagagttggattgagcacgcggatcgccattcactcttgagatcaatgttttagaggtacccctagttcaaaatgccaacttggaagatatatatagggaaagaagatcccttatcacatctcaagtattttgaaatggaaatgggtttgcaaggggtaggagaagatgtgaactgcagagtattctctgccatactttcagaagtctcacagtagtggtacttcaagttaccaccaggaaggttcaattctaaagccttctcctcagaatttcatgcacagttctcttcttcctgccaacacccattgcatttagaagacctggtcgaagtgaagaaaagaccaagagaacctctctgagcctatataagcagattcatgacagaggccac

SEQ ID NO: 311556 - DNA, 632 bp, Cannabis indica
ctggtaaaatatatccaacatcaactgcaaagccactccaacaactcacaaaaataggggttcaactctaaatatgtacctattctttgggagcaattaattggttactttttgtatatttaaatatgtgagaaaatggtaatatctctctattttaagggatattaatctattttgaataagatcttttgtaagctctaacctatataaagggcattaggccagatcaataacctatgttctaagctctcatcatgcaaccctacctttttctctctcgcacgccacatgcataaacaagacaataagtctgtttctcatctcattcatttgagatctgccttacattgttctcactattgtaacattcatagagagccatactagaaatcacaaggtaaaagcttgtgatctgtatggtattatctctcaaatcaatacaagtaaaaggggagtaggtcattacccgctagtcaagggggtcgaacctctataaatcgctgtgtcaattttattatttgcttgcattgactatacatggtgattgtgttaggttttgtgccctaaataaaacccatttcaatataataagatttatctaataataaagatcagaaataacattttatgtt

SEQ ID NO: 311557 - DNA, 1439 bp, Cannabis indica
aagaaaaaaattgaaatgttattattattatttatttatttaataaatactcatccaatatataatgtatcattttaagtgaattattctgttatagaaaataaaataaaataatgaaaaaaacttagaatatagatagaatggtaaagagaaaatatattggagtgttattcttattattttattaaacactcattcccgtaatgcattatttttatatgttgatcattcaaagtcattgtcattatacgactctaatactaatatatatcaagtactgtcgttatgaatctttttctttgctatttttactgagagttttgctcactatcaatggaccatcaatatcaagctactctctctcacttttttttttatttataaatattgattaatataatttttattgaattacataaatattcttatttatatatattgttatacccaaaattcgactaccatttcaatggaggacacgtgtcaagttaagggaaatatggatcgatgcatgtaacggtaatcacattaaatggaataactcattaaatgcggaagtaacagagtatatttgcaactcgctaactataaggttttctgcgagataaatgtatacaaactgttacctcatatattaacgagaaaccatatgacattggatgcaaaaagcgagacattaacttcgttacacctgggaagacgaaagcgatacatattgaatgtgaaaacacttagcgtataatatacaactaattataacagtcgggcaaacccaaacaactaatagcgaggtgtctatctcgctataggaaggcatactcctgttactttcacaaatcaacttcagacgttttgacaagtcagaagctgacattcgaatgatgactactgaaataccccttttgtcattaaaaaatgtgattgttaaaatgaagcgttatgccatcaaacgaagaagcaacgaggcagatatcgtcaacctcagagacataggggaaaagttccaactcactatcaaggtcattggtactgagtttctgtcgagacatcccagaacgttatcatttccaatgtgtttaaatacacaatcattttgacccagtaaaagcactgtgattttcaaatattaaccgcatttataccaagtgatatgtaatcaaaccccacgatttaggggataaacattgtaaagattacgatcaactctgtaattaactgcctactatgggattataaatagaggcaagttagataaaaaaaagggacgaaaaaataataagaaggaaaggccctgaaaaaccatcagaaatttaataagattgactcgtggactatgcagaatcttaactgcaaaaccacgtaaaaaatccttttgcgttcatactttttcctttactgttttttttttaaagtgtaagattatcactattaggctcata

SEQ ID NO: 311558 - DNA, 3235 bp, Cannabis indica
ggaagcggtaagctgagtatactgtttggaattttttttaagttaattatgtaatatcgaatcaggtcagccctgacctgaaaaaaatctaaccggggcggggcggggtggggcgaaaacctgattatatgcccgattgtcacggggcgagactgccccatcgagtcggggccccgacccgatctgcgaaaaagctccaatttgccattcctactcacaaccactggtctaatatgaaatcgaaggtaaattatgttggagttaggcttcactactctcccatgatccccaaaaagggccaagtaatcgctaaacttgacctgaatgaaattgcaattgaatctgaatactgaaaaactgttgtctatggttatgggagctaatgctccactcaaggtattcgaaggatttgctaggcgtgtttggggtaatcttgatttagaaagaacggtgatgatgaataatggcataaatttggtcaaatttagagatgaggctacaagagactttgtattggatgtgttgtgtactttgataacaagccaattatcatgaggcattgatctccagactgtgactccatagagatgatcaaattggtgccgatttggataacaattcatatggtgagattggtactcccataataaatgataatattacaaaagaaaggtcccaagttaaatttgttaaggtactggttgatatggaaattaaggagggtcttccttctcttatcaactttgagaatgaatgtggtttgttggactctattctgatagcctatgaatggcttcccactaagtgttcatagtgtggtggctatggacataagggggatcaatgtaggtgtaacatcctacttagaggaacgccactgtcgcacagggacaccacgtgtgtgcttttacaaatttattttaacctaatttatttgtttaaaaaaagggcagtttaatttagacttttaattaaaataaacataactgttattaaacagaaaaccactgttaagtatggggatccctgtattaaacttttacactctgtcccaaaatttgttttacaaaataggattacatttcaaaatactgtcaaaagggtggatcatgttcactggaagccgaggcaccgcgattgatatgtacatcgctggaagacctctgactcatgtttggcccactctaccattccctttacctgcaccacgaaccacccgtgagacagagactgagcaacaaaagctattaaatcacaaacaatttaaaacacaagtaatacaacttggcacaataaatatatccctcattcaacgcataatcaaacaatctataattaattaaacgtctaaaaaaaggtcaatctcagtgcctcataaaacacccttaccactcgttaaccacgagctacatatgtcactatcgttgctcggtaaagcaaatgataaataagaaacctatctacaatttcaaacgagtaattactcataacagtaatgaccgtatctaaccctcgatcataatcgagtctcaacaataataatcattaccttaatcataatcgcggcaccaaagattataatcgtttcttatagaacatgcttagcagtgcaatacacttttcttatatcatttcaatatcaggtgtgcgggccgacctgagtggaactatgcttgacaatcccgggtcctatgtcacgaaaataaaacacgatcaacaacttatccaagctccagaaacaaaacctaatttcgtaactgaacaaatctaattccccactaactcaaaataactcaaatatccctaaaataccccaatctaagttctgaaagacaccccaagcaaaaccattttcgaagccaaaattagggtttctcttacttgcaaaaccagttaaccggtttctctgctggcagaacgggaaccctggtttttcacactaaaaaccaaccaaatctcttccaaccctgttcaaacttcccaaaacagttcaaaaccataaatataatatatctagacattcaaaactcaaaaatgcactaaaattacaatttcaccattaaagagtgaatattgagttcttaaacacaattctcccaaattcaaacctagcagcaaccaaaatacacaattcacactccaaataaatttaatttaacttagaaaacatgctctgaacctaactaaccctaatccccgaaatcaagtacaaccctaacaaaactcatcctaaacgtacagaaaaacaagaagagtatagtaaggaacttacctcaaacttaggagacccctaaccttgattatcaccactaacaattggttgaatttgcaagaaaaatcctgattccttgctggtttctatggctcgagagagagaaaagagggagagtaatatatgtgttttttttcttcttaattttcatttttctaacttaatagtttaattaataagaatataaatcaaatagaaaaattctttctcagcctagatagtcactaaaagacaaaccatttacaacctaagaaataactattctaccgctctataacactatagcacaaaatacaacctaagaaataactattataccgctcttaaacactatagcacaaaatacaacctaagggtaatttggtcttttcaaactaatcgcgctaaactgattacttagaattctaaactagcccaacataactccaatacaacacaatttcaaccgtcatgaaatttttgaccactccgtcgaggttccacagttgtcaaacccaaaaaatattttatttaaaaagtggtatttacaatacccagataatctgataaaacctccgtaattaataaattacactttattgaatcatttattaaatctacactaattatcacacaattaacttaagtaagattattgcaaaccccaagttcttgtctagcctatctttttcatatttagattgattttatcttaatttatgcttgaatataaaaaacaaaaccaaagattcaacaccaaaattttacaagcttcacctgccatagaaactcattctaggcggctagtgcttgggttccctgaaccagggtaataactttcactatattcaaagatgtatcttacaactaccaacaatattgtaaacaatacactcttttgtaaaataacagtgaatctatacccataccaaccaagacccttcgattggagacacaagatccccttcgtgtgaatgatgagct

SEQ ID NO: 311559 - DNA, 634 bp, Cannabis indica
ataccttgaatgcataattctttacatcaatatatgtaaaatatagcatagcatttaaaatcatataatcactagggtaataaccctaggacatataaccgctcactttagcgtaataaccctaatcccagttctcaattaatcacaattataatatccatcatgattgctaccgtgcttaactctacgtgctaactactatcttacctgatgtcccgtatacgtggagattccaaatccccgggtgctcctaaccaagtgtcggtaatcctagtaacaatttttgagattcacaattagggttagtctttaaatgcactttcacatatttataatattggcattcaaatatagataaacatacagagcttggaacgagctttccaacgatatttggaacatccaaaacggtgttcggataaaaaagtaacgcataaaataagatcaacattcaacctgcctagaaatcaccaggcgggccacggcacatcccaagcgagccgcggcacctgggttgaaaaacccaagatttccatgggggcgggctgcagcacctgggttctaaacccagaaaaccccattttgtccaacacaaaaccaagtgttgtgaaaattgtgtacgcaagtatacgca

SEQ ID NO: 311560 - DNA, 1496 bp, Cannabis indica
atttcccatttgaatttcaaataaataaacaagaacaaaaaaaaaaaaaaacaaaactttagctttctctttggttttaccaaaaaataaataataataaagacaacacttagaaaacttttatataagaatctctcttcatttcaaaacttttgtattcattcctatctgggttttcttagttttggttaaaacaacaaaaaacaaaagtaagtgtttattttattgttcttcttctttttaaatatttagttaaattatttaattatgtgactttttattaattgaagtgtatccaagagtgaaggtgagagtagaagagtttaaagaacaagaagaatgtctttctccacaaactcaacaaggttgttccttaattatatatttatatatattgttacatatatatttattattatgagtttttgtttgatggagaaaattattattttgcagaaaaggaaaatcagagcagtgtttcaccattactaccaattgccagaattttgaaggattatgtgctaaactcaaccatggatttgaataattctgctcccaaaggtttgtttttttatatgtatatatatttgtaatatttatacaaactttttagttttgtaatatgatatttgggtaaaaaaaaacagttgagcaaaagagaggtgttgtgaaggaatcaaagccaaatcttaaagctagccttgtttcaaggcctcgtgctgtcttatcgagccctggtaataatttcattcaagagttcttatgtgttttcgagttgagattttggaaagatgaacaaattccattttctattatgattttttagaacacatacaagattagttgctaaaattgctcacactaaggcatagtttattatgagggagtttgctaaaataacattttttgggggattatttcataaatacactaaaataacaaaaaaaagtacaaaaatacggtttaacagaattttaaatatttttatgattttattttacaaaaaatatgatcttttgatttatttttatgttatactattgttaatttattgtttatttttctattatttgtatactattttttattgttgtttggaagttattttcatgttacttttataaaattttcttattgttttcatagaacatcgtgaaaatgtaataaaaatatttaaacataaaaattataaaaatttaacagaaaataatattttatgcaattatcatttttttagtcactttgcattattttggtaattttttataaaatgtttattttaaacatctctcaatatactgttttaggaaattctcaacactcaccctagtcaattaggcatggccaagaaataaaattggtttgggtcgggagcctgcgcaagctcctaatttattcgatttgcattagaagtcaaatcaaattatgtctttcattccaaggcacaacctgtatccatgcgcttcatattcgcctggagttcgctctcagaaata

SEQ ID NO: 311561 - DNA, 674 bp, Cannabis indica
ttttatattttcgtatatattattgacaattgcaaaaacttagttttccatattgtgtagttaagttagacgttatcttgttatatactataagttgtgtatataataaaatactaatactttagtatccatacatagttaacattataatagttgtatttaattaatttgattgttgtaaataataaaatcatatcaaatattaaaaaaagttatgtacctattgagaaaagagtttcataatacttaataatcaactatgaaaataacattatagtctagagcttatatactaaatttaaggaaaagaactaattgagaaaaacatttcaataaaatactgatccataaaaataaaagttaagagcatataaagtaaattcagaaagttaagaaaaaaaaattgacctaacttataaaaaggtttcaaaatattgaaaaatagttcatgaaaataataatgaagagaacataaattaaatcaatctaaaaacttaaaagatgctagatggaaggtatattagacttttatttgggcttacattattttttataagttttattaaaatttgagtcgattggatagttctttgttgtgttagcatatattgttagtgatcaatagttaatgggcttagcatctgtgtgtaaagtatatgtgaagcagaagtgtg

SEQ ID NO: 311562 - DNA, 2250 bp, Cannabis indica
ggggtaaaaatcctaattagccctttgaaaaaagcataactacagtttattatgttataactttatatgaataatatgtgaaaaagcttcgaatcctctatgcactagttttaaaaaatgatgtataattaccatgaggattgccttgctacaatctctagtgaagtgaatttcaccagagtcatattgaccagtctctatgctcagcaacaaatcaacaatatcttccttctcatcttctggagttttatttagatgctcatcaatcacaaccctgaaaaagtcatccatctcatgaaagatcttctcaaattttgcatgaacaccagtcactctatcaataatccaactccaactaaattggggaaacagatcagaggctgcaaaggttctcaacacacccattgccctacgaaccatatcttcaaacacatcactatctaatccacactcactaaatctcttcccaaaggctgtcctgaaagtcatgctagccataagagtagacatctttacactgagattaacaggagtagccgaaacagaagatcggttcagaaaatcattaagagaatcaatttcctcatctctgatgaactcaaatgactgaacactcttgctgctgaataacttgatagcacataatctcctcatctgtctccaatgttcaccataaggtgagaaagacatgtcaacattgttgtaggaaagttttgaagagccagctaaaggtggtctgttgcaacaagccaagtcattggttttcaagacctcttttgcagcttcagctgaagagacaacaatagctggtactgtcccaaaatgaagccccataacatggccatatgtttttgagagtttccatagagatatatggggtagtgaaccaagttggtgtaagttacctatgattggaagttttggaggagccggaggaagatttggcctgatttcattattggctttgatcttgtttttcacaagaaaaaacagagttagaaacaggactataggaagtagaagccacatgttaacaatattttgtgctgttgttaatgttatttcctaaataaggaactctttataagtactaatatatatatatatatatatgctcacgattcaatcacgcattgagtaataatatatatactattaattgattaaaagagaagactatattcacacactataataataatatatatactattaattgattaaaagagaagactattttcacacattataataataagatatatactattaattgactaaaagagaagattgttttcacactaattattattatcattttgactgataagtttatcacttcaatttttcatagacaaaaattataggatgtaagtctttcaataattattatgtggacatttagtcattatatatgtattgaataagatgattatgctatgtggtgaatataaagactacttaactaatacaggtatattactcagtaaatataagccatacatgagtaataaatgtagacttgtaaaaaaaatattactctacacaaaacttaattttgtatggtggagtacacttagtaaatattaaattatactttaaaaaaaattaattatttagttttttttttcagagagaagtaaaaaatttcatcaatagttaaatcagacaaaatttattacataaaaatataactcatagagtaaaattaataatagtagacatatcaagttgtttgcaataaaaataaagaaaaccttaacaacaaccttaactaaagatccaataagtcttcggtgatcaaacataaaaagcaaaaaaaaagtatgtagtaaactaagttcccaaaccaaataaatatttgacaaaatcaacttatcaatgactattagccaataattttccaataaaaattaaaacataacaactccattaaaaaaataatcaaactataaatgtttaaataatatttatattataatataaattacactcttaattataatattgtatttattttcaatattgttataaatttgaatgcttaaaataatatttaattaatattatatattttaattgtacctagttttttttatcttttttaaataattaaaactcatattgatatgggatattttcaaaaatatgggaaaaatgagccatcttatgataaatatggcaacaaaactaaatgccacaaaatatggcattaactaaggaagcaaactacaaatatgattttttttt

SEQ ID NO: 311563 - DNA, 667 bp, Cannabis indica
tactacgaccagatatgcttatttaaacttttaagcataatgagctcaaagtaatacttaaaattaataagtaatttgtaatacatatggtcgtttaactttaacattttgtaactttttttatatatgtaactagtttaactttttatgttctggaccaagttgatttgatactagtttatatgtatttttaaagttttatatgaaaagtttcatcatgatatggttttttcatatatataataaaatttaaagttatcttctttttctggttgcgaccaatttagaagttttcttcttcaattgtaaccactttaattggtgatatttgggcatgcccccttgcgaagagaaattcgttgtgttgaggttcatcttgccaagtactacgagttgttcactataaagtatcttcatttcttctctgagtaaacatattgggtcatcttcaagtagattgagttttcttcgtgtagagttatctatgagtagatttatctatgagcacagttatctactagcatagttatctacgagcatagttatctatgagaaggtttatttgtgattgtagttatctacaagcagatttatttgtgatcgtagttatctacaagcataattatctacgagcacagttatctacgagcatagttatctacgagca

SEQ ID NO: 311564 - DNA, 1453 bp, Cannabis indica
ttcaaaaacaagactttaaatacgatacttggattaatattacagtaaggttcttgcatatttttatctttcctttctatataaatttcagaaagcagtggacaagatgttgtcctttgatgttttcaatggagatctaagcctttttttccagaatattttttcatcttagtcctaaaggcgttgaaggtgagctcagctcttaatgcatgtatttctttctataaaacagactttatattctttagacactttttcttctcgttcaagacatctttttggcaaggaatctgtgattcggtttgcaaaagagccgtacgtaattttgaacatcccaagcggagatgaacacacgggcaggttttacttttgtctttttctgttattgtgggtgacattatacaaagcttgaataattaagtttttgatgcctcacactagaatcttgtacgaaagttcttgaatcttaatgcttcaacacttgcaatgaaaatccttttattttgggaaaaatcatgttgatccataatttcattttgacgttaaatttggctacaactactgtttatcttttttcaactagctacaaaaaagttgtacgcacttaaacttaggggtctttcactataaaagtcaactgaggtaacattatattatggtgctttcttgtattggtctctggtgttacgagtctaaagagcaactaactgcttgacgctcaatggaaatatatattttggtggaccatcaaagatataatcagataagatgctatgtgtcgcttctgttggatggtatagatcccaaaacacatggcctcgtctgttggagcaatattttgctattggcaggcaaggtgattcggacctaaatttcccaagaccacagcaagcagatttcacttctgtaaatcctgaaataagatgaaatttttttatgtctcagttacacatcacattaaagttgcacaagaccaaagtttgagaaggaaaaaaaaaagatgtaataaagtaccatatgatgctggttgctggacaaggttgtttaaaacatcataagtctcaaagtaggagtagctgatgttgttcaacactgatttcagttcccccaacgttgactttagaccatcattatatttgatagcccaatcattcatttcttggaagcagtctcctgacgagctttttctcctttgtgctgggcagcatccaattggccctaccccagtcactacaaatttccgagcaccataactgtgtaatttctgataaaagagagaaaacaacaagattatattatatataaaagagaagaacaattcttttgagtattatgatgacactagtaggtggacatattataccttgagttgttctttaagtgtaacaatcatttcttctacatattcttgtggggtggttcgattacgaagcttggaggagccaaagtatcc

SEQ ID NO: 311565 - DNA, 936 bp, Cannabis indica
tcactatatagtgtcactaaagggctaatttgtagtagtgtgcctagtaagatgatcgaagacaatctttgctcctgttatcccgaaagaaggatccaaaggaagatatgagttgagacggtgaacgtcaggctttgaagtctaaaaaacaatatgattttctcagcattgagggtttatttccctttttcaagtcttttgagggccacttcgacgtcaagaattttttgtgagctgggagctagaaggtctttggacggtgagtggtcttgatccttggaaacatttgtagaaagatggttagaattttgtttcttaagggttgttttaggctctgcttcgtttcttgccccttttcactggaagattgggttggtttggaagaagtttaacaaaatttaccatttctgcaaaaactaataagtaagagatgagcgagactagagaaaaaatttgtaaggcacacaaaaggcaaaccgataagtcctacctaaactactatctgaaaaagttagttgaaggtgaatcaactcgagtatctatgtacttccttgagccagtaatctcacaaatatctacaatgttaattcagttaagatcccaagtttctgcccagtacgcatttgtcacgcccgtacttttcataaattactaatttagttacaagcgttaaaatgcggaaaatctataatgtcgcttttatttataaacataaaatatttcatatttgagctcagtttggacttaaaagacataataattaataaataaaaataactgcgacattaatttaataacactaaataaaataaatggagcgtgccctagaccaccctcagttatatggtcctcagcgagtacacacacaagcctccaaggtctcacttgccaccagctctctaagttttagaaccttaatctgcacatggtaagttt

SEQ ID NO: 311566 - DNA, 5007 bp, Cannabis indica
tgaccaaagctatgatcttgtttccaaggactttatcctttctgtctaaaatctgaattggttgttcttcgtacgatagatctggctgaagttctaggttctcataactcagcacatgagtgggatcttaaacgtatttctgtaatatagaaacatgaaacacgtatcagcgactctcctgttgcaacaattgaggtgtctgttccaacagatcatgaatctgatgaaacagatactgagaagacagaaaagaaatttccaaatataatctcagatgaattctagaaagagccctctagtagagttaaattgaatcatccatcagacttaattcttgaaaatccaaaagatggtatggtaacaagaagaaggtttagtagtgttgctcaatttatttatttttttctccttcattgaacctaaaaatgtgaaagaagctttaactgatgaattttggatcaaagctatgcaggaagagtaagagcaatttttttagaaacaaagtgtggattcttgctcctagaccattgtatatcaatatcattggtacaaaatagatttacaagaacaaaattgatgagtttggcgcgattattcagaataaagaaagacttgtggcacaagggtatacacaagtagaaggaatggactttgatgaaacctttgcacatgttgctgacttgaattaactagattattattgtctattgcttgtttgattagtttcatgttattccaaatggatgtcagatcaccatttctcaatagaatctttaatgaagaagtctatgttgaacaaccgaagggattcgaggatcctcatgcacctgatcatgtttacgaattggagaaagctctttatgatttgaaacaagccccacaggcttggtatgagagactaactcaatttttagtttctcatggttacaagaggggaggagtagataaaactttatttatcaaaaataataaatctaacattatcattgctcagatttagtagatgatattgtttttagttttacttttaacaatgaggtgcaggtttttgtgaaacagataaaagaggaatttgagatgagcatggtgggagagttgaactatttggtttacaagtcaagcagttaggtgatggtatatttgtttctcaaagcaaatatgctataaatttggtgaaaaagtttggacttaaacaattgtgaagttgtccaaagatgagaacagtgtcaaagttgatcctacactgtataggagcatgattggcagtcttctttatcttactggtagtaggcctgacttgagttatagtattggtgtgtgtgccaggtaccaagaaaattccatggagtctcatgtaacagttgtcaaaagaatcatatgttatgttcatgggactgttgattatgtctttggtattcaaaggaaactaatactaatcttgtgtgttttagtgatactaattgggcaggtaatactgatgacagaaaaaacacaagtggaggttgtttctacttgggaacaatttagtttcatggcacagcaaaaaacaaaattcaatctctctttctactgctgaggtcgaatacattactgttggaagttgttgtgctgaacttttatggatgaaacaataacgatagattatgagtttgatcttgacactttaactatcttttgtgacaatgctagtgcaatcaatatttcaaaaaatcctgtgcaacattcatgaactaaatatattgatattcgtcatcatttcataagagaattagttgaaaataaagctcttgtcctggaatacattgaaacacataaacaaattgctgacattttcactaaggctcttgatttgattcgctttgatttcctccaaaaatatttgggagcttgttctctttaatcatcaaaagtttctttttgttgcctgatcaagtgtgtttatctctaatttaagaaatttggcaatcgttttcaaaattgtattttgtgttttgaaagataattggacttgtattttttgtgattatggttaatgtttgagcatcctttgtgtagcattgtttcaaactcctatgtaagaatagagatgatgttggctctgataccaaaaaagaaaatagagatattccaaaaggtccagaaagagtattctagaaggcctaagaacgttaggagagtgtgtgaaagtgatcttttgagtaagttgatactttgtaattcgcagttatgaaaagaatacgctaccataaaaaagggctaccactggtgtagtgtgacagcatcttcatgggttacaatctttacatttaggaaggaccttcttgtcaaaatgggcaatgttcccttgaatacactatcacacacatatgcttgaaactttgcaagaaaaatattacaaagtttatttaagaaaaatataagtgtcagactcttacatgttgattgattatcttaaaagaatatgtgtttgtgattgaactgtgcttgtttctctcaaaaattctttctatttttcaaaaatcgcaagtgtttatcatacactaacatctattttcatttggcttgtcttatgtctttttcaggataatgcacattgatcataggtattttttttggactttgtcattctatttcgaaataaaaaaaaaatcatggttttttaagtgggcagaattaattgaagcatttggtaaaaattggcattttatttatttgttctaaaatattcttggtcatcgagtctttatttttgtcaactaatcatggtatgtttgatatttgtcataatttagttattcttgttgctatttttatcttgtctttaatttaaaagaaaaaagaggaaaaaaaaaggtaaagtgtcttgggctgatcatgtagggttttgtggaccctatttttgtggtttctttattgcattttttcgaaaagaataaataaaaaaatctttttgtttcactttttatttgcaaatcttttttaattaaaaaggggtaacttcatggctaattaaatatattggtggtattattttttatttcctttttcgtttacttaaaaaaagaaaactactttatggtggttttttgacaaatagagtaagtcttgtcacttaaatatatcacacctactttcttttctcctcacgatttcaatttcttcttcattgtattttttctctaaaaaatcgtgtgtgagtgtgcttgagtttcagtttttgcaaaaaggaaaaatggtgaatacctgaagaggatcatcgtccaaggcccttggtgcatctaaagtccgaccaccacaatcacctttggcttcaattttgacctccctgccacgtgcgtcaactccgatcgcctcaattagttgcaccaccaagaccaaggctcaaaaaaaagtgtttcctctctccaatgagaatcctattgtgtttccagacatcacctctaatattggagtcgatgcaccaccatctgaagtggtggtgccatctcgagtcaaaaatgttaactcttttcctattaaaccctcgatggtggctagggcaaaggctaaattgaattcatctttatcaaagattgatgggcttctcaaattacctatgaagtcaagtcgatcaaagaaaaatgagttggcaccaaaaagaaaattaattttgaacacttcttcatctccattgtcttccccgtctgttggaaagaagaaattacaggctcatcctccatctccatcaccatcttcttttgaatttgagcctgaagaagaagaatctaagtccaaaactgatgagtattatgaatcatttcctgatcatgttgaatctacaccagaatctaaagaatcagagtttgaagatgttgctgcccctgttccagaagtagtgtctacccctgcaccaatcacttaaccattgtcttcaaagggtaaaggcaagaaaccagtcactgaacctatatcttctccaaggatgaaatgtgtacagtttaaagctcattctcctttattttgttacaatgataatgctcgtgagatggttatttatgcacaaagaaaatttcttgttgaaagaaattatattttgagtgatcatcatccatatggtgttctgaatatactttaagaaagaaaatgggcgagttctttggctaatttttttggctatgtggataggattgttaaagcgttttatgctaatctcaataatgaaattgttgattctaactttaccatgttttgtaaagtgtttgtgagaggtcattggttttctttctctccacaagatgtagcaaagacctagcatcttccttctcttgctattctagatgaagaagagagtgaacctcttgacaaggatgaggttctttccgagattatgggtcaaaagatggtgtggccttaaaattctgttatctcggtcaccaatctcacttatatgtatgtcgtgcttcacaagtttgctataacaaattggaaatcgacttctcacactacaaccatctcctttgatatggcttctttcttgtacaaggttggaactggtcatgatattaatttggccactgtcatctatgaccaaatcattagttttcgaaaaggtaacaagaaaaatttgccttttcctcaagttatttacaagattttgagtatgcagaaaagtgatcttaagactaagcaagaagattgtggctccttccactgctgcatcctacaaggcatctgcaccaattcttgatactgttgaagcctcatcatcaaagaaatccaagcctcaatcactagtgtttgcttcggatgatcttcctacagaagcttttgttccaactgcttcagcatctatcacaacaaaactctctggtgttcgagtttcccttgatgccttgactgctcgagtactgaaccttgagggactccaacgttcagttttggatgttgtcaaagccttgtctaaggttccagaagcttagttttcttgtccttttattttgtctttattcctaaggacattgatacttt

SEQ ID NO: 311567 - DNA, 1364 bp, Cannabis indica
agaatttctatttttgtacctactaaattgagcagtaagtgcgactttccttttatagaaaaggatagtttagcttcggttttctccgcaagaaatttgatcaaacaaaatgagaaactcacacaagatcagaatatcacaactggttaggtagagaagaaatgagtaaccaaacttaccctttttaccttattttctgtaaataggaaagctagacaacttttcttccaaagacaaattgcttaatattaaattcacacataaaataataaaaccaatatttacacatagccgaaattaaacaataaattaataaaatatttttatcaattaaatatgtcaaaaatagaattaacaattacaaatatacttcacacagtttgataaacttttatacattttttaatgttttatttaccaaaatatattttgtacacatcatgcatgtactgctgatgtcattcatctacaatgacactcaacccttttcccctctctttattgtcttttttttccagttttcatttgatttatttcaacacatcaaaataaggattttcgcctaaaaattgctccccacgatctcctactgccattgaagcttcattctgcaatttatttctatttttttttccttatatcaatggctatcaccccgttcctcctcttctccatctccttctgtgaaaaaatccaatgtttctaaacctacaacaatgggtgtgaaatcactgggcaaaaaaagtaaagataaataggttattgtggaagaagatgacactaacgaagattttttttgaaccagtaacaaaacatgaaggttcttctttgaagaagaaatcgaagaggaatgaaggtgataagagttttataccaaaagttaagaaagagaaaaagaatgttaatgaaatgcttaagattttatttcagtttcttttctattttgcctaatttataaattttgcctatgttctttttagtgtttttacatgtgattttgtttttagggtttcatatattttttgtattttgttgttatattcgcaatctcttgagatgaattcatcaatagcttcgtaatttacataatttatttctttatcaaactgcccattgaactgtatgagaaatgaaatttcttttgtttcttgaaatttttaaaaatttaattatggtcagccaactatgagaaaactgtaaataaactaaaacacaatagggcattgaaaatacaggcacaccattagctatttttactactacaaagttagcttttagtgacattctatagtgacccgcacaaaagtgtaggtcactaaatatttgaattttttttagtgactcacattattagactgtaaaaa

SEQ ID NO: 311568 - DNA, 2196 bp, Cannabis indica
tcacatcctcccaaaagaaatcggcctttctagactcactgtaacattctcggacacaccattgagaaatattacaaaattcacggataccccctaggatatcacaagaatgatagaggaaaagaaggatctgcctctgcaaatcaggttcaaactggcaatgacacgagcactaagcaggaaggacaagccttaccgcctcaacttacagctacacaatatcaacagctattaaatctgctggctgttctacaaaccgatatggtaaacactgaagcaggaaacggtacaggtaattcaggtattgtgctttcaagcatgtctaattttccttctattaattcttggatattggattctggtgccactaggcatatatgctatgacaaaaatctgtttcaatgtatatgtaatactcatcttaccagattattactgcctaacaatgaaagtattgttgtcaatcaaagttgtaccattgctatttctaatgagttaaatttgagtaatgtgctttatgttcccacattcaaatacgatatcatttcagtaagttgcctaactaatgacaacaacctatctgttcaattttccgctaatcattttgtcatacaggaccaaaccaacaagaagaagattggcagaggtgaatccaagaatgggctatacatcttggactacaaacctcatgactaccccatccttactgtttctgctaatacttggcactcaaggcttggacatcccctcgaacaagcatttgaatcttttagatagcaaacttaattgtaattcttctaatttgcataaagacattccttgttatattttccctatggcaaaacaaagaaagcttcctttcaaaaataaagccacttttgctaataatatttttgatttgattcattgtgatgtgtggggtccctatcatgttccatcgcactctggttttaaattttttctcaccattgttgatgatcactcacgtttcatttggatatatctattgaagcaaaaatctgatgtacacactgtgattcctcaatttttgacttatggtgaaactcaattcaactgtaaaatcaaaaagttcaggtcggacaatgcccctgaacttattttcaaagatctttttctcaaatatggcatcttgcatgattttacatgtgttgagacacctaaacagaatgctattgctgaaaggaaacaccaacatttgctaaatgttgcccgtgctctttgttttcaagcacacacaccattgaaattttggtctgaacgcattatgactgctaccttcctcataaatcgcatcccaactcctaattagaacaacatgacactttatgaattgttgtttcacattcaacctgattacacccatttaaaaacttttggttgccttgcttttgcttctactcttacagctcatagaagtaaattttcttccagagcaagagcttgtgtttttcttggttatccccaatgtgtgaagggataccggctgtatgatatcaacagtaaccaggttttcatatctagaaatgtagtgtttcatgaacatatatttccttttcataaacttaaagatgaaatttttaacatcgatcctttcaccactattgttttaccctctactagcgttgataacacactggttgatgattaccccattgacaccacaactgttcccagcaaagatttacctgtgcaggacacacacacagacacccccatcaccacaaacatgcctgctgccacaacagtcacaccagcagccacccctacaacctcagaagtgatccctcaaagaacaagtagaacaaccagacctcctgcttatctacgagatttcgagtgttattctgttttacaagacaagcattctactcctcactcacttgataaatacatgtcctattatagacaatttgaatcttataaagtatttattcttgcagttacttcactcaaagagcctcaaacttatcaacaagccatccaattcaaacattggcttgaagctatgaatatagagctccatgctttacgcaacaataacactttgatagttgtaccattgcccccaaataaaagagccattaaatgtcgatgggtttacaaaatcaaacttaatagtgatggttcaatagaaagattcaaagccagactcgttgctcaaggatacacacaaca

SEQ ID NO: 311569 - DNA, 1610 bp, Cannabis indica
tttagttgagaatagtactgctacaaattttcctaatgaccccagcagaaccggtaagaggtttaatgtctcccattttaatcatggcagaagcgaaatcagagctgaatttggaaggactcctgctgtattccgtgacaatggtgtcggttgagtctccactgaataaaatttggtcagactcaagaagaccctttttctgaatcaaattcttaaagtaattgttatcaaaggaattaggagtcaccaaatcaagcggggcaagagtagaatcatcttgagacgagctagtagaaggacaccgacgttggcgagttctagcaaagttagcatcaatattagtcatgttgtaaattcttgaacgaaataggccacactgggcttgtccaattgtatgagagcctgatagggcaaccatgtctctggcattaagacctttgcggccaaacaaatcaatcaattctttgagtgtagctgtgaaaagaggaagatcactctcagcttcggatttgcttgctgtggtagaatctcttctaccaagcatgacggtccaagatggcccacccacagcagccgacgcatctcgcgctgcaacggctagaatatcggcacaagaaacaactccgggacaaatgctttccactttggattttgcatcttctatcacattttcacctctaatcgacccaaagttttggagagcactcttttcactcactattgagtctgaatcttctagtaaaagtgatgcatcacatccctatatagtacaaccagttaattataattagtttataagaaaaatatgtaacatacattacaaacaaattttacacaataaaatttgtgattaaaattatcatttttatgttgtcattaaagttttcaccaattaataaattagtttaagaagaagaatatgtaacataatatgtttttaattgtaaaattatattaatttatatataaaaaaaaaaaaaaaacttaagaatttgaacataggccctgtttgcctcacccttcaggcgcatgtagaaaatacctgaacaaagcaatcatgaaaatgaaggcggatgagagaagctgccatgcggcgctctttagaaatggctgttcggatggaagttcgaatggtggagagagcatttgggcaagtagcgtcgtaaaatgtggaagagagttgagctgtgcatgatgagctactcatgatcatgatcaacagcaaagcaatagctgagtatgtaaaagaccccataattctaagaagtaacacagtagtactatagctaatatggttttcagaatatgtatatatatgtttatattttatagagtgatattgatgtatgagaatgagatgagaagatatgatgatgattaatgattgttttggtgaagaaataagattgtagcaattggtatttatagtagtagtatagatcacttatgttaattgattaatgaatatttctttgtttgtttgggtcacagtcatcacgctcacgcgttctacttggtctgttttggttggcttttatatatatagaaaaatatataagtggtggcatgcatcaaaaagtcagcgagaataatccatatgcatgcatgca

SEQ ID NO: 311570 - DNA, 2154 bp, Cannabis indica
tttcaaggtgaaaccttttggcgccacgtttcctgtatgaccaataatccccattgtctcggtgcctctccacacgagcagaaaacttcttgggggcccaacagtcatttatttacatgtattttaccccaatagtgggcttattgcaaaagaccctaggcgggtcatggtcatgtccatacccgcactttagcctataaataccccttgatttttatacaagagggggatggaaagagagatagctaaagctctaccaaatttcctctaagctttcttcttttctaagagaaactaagagtgtagagttaggattttttacaaatactattgtaaaaacattatacaagcctcctaaggccaatagactgactcgtggactagggctcattaacgcctgaaccatgtaaaaatctttgtcttcttcgttattgcatttaatatttcttaagctcttatttaattagtttttaaaaatctcggtaactgagaaagaagataacctttgggataaaaggaaactttaataccaaaaaaatagcgtagataacccaaatccttcatctcaaactaagaagttaattctgactttaacacttcaattccctgtaaatcatctcctataataatcatatcatcaacataaggaaaaaataatatgatttgcaaatgtacacttgacaaataaagttgaatcatgatcacctgagacaaaaccaagagacaaaataactgtagagaacttctaaaaccatgctcagagagcctatttaagaccatacgagaatttttttatcttgtgaacctcttcttgcctacaaggaatactagaaggaggaagcatgcaaacctcctcatataacttttaaaattgttctaacagagaagcaaaatcgtaagagccaaatggaagaatagttgcagcagtaataaattgtggaggttgaatttggttgttaaactgtggttggttacccatatgaggaggcttggaatgatatttcaattgttgcagagcacgattcacaagcttaaggcattgagctttccaatgaccatctgtttgcaaaagggactgccaaaatagaagaattaggtgttgagagaataccttttcctaattgagacttgagacaagttacatctgctaataattcactgaccactaaatcaactgagggaagcggagaatgatgctacatagaatcacgaagttcctcaaaattactatgaagagccattaaaaattaaactaattattgttcctctctacgagcaatgtacgatgcaaaagcacgtatctctgttgatttggtgagtgccaattaatctcaaagatccgtcattacaaaatagaactcttggatgctcatatctttttgtccaatagctctaatatcaattttcaactgaaactgctttgcaaaattagactgtttatacagtctcgcaagatggcccaaatttcttttgctgtgtcatacttttctgactgggtaccaatagattgtttgacagagttttctatctaggtgagaatttttgaattgtctacttcctaattttctaatagatctgcaagttttctctttgttatagaaatataaccccacatttttgtttctttcaaaaaaaaaattcataacataattccaatacgaatgattctttccatcaaatctcacactgatcgcttaaagggaatcatctttattggtagctattgcagaaacaaaattagttgcaaaaatttccaaataaaaaacagatgaaaattcaaaattgtatagtgaaaactaatacctaaaactattatgcggataaaaaaactttacaagaaatcaatacaaaaagttagactgtcgaactatactgacgttgtacgacaccaattgtatggacaccgcaaaagctgtgattacgcttaaaaaacttactctcataaacctagctctgatgacatgataattatgtgagaagaataactaataagaataaatagatgtatagaaaataaagagattatgattcaattataaagttaaaagtaaaaggctaaatactatttgcaccatgtgttttgcaaaagttacctattggacctctattttattaaatgataaaacagactctctattttctaaaattgtacaa

SEQ ID NO: 311571 - DNA, 1249 bp, Cannabis indica
taaacaactgctaatttccaaattaactaagcgggctttacatgttctctttcgagagacttttgctcaggcgaggtctttcaagtttgaaaatttttgggctagccatcaagactgtgaagaggtggttagacataattggtcttcgttagcggggcaaaatattattcagaaaatacaggaatgtggtactgctcttcagcattggggaaaggatgtgtttggcgacttttcttctcgcattaaacaatgcaatcgtctgttaaagcaatataagaagcgacgggatgaggacggtaagagattattttatgaggctaaaaggagctctttgttgttcttaatcaaagggaggtttttcggagacaacgatctaaactgttatggtttcaagcaggggatcaaaacagcaagttctttcactctaaagcttccgcgagaaaacaaaataatcacataactagtttgaaggactcggagggtaatttgagaaaatgggatagtggactggagaatgtcatggttgagtactacaaggaactctttactgccgaacctactagctgggatgaggtgttggactatgttgtgcctactgtccgagatgagcataatgaggctttactacggcctatattagatcaataagttaaagatgcagcctttcaaatgcatccggataaatcaccaggtcctgacaggatgaatccgaaattttttcagaaatattggtccattgttggcattaatatgatccatacagttaaacattttttgcaactgagcgaatgctggtagggatgaataatacgaatattgtgctagttctaaaaaagaagaaccctgatcagatgagagagttgcggcccatttctctttgcaatgtcattgccaaatttattactaaggtccttgctaacagaatgaaaggattgttgtctgaggttatctccaaacatcaaagcgcttttatccctgggagattaattacaaataatattatggtctcttttgaaatcctacattatctttagcggaagcaagtgggcaacgatgggtttatggtgttgaaattggatttaagtaaagcttatgatagagtggattggtatttcttgtctgctatgcttgctcggatgggattcgctgataaatggattcatcttatctttggatgcttgtcctcggtaaagtaccaggttgtgagtagtggtcgaactatgggtcctattgtgcctagtagaggcct

SEQ ID NO: 311572 - DNA, 700 bp, Cannabis indica
aaaagtaaaaaggctaagaacttacacaaacattctaattataatgatggaataatggccatatcgcccactgggttccagagaaatcttacttttgagttttgagaacggtttcgtgtttccaagtactagctgtagccagtagccacacgtttcaattttgctgcttcgatcgcattacttttctgttataaaacatgagtattgttattactctcttaagaaccctacaccaataacaatgtcactagcgccctgactgagtgattaggaaatttttatattatttattaaattaaaatatatgagatttaatattaaattagctcaatatagtatattatatattatggtacttgatacctaaagggcagatgtaattgataggatgtggggtggcccgccggctcccctcaatttgtaaaaatttgaatgtaatatatgtaatgtgtagtttccaattaaagaaaaaactaatctcacctaaagaaactgtcaaattattaacatataaataaacattcctaaaacatatataataaattgatcgtgttctatgattattatctttttgtgttatatattagtgtaaaaataataatgtttttacttgcccaacagctaagcttattattgattttatcaagaatcacactacagtccgagatttttcatcttgttggtctcaaaaggactccaa

SEQ ID NO: 311573 - DNA, 1754 bp, Cannabis indica
agcccacattactttcatccaaagcaatggaatccttcagaatttccttacccatgtgccttcttttattgtccacaattaccacagagtcatcattttgactttccaaatgcatctgatcattatccttattaccataattatcaatgatatcactctcttgattctctccaggaaacaccttgattcactcctgttttcattcctgaattgcctccatcagatcgcaccattgcaggagaattaatttccatatcctccacatgattctggtgccgtcctccactagtagccgctcctccttcctcctcatgattggaccgtagccattgagcccctatgagatagtttttcttcttagtaatggctttcatccactctccataaggcttaacattcggatcaaagtgaggctcaaacctccggggacaaaacctatcactatgaccaatgagaccacatatgaagcagaaagtgggtatgaattcatacttaaaagtggtccaaatccatgttccatcttgtttaatcagtttcatacgacgctcaaaggtttgttgatgtcgattgtaacccgaatgcgaaggtaatcacgccatataccaataaagttcttcgcatcagatttgatgaatgttcccacataattcccagcatgtttaaccacccattccgacataaaaccatacttcaaatcatgaagctgaacccacatatcaatctcatgcaacggaaccactctaggatcctcccctcttttcaaacgatgaaacacaagcggcattctgttaaacgtccaaggactcccatcgataaccgtttggacatcaatttcatgatagaactgaaatagataccgattattatccaattctttgatataaactcccttcccaggctgccaaagtgaagccaacatatgcctcatagcatcaaaatcaaatgtcctattagtaagtaacttaccaaccaagcaccattgatcgtcaaatgcttgaacatcctctgcctgatcatcagaaatcagaactccctcttcttctccctcaatatccaggtgtgcatattgatccatccagtcaccaccttgatgactacttgaagccataataacaaccagaaagaaacaacaatccgaaacagcaacagacaaaatacttagagacaaaataacatactcaacatgtcacaagacaagacctttgctaattataatttaagacaagttaaattgttttagtacttataaatcttcaatgttattaaaaattgaacaaagtttcctctgtttctataacattttccaattttataaatacctatatcaacaaataaaaatcacgataaacaacacataaaaaacataattaaaaattagacaaagtttccttcgtttctataatattttctaattttaaaagtacctatatcaacaaataaaaaacacgataaactacacacaataaatataattgaaaattaggcagagtttcctctgtttctataacatttttcactttcataagtacccattatatccacaaataacaaatatcacacaataagtttcttccttatatcttcgcacacaaattttccaggacctacttcactacaacacacaagtttcaaccttccattatcatcgcaacaaaatacataaccaggtcgcacaacgactacaaaataataaagcccagatgtcccgagatcgaacactccaggtcgcgccgccatgacatgtacaacctcat

SEQ ID NO: 311574 - DNA, 607 bp, Cannabis indica
aaaaaaaaaaaaacaaaatgacaacaaaactcaacacaaacacagagaacaggaagaatgagccaaaaggaagaaagagcgaagaagaaaaggtaagggaaccaacgacaaaaaacaagaaaagagccaaacgaaagttgcgaagaaacagaaaaacactactaaaggactaaacatcacaaaaaaccaacacacgacactataaaatgataaaaaacaggacactgaaaaggcagacaacaaactagcacgagaatcagcacacaacattacaccgtagaaaaaagaaggacacggagaggagaagagtagaagaccattctcctcaaaattactcatgattatgatggtaaagccaataactataattgaaaatatttatgaaacaattcaaactttgcaaagttctaaacattaatataactgactcgtaaacttgatttctctcatatgataattctttgggtgataaaaaaatggaatagttacataaggcactattttttgtaaaatatttacatttttacgttcaaagaatatttttttacatttttacggttttccaaaaaataacacgaaaacaacataaaatcaacaagaaaacaac

SEQ ID NO: 311575 - DNA, 841 bp, Cannabis indica
tttccttaattagaaatattctaatagtaagcagtatggagaatctaaaaaggattaggaataaaggtagaagggtggaaaagaaatgagtaaatactattttggactctgtgttgtcaaaaattaagcttaatgtcttatttttactattttgaaaaatacatagtttattttgtcatttaacaaaacagaaggtccattaataacttttgtaaaacacaaggtccaaaaaaatatttaccaaaaagaagaaattagttattaaactctctacaatatcttttttagtataaatatttttttaaggattattttgatatttagattatttattttgtcattttttccaatctttttttaatatgaagggattgaaatctcgacaaagggtacacatcggccactacctatgcaactcgagatcacttaacaatagataatggtacaaggcgcaagaccacttcctgcacttgcaggtcacagtaccatgatgccaacttgtcccttggaaaccacaagtctacctcaagctattaaagcctataaatttcacattctcatatgtgagagggttgaaaaatcattgtaatagttggaataggaacggtgagaggaaatcagggggaggcgagacaatgttacaacgttgcaacccacctacccgtactgatggtccgggaaaccattgagccagaaatggctgaagaagatgagttggatccccgagtggagtccgagaaaattgtggaaccaatggaggacgtcgaggaaatatcagtgtgcgacctcgactccaccaaggtactccggctaggaaagagcctagacccggaggaaaaag

SEQ ID NO: 311576 - DNA, 906 bp, Cannabis indica
ccaatctctcttcttctcttttcttttctttctctggtttgcttagaattcaacatggtatcagagctttaatctttcttgtcatggagcaatcgtctgcaaacaacaatggaggttcgttgactcctccaaattcatctcaaattcctttacctaaaactaatcttgtttccttctcgcactctctttcggttcgattggatgaatttaactatcttccatggaggcaccaagtcttggctgcaatcaaaggaagtagattacagaaatttctcgatccgaaactcgcaccaccaaaatttctctctgatgaagatcggctgcaaaacaaagtgagccctgagtttgaggactgggagcagcatgacaatgttctcgtctcttggcttctttcgtccatgtccgagaaggttctcacaagaatggtcggatctgaatccgctgctcagatctggcataatcttcgtgagtactacacttctctcaaccgagctaagattggccaataaaaaaccctcctccgcaacaccaaaatgcagaactctctaagtgattatctccttaagctcaaaagcataatcgatactcttgcttcgattgggcatcctacatctactcaagattatattgaagcaatctttaatggattgcctgccgaatacaatgtattcattacatccgtgaataccagaaccgatgcttacagtgtgcctgagatcgaagctcttttaatggctcaggaggttcagttggacaaagctgctaaggagcttgatattgccaaaagtgaggccaatcttgctaatacaaaagctcaagctggcagaggaacaacttctccatctccaaatttcccttcctatggatcaggcaacatgtatcgaggtaatccttcctcgttttctc

SEQ ID NO: 311577 - DNA, 671 bp, Cannabis indica
gttttttttttttttttttggaagatgaagggtaagaaggttgattattttctttttttcattttttattctaatattgtgggttaatttaattaattgtatctatttttagtcactacccactctctccttactttacccacaattagcccctctcactcactcactttatttctctccaactttctttctttgctctctttgtgtgagttatttctagggcttttcaagtttcaaagtcatcaatggcgaaaaacaagagtacctaaggtggtttgaggtgtcctactcatggttcccccactgctactccaacgtctctactttctactcttgttatcaagcctactgttgctacagttgctttatttttagaatctttgatagacaaagaggggaatatgtcctttgttgttgactactcgcgcggagtagttgtgctgaactcaaggagagttatttatttgtggtttgtgaactttttcatttaaaagttgtttcctttttgtgttagtatgcattcatgcatgggatattttctattatttattttgtttctaacactttatgcaagcttttttcttatgaattattgtgtcaattaaagtgtcaaaagcgaagattgttagttctatttttggcatatttagattgacaaaaatattttataa

SEQ ID NO: 311578 - DNA, 931 bp, Cannabis indica
tagcagaattactttctgctgctgcaaacgcttacagtttttatattttcttatatataactgacatttgcaaaaacacggtttttcaaatcaaattatgtttgaattgaaattgagatactaaattttcatataccgataagaaaaaaaaaccatataccctataatttgctcaaataatttcaaccgaatccatgttttgtccattcattttgtcaaactgcttatgatcttaattataaatttcatcttaagtcctaaaaatactagttgctgatatcttccaaatataatagcagatcctgcctcctactttattcagttacataaaaatagatgtatttcttttcttttctttttcttttaacgaaaaatagatgtatttacaaacagaaaattgttgcagaaaacaaccaaatcccaaaaagcagattcagtacaacaaacatttcatattagtttataaatatgtgcacaccaatgcacttttttatttcagcattcaaaaacatttttaagtctatttttttatataattgtgtatgttatacatatttaagatattctataaaatttagagaaattcaaactaatttacagtataaaaaacagtattcaaactttctatttcacacaagtataaaataaaatagtcatgcgtagaatacacttttaaaccctactttcggtgtgttaagtttttctaaatttcttaaaattttgcaagatgtcttaaataactataacgtacatgaccataagaaaaaaattgactaaaaaattatttcgaataccgaaacaaatacgggttcatcagtgcatccattctaagagattaattgtatatatttaattccaatattattttaggagtgattctacaatgcacccccttaaaatagatgtactaatgcaccctctacttgtttcg

SEQ ID NO: 311579 - DNA, 1525 bp, Cannabis indica
aagtcaatatcgccaagttgatattcttttggatcttttaccatagttaaatctctcattagtcgcatgacgtaaagaccgcacatagtgttattaggttgcctagggccctacatataatataatatgtattaatatttgatttatacataaaataaataatcaaataaaatactttttaattttacagtaaccacatacgtacgtcttagtctcaggagtattaggaaggtcatcaaactaaaaaataatctagcaagtagacataatcatcaccaaaattactcaagattgatgtctaagatcctgaactaaataaaatagcactcaataaagaagaagaaaaaattaatatcaaaatttagataattatataaaaatttagatgatcatataaaaatttagtaaaaatcttacattttctacattagtcacaataaattcgtactattaagacattgattactagctaaacatgtacttttatttattttaaatgataaaataaattgagtttaattgatatattgtctgtctccatagatttcactaaacaagttttcgacattgatctaaaacaggaactccacatccctaaaaatgtgtggaattcatacacaaacttaattaataggggtttcaatgggttaataagagtacgcaatgcgatagtcccagtcgtattttctattcggggaagaaaaggagatctacgggcacacattccaaaaagaatttgacagtctgcacgtggtcgtatggaagtgggagatatactttagtttaacattgaagataacattatctaagaaattcaaggtggtgaatgtgaaaataacattgtccaagaaattcaaggtggtgaaggtaaaaataacattgtccgaaaaattcaaggtggtcaaggtgaaaataacattgtccaagaaattcaaagtggtgaaagtgaaaattaaattgtccgaaaaattcaaggtagtgaaggtgaagattttgaagaaaattaataaattcaagctcctcaaggtgaagttgatgatcagtattcaaatctttttatgttggccaatgttgcagaagaagaatggaatcaacttcggtcagttcatgtcgttctgcctccgcctctgccagttcaggctgcccttctaattccaagaagagttccagtaatacatataaatcttctacgtgaagaaatagtactttggtgaaaaaattaaatatttcaattttatatcggttgtaattatgtgggaatattaatatttttttacatgtcgtttatgtaatgacacataaaaatgtgacatgtcgttttgtaactactgtgatttttccttttatattgtaatgcccataaaggattattaattatggtgcattttgattacttttttttggaagtttttctatattacttcttcaattatattgctttttattatgggtaaatggcagcaaaattctcaaaatttttattttggtttcacttaatcccgaaaacccaaatttaggcggtaaa

SEQ ID NO: 311580 - DNA, 2170 bp, Cannabis indica
gggcataaaacccaacatccactccaaatgcctgccacattggttccaattgtgccagcagataacctattgttggcaatcgtatggaacctttgtatgagaggtttcccttacaggcgcctccaattttttttggaggtctggacataaagaaagttgaacaatggctaacaataattgagagtatcttgaactttatgcgtgtcactgggaatgatcgggtaacctgcgctacgtttcaattctaggaagatgatcttgtgtggtgggagtcagtatccttcacccgagatgtcaccataatgaccttggaagagtttcaggatctcttcaatgccaaatattataataaggtagtccacagtgctaatcgaaaagagtttattaaactagttcagggagatattatgttattaacagaatatacaatgaactttgatctacttgctaagttggctttgggaattgtgtctgcagacttcactaagaaaaaaatacttcatgagtctaaatgccaagattaggcacgatctagtgattccaaccaatgacacaactagttatgctgagatggttcaaaaggctctccaagataagagcatagtggaattcctttaagagccccgagagactccaaatattggtggaaccaccacccttcctacttcaggttatagtagggatggtgctataccaacattgatcaaaagaggaagaatgttccaacccatggtggtttaggacatagcaagaggtttcgtgggaactaaggtagaggtgggggtcaagtttattcctatcctgagtgcccacattgcaagaaacatcatcctggagaatgtacacaaaaggcatgctttcagtgtgccatggatgggcatttcaagaaagaccgcccttagatgaaaaaggaagagtagaaataataggcaaaatccatacctgctcaggtgtttgccattacacaagcatatgctgcagcccgtccttcagtggtaacatgtcaaattattgtcaacaactcctactatactgtactgtttgactctggggctacacattcatatgtggcatcaagagtaattaataaattgggtaggcattgtaattttataaaattatggtttggaaccctactacctagtggagagttagttatctcaaaaaggtagattagatctgtgccaattagaattgaaaatagggagttgaatgttgatttagtggaatttgaattgacagagtttgatattatacttggaatggatttttttgtccaagtatttgaccggtattgattgtaaacataaaaaggtagctttttagccagagggtgaagagccatttgcttatgttgggacaattcagggttctcacatcccaatcattttagttctaaaagctaaagattcattacacagtggatgtgtaggatttttagcgttgcaattgactccagtagacctaaaatagttgagcctgagaatgtcagggtagtaagataatttcttgatgtttttactgaggagttaccgggattgtcgttacagcaagagatagattttatcattgacttggcacctggggcagagcctgttttaaaggcaccacataggatggctccaactgaacataaggtgctaaagatataacttcaagggatgctagatctagggtttacccaacctaaagtatcgccctggggagctccggtgttgttcgtaaagaagaaagatggatctctccgaatgtgtattgattatcgggaattgaataagcttacaatcaaaaacaagtatccattgcctagaattgatgacttcttcgatcagcttgagaataaaacagtgttctctaagatcgacctgtgtttgggttatcattagctgagaactcaggaggaagacttcccaaagactgcacttcggaccaggtacgaccactatgaattttggtgatgtcattcgaattgacaaatgctctagcggcctttatggatctaatgaatcgagtgttcaaggatttccctgataaatgtgttatagtgattatcaatgacatccttgtatactgttagatggaagcagagcatgagcaacatctctatatggttttacaatgactcaaagatcataaattgtatgtaaagtttaaaaagtgtgaattctgg

SEQ ID NO: 311581 - DNA, 871 bp, Cannabis indica
gacggccacacagctggcaaatcggtctacttccacgacctccacgatttgtgttctgtcctctaccgcctctgtaagatcctctgtatccacgaccgccacggcttccactattgatggataaatttgcaagattggcttgcacattgtgtagggctgatgctgagagttgttgcagacgaacttcatgactgtgaagcatgaattgaagttcttgaatggtgagaggttcagatcgtgaggtgagattaaccacaattgattcgtattctgaacctaggcctccaagaatgtataacgcaagatcctcatctgtgatagcttgatctgctgctgcaagactgtcagcataccctttcatcttgaggatatagtcatcgatggttgaagaacctttcttggtggattggagaagtccacgaatttgtagtagcctcgctctggatgtggtggcaaacagttgagcaaacaccgtccatatctccgacgatgtgcggcagttaatcacataaccaagcatgggttcagtaattgagttcatcatccaatgcatgagaaactgatctaatcgaagccattgatgatatgcttggttaggaagattacctgcagttaatcgagctggaggaggatttgttccgaggaggaatccatcaagattgtatgctcgtacagctgcaagaaccagagtgcgccagaacgtgtagttggatcgatccagtcgaagattgagggggagtagattgttgttgggaaaggatgtaggagcttctgcttctgtaggtgtatcactttgaacagaggtttctgtgtctttggacgccatgaatacctaagcatctgataccatgttatggagagaatgaaggtg

SEQ ID NO: 311582 - DNA, 1207 bp, Cannabis indica
ggaccaaacctgggactcggacccggacccagacccaaacctggacacggacacggacatggaccgggactcggacccggaccgagacttgaacccaaacccgggacccggacctaggacctggtcttggacccaggacccgggacccagtcctgaacccgaacgcaaacctggaaccgggagccgggacccagacccaggaccctaacccattgatataaaattaaaatggatgtaaaattatatgttaatattaaaattcttttaaaaaaatagttgggtcggatctgatccgatccgtataaggcggttcggatctgatccgatccgagtatctgatctagcaaggcggggcggggcagatccgtacatgatctggatcaggtcggatcatagtcagatcagatccgacccgccccattgacattcctacacgaatgcacaaactcaaagcactcatgactcgcatgcgaggccccacatgggctcgtatgcgagcccttgacaagcacacacccaggcacaaacacacatgagcgcacacactcaacgcgcagatgattcgcatgcaatcccccaactcgcacacatccacgcataaacatacaccaagacacacacacacaactcacacacgactcgcatgcaagccctcacatgggcttacatgcgagcccccaattcttacatacgcacatggacacacgaacacacacacacattcactcatggctcgtatgcaagcccatgtgctagcccccacatgggctcgcatgcaagcccctgactcgcaatatataaacacaacttatggggttggcctaggatttgcttggacgtatctcgagcctataaaaattgatggtaacattgagaaaattcatgtcgcactactacaaaaagcacatttcccgtcagtttttaattgacattaaaaattttgtcatcggtttccccaatcgacgtgtatactgtagtcgcaaaaaatgtctgtatttgtgtcagttatcaatttctgtttcaaattttttttgtcagttttcaacactcgcaaacaattataaaaattgatatttacacttatcccatcgatttataacaaacacactaaatagacacactaaaaaattttaaatctaagcccatacaaaccaaatttaagcacaatcaaaaacaaaaataaacacaaatcaaaacccagacctca

SEQ ID NO: 311583 - DNA, 1085 bp, Cannabis indica
gtggttgggcgtctcttcgtccctggggaggccatgaaaaactccggtcgctgaaggcttgatccccgaaatagtaactatcttcttcagttggtgagcacaggtcaaggtcgagtgtaactcgtccgcctcccagctagtggaccagcaggtgtatttctcgtggaccactgggcttttcatcacttcctctaaggtggtcaatttcttggcaccttgtctgaagattttgctccggttgaggtaggggtagaaatgctttgagtttgatgaagtgctcaaatctcttggtcaaagctgaagaaaccgtgctcatgaaggtcgcggagaacctcactcatctgaaaaagaaatccagcagttagcccccaaaccaaaccctaaaataaaagaagggaatgggggtcccctaaccgctagaaggagcccccctctgaatgtctgccaaagataggaaatccagagtttctcctaggcaaacatcgggcacaaatatccaaaaggcaataaaaaagagaaaaggaaaaagggagaaaagagacaagagtatgaaagtcacttcatactctcgacggtccctaagtaaagaaatcgttttccaaccccaaaaggggaaacgacagtaaacatgcaaagaattacggcacacgacggtcttcaccatgactgtcttaccgtagaaatcaagtacaattaaaacaaagacattgtcctaagttttgccctaacatgcaaatgaacaataaaaataaagcgtaccgagagacttacacaatggtgatgagcatgaagttgatgtcatccgatggtaaaacttggactggcagcgacgaaggaatagcagtaagaagtcgatgatttctggaattttttttagatgggttatctgagtcaaaatggcagagtggcgaaagtaacccaataaaaggaaagtgctggcttttataggctagaaagggtgcaaggcagctgtgattaggcaccattgtaaggtgggaattggtatcgattcacattctttgatccaacagatgggatgaataggtgtaacgaggagaaagggcggttaaaacgttcgagtgcct

SEQ ID NO: 311584 - DNA, 730 bp, Cannabis indica
cacaaatcaaaacccagacctcattgtattgggctgaagcctataattggttttatttttttattttttttttcataaattcattttttgcgtcggttgtgcactgacacaagttagcgtcactacaaaaccgacacaagttagtggcaaaattgacacaaactcaacatctattctcaatcgacgcaaattttgcccattaattttttgcgtcaattttgtaattttaatgacgttaaaatcgacgaaaaaactggtttttgtaattgtgtcgagcgagtaggctaatcgaatgccccctcattaatcttttggtcattagacaactaatctcgagagttagtggagctaatttttgaggttaataaaggctttgtgcactacttctttacgtgacgatatagagagaaatttagttgacaattacgtttgtaatgagtgaagatgattgttatagataatctgtgtgatcacatatctctctcaagtgagttgatttgtaaggtgtaaaataccattgttgatgagttgtaaactttgtattctccaatgtgtttctccattattgatgattgaataatgttggattaaaaatcctatgtgggcacatatgtataatgtatatgctattataaagtgtgatacaaaattaagtgaccaattatgttatgggtatcaaaagggtattaaattgtcatggaaataatgtgtagataccataagttaattt

SEQ ID NO: 311585 - DNA, 2033 bp, Cannabis indica
aaaaaaaaaaaaaatagtatgttcattgcattttatatatttattatgttataggtgtgttttaactttactcaattaagatccaatgatttctataagataaattttaattattaatgcaatttcttaaaattataattttcatgtctttcgtaaaaatttgttactaatttatttttatttatataatttctaaatactcttttcatatgataaaaaaaagcaagatgagtgcttttataacttctggctttaaagcttttttgtcaagttttcttaaagcaactttgtatgaccttaagataaaaaaaatattattatttggaaatagatccttcttttttcctgttttgaggccttttcatattttcaatccacttcactaaaactaacagaaaaataaaaataagatttttttttgcttaactataaaaagggattacgtggtccaaatttatactccacctctttagtagctttgacaatctcaaaccacgtgtcagttataggagtcttatacctcaaactgttttaattaggtcattggtatacacctcataatagtttctatcacattaagatggcaccgccataacaaacttgtaacgtcccgcttcaagcctccattgggccttactccatggacttatggttcttatacatgggtcgtaactttggctacttcctagaatgatgactgaccctacaaatccaacacgagtattttttagcatgcacaaagcacgcttcctgaaaaaacttcctaagaagtcactcatcctgaaattatcccagttcaagcacgcttaactgtggacttctttcgtgatgggctaccagaaaataagatacaccttgttgatataggtagtaccaatcaatctatttaagtcatcttcacatatagtcccatactacacagtcttagaatcaacacacttaaccttccttaggcgatgtgagattgtacaactctcgatctttttccttacggatcacgagactctgactgccacaaatcggtctcctaaaaggcgaaacataaataatcttgatcacaatgcaagcattttgtgtttattgttcactttgctagctagaatctttctagctaagtaatgttttattttaagtaagggagtctaccttggaagcagagttaaaggcagtcttgtttgccttggagtgtgggcttcacagaacaaatggatggtgaaattctatattttaatattactagtttataatttaattaatttcttaattaaatgcagaataataaaattggtactgaaataattattctgtagatacaaaatacaacttcgtaactcaagaataaaccagaatacaaccagtgcagaaacgtaaaaacacataaagtttttgtacgtggttttaacaatccttgcagattgctactaatccacgtggtcatgcccatagataagattcattagatagatctcaaagatacaaagtaattgacttatgcataaataaactcctccttattgtatgtcgcaaacttgatgtatctcaccttctaactgtattttgttgaaactttaagtgctcaaactccattcaatctccttaaatagttcttgcttcatcctaaggcaagacttgaaaagctatctctcgaaagcttgtagaaccttctcctaaatgtaacattgttgttcttcttcttttgtagacttgattacagactcaagaaaatacaaaatacataagcacatagaaagagacgaacacactcttccctacaaaataaaactctcttttctaaagatatgagtgaaatacaaagatgtaaaagaggtacataacctagctgctataaggtgtatttataatcaatatacaccttattaaaaacttatacatggtctgaacaagaccacatctcacttggaaactttcctgaaaaattcttcaatcaactcagaaatttcatgttccatacctacagaattgtgagcagactttcctttaatagaaaaggaaagtcttgcttcagttttctt

SEQ ID NO: 311586 - DNA, 754 bp, Cannabis indica
tattaggtatatgtaagtatagaaaatcaaatttcccatcctttgaatggtgcattattttattaaattatatatccttttactagtagtcgtgatatgattatatcataaattaattattttaaattattaataaaaataatactaaatattttaattagaatatacttatttaatttgatatatacttataaatttttgtgtaaaatatatttatttagttggatatatatacttacaaattcttgtgtaaaatatttaagtaaaattctgttaaagagaaaaaaaaaaatcctagcctacattttatcaaaaaaaaaaaaggttatgtaaatatatatacctaaaaatttgtgcttaaaataacgaatctctagtaatttaattgcaattcttcctatatgttaaaagaaatacaaaaaaaaaaaaaaacttgattcgtgatattctcttattcgagtagtcaaacatagtaaattgacaaagtcagatatttacaagacttataaaccaaaaatgacaatttatataatattaattaattgcagaaatctaccgtagaattcttcccaaaaataaacacgacagaatagaacagtctacgtaatataataatggaaaatttacatggtatactaatttttgtcatttttttacaaaaatactgccaggcgaaatttttaacttttttactgtattttttcataagtttcatactgcaatatactatgttaagtttcactggtgttctact

SEQ ID NO: 311587 - DNA, 4188 bp, Cannabis indica
tctctctctctctctctctctctctctctctctctctctctctctctctctctctctctctctctctctctctctcacttgagatttgcctacttgattcatatattgtaaccttaagagagctactacagattccacaacacttgagtagtattatgtctagtattaatacaactgaaaggggagtaagtcataacccgctaactcatggggtcgaacctctgtaaaatcttgtgttttatttatttatttattcttattgggtaactcgtggcaagtatcagtaataaatacgattgcgttgtcagttggccgaatctgaggtcaatagtttggtgctttcattgagagcgagttgtcaatttgttttatcaaacactattcttaacacaaggagaactccggctataacttctacctcatcgagtcttcctcaagaccctatggctgcaaatcctgatgttcgtgttccagtcacaactggaatgtccacgaacccgatggatgtggccaactttgctatctcagcaagcatcacaaacctggccaccgcgactggtcacgaggacactaccaacctagttggtcttaatggccaacctctgccgcccacggaggaccctccactagcacctcatactgaaggaatggccaacatggagcaacccccaagcgccacgatgggatctggtccccagtattatgttggagagacggggctaataattggtgaggcagccattggcgagcctcatatagacttgggacaagatctcgagttagccagatttagagaggttgtttgtcaagtcggccaaactgaagaaccacacgttgttggctacgatacattcgcacaaaaaaagacgcaaatttttgagatggatggatgaccaagagtaccattctccgatctcaccaggcagaattaaactgccgtaataaagaagctagtgacctgataagatggctcaatgaaagaactaccaaaagaggtcaggatcttatcaaagatcctctccaaggaaaactaatcgatagataaaggaggatctatagacagacagtcaaaccaggttcctctggaaccaggacaaactttccccaacctgaaggaggacaagtcttgccatgaagatctggtggcgagaacagccaaaatttggcaactagaggcctggggatggacagggattactggcataataacacccccgcttggccaacctttggtcggccagcaccttagaggtgcacctctggctggctaatagggtgaacccccatcccagagcattcagagcgagtaacccaaaggccaatctataacgaatgaggcccaagaataggaggaaacacccaagacaacaaaaacttaagaaatgaacactttagatacttggatccacctactccaacaattggtgtgatccaccccctttcaacgcacaggcggtactagccagtcaacgaagaacgggcagtcaagccctaccaagcatagggctggcctgccaaagccagctgccaggcttagggctggccacttttttaccctctcccaaggtatggctgaccaggctctagccagtccagggctacaacccaactaagaaaggtcaatcaaccagacccctacagtaatagatctttctgtgcaagcatagttagatcaaatacgagacatgatcaagggcttggctaacctgaaaccattagaccttgagctggataggtcaaggggctcacctttctcggcatacattaatgccttgcccttacccaagtttaagaagatgtacacgaggaaagaagattccctagtacacctaaaatatttagatatccaaacagatctctaacaagtatctagagatgtgcaatgtcaaatctttctagaaaccctagttgaaataggccaacaaaggtatttcaagatggccccaagaacatttaattcatgggaagaattctcccgagacttctatattcagttctctacctcatgacaaatacctttaagattagaggatctcgtcgaaataaagcaaagacaagacaagcctttgaaagactacattcaacaactcatggttgaggccaccaaggtcaaaggcttgaaagaaaaaggtcaatatacgaccatacttggaggcatctttccgttgagtgaattctggaaagatattagaaggatctcaatgagcaacatgaagaaatttcttgagcaagttgatggcttcataaagttagaagaagttatctagcaagcccaaacaagagggcagaccaatgttgaacaagcacagggaatcacactgccccaagtactatctgacatgtcggctagcacagacgatctctgccaattctataacaatgagaatattagaggcaagcgcaacaacgatggctctgaccaaaataatagcaaaaaggggaaattcaacgattcccttacgccatgaagtctaagggaggaggagaaaaagtgtgcatgcttcactctcctgccaaaactcccaatgcaatgcatgccaaccaaccatggcaacaagtgtcaccaaaacttgaagcacccgaccgaccactcaagtggaccaccgaggcttagccattattaggccacttatccacctagaatggccttaaaaggccaagcttttgccagcttcatggctaaacataaaagcatatcgccctaaatctctcaatattcgagagaaaagcaagagccgagaagaagtgagagcaagagcaggacaactcaactcagaaggtgcattgaccacctccctgatgcaggcatggccctcaggacacctggggcaacggctgcacgaggcaattaaggttattttaaagcttctaacaacgagactgaacatgaagctccagttgctggcctcgggccaacacacaaagtgcgggctgaatacctagacatataccacgactctcaactagtcgtaggtcattttctaggcgaatatgcagctcaatgcaaaaatatgatggcctatttgagctaatttcaagacttgttaagttagctcaaaggttgtactaaaaggcaagtccctacagacgatgcaacagccgacgtactcgctgaactagttagttgcgtcttgacaatcaaggcaaacttggttcctgctcagttttttaaagaactaagcatccctatttcaaaaaaatagatatgtgggataaccatcagatatggatgacacccataatagcatgcttccaaaaaaaaatcttgctaaaaagcaaggatgaggggggatagttgctgggtgtccgatcctggacaatataacggacagatgtggtattccaatactacatttaagaagtgttactaagaaataagctgaatagctattgacaggagtgcataaatgctatatggaaatcatgtcaggggtaaagccaaccgagtgtagatgggatcgaactgtagcatcgacttgacctccaaaagactggtcaatcatggcctcaataggctagccagccatggaatcaacaacctggctggccactacctccctagattggccggccatagcctcatccaaaattgcctctaatctcttttcgactctagaaggtcatagtcaaaactttcactgctaacctggttggtataatgatcatattggaaggaaaactctaaagattcacttaatgcaaagattcgggaagacaagagatttttttttctatagacatgacatctatattggacagatcatccaggtaaaactacacatcgcttgaccagacaaaggataaagcttaaaaagtccccgtgcagccggaagtctccacacagagttcggggcaaatgttatcccaaaaattgtcctaacaatgtggcatgatgtcatatggcacatgacaagcatattcaatagtgagtggataaaagatgaatacataatttacttagaaaaggccaaacaaaatatgcacagattgtacccgttcgatatcatatgactaacattcggaacatgatgtatgtccttatgagaaactagaaagattcgtgggaatttatatttgaattctctttcccatgattctctccctttattttaggaatgtattcaatatttggtaattaaatggaaaaaatgctagagtcgcttcccggtgagccatattcactaaaaa

SEQ ID NO: 311588 - DNA, 486 bp, Cannabis indica
tattgctttgtgttttactggtgttttatgaaaacacagtatttttgaaaaaatttccgtgtgacagtatttttgtaaaaattaatccaaatttcagtatttttgtaagtttccctataataatattgatgtggaatggtcattatgtgctcttttaagtttttctttttggtttgcctatgattcttagtgttaatgaggtcaaatttagttagggaaattttttagaaaaaaagttaaaaatatatatataaaaatagcataaagtacttgattattctttatggtaagtagtagggatgcacatttcccttacggggatggccctcggggatccgtccctaatggacggggatttcccgtctaaatggggaacaggacagggacgggattactttttgtccttaaatataaaacggggcggggatggggatcacactccccactccgacggggactgtaacaccctaactaacttaggcgtat

SEQ ID NO: 311589 - DNA, 979 bp, Cannabis indica
gtaaattatttagaatttttctaaaatatatagtgatccaaaataattatcacatacaacatatagtattgtaaattcgtgtgtgttgatcgtgctaccccgacccatactattgtaggcctaatattttcgtttcatgtttggattaatattgtgctttactcggggttactcatttttcttaaacatgtcaatccattttcatatatccgcactcaaaatcatgctttacttttccatatttttttttacagttaatgatctaattaataaactatatgtattttttttttcacaacttcaattatttttatataattttcagtaatattttacagacaattatacgaaaaatttattaaaattttaatatttacttataaatactcaaatttttaagttgcaatctacaaataaattaatatatagttttagatttataatttttaatagttttaattatacaattttaatattcagaattatatttaaattttattattttatttatttattattattattattattattaatttatagaattttttaatgtgtcatgtcatgtttttatgcttgtttgtgtcgtgtgtctttcgggctagtttattcgtacttacatgtcgtgcctttggagcttattgtgccgtgtcgtgcttaaatacatattttttttcatgtcgcgtcgtgccaatttataacatcgtgtcgtatcacgcccaagctcatatatttctatgtcaggtcatgctcgtgcctcccgagctcatgctggtttcatgtcctgttaaaaagtcttgcccatatatttaaaacattgtcaacatacatgatgcggtgaaaaaacaccctctctactaaacttttacaccagcggcagtgatatcaagaacacacgctacaaaaaaaaattacttttaattagtcacaataaaatttgtgactaaaagtaaaataaatgtaacaaattataaatcat

SEQ ID NO: 311590 - DNA, 1150 bp, Cannabis indica
gcttcagggttacatgtaaacaatgccaaatctcagatatattttggtggagttgatcctgaagttagaattgagttatgcaatatcatccgcctaactgaaggctcttatcccctgacttatctgggtaatcctcttgagaccaacaaagtggaaagcggaggactgtggaattgtgctcaaaaaaattaaatagaggattcaaacttggactagtagacacctatcttttgctgagagagttcaattgattcactcagtgttgtttggtcttagaaattacttgatgagtattttgtctcccagaaagcgtatggagggcttggttttaatgatagtgttagatggaatcatattattctcgcaaagtatgtgtgggccatttgcactaaaagagacttactttgggttaaatggatcaatgccatttacctaaagaatgattcgttttggtcctatgatctcaaacaagacactagctggtattggcccaagatttgcaacttgagaaggaaattcgagatatgtgaaattctggtaaaatgttaaggtttcagattgttttggaaattcttgactgtccagtttgtggtgcgtctttggaatcacatgaatatttattttttttcttatgatttttcccaaagagtgatggagaaaatttttaattggttgggtgttagagtgtggcctttagactacatcaattggaacatttggttggcttcaagaacaaaagttttcattcattttatgcatgttactgtgttggctgcaactgcttacactatatggctgaacatgaattgttgtgtgtttgatggatgttcaagcactatagctcatattatttcggatataaggaacactacaatgtatagattgcaagttgttagtaataagaagattaattgtatagagagagttttttttttttttaagattacaatgtaattattaactgactgtttatttttggagctgcctgatttaaggtggcttagattgtatttggtttgtttattgattaatgaagcatttttctttttgataaaaaataatttattttttttatttatttttaaattttgtgagaatgtcatttcatttttacattatttattattttttataacaaatctatctatat

SEQ ID NO: 311591 - DNA, 2254 bp, Cannabis indica
tttcaactattgacctcattcttgatgaaatgatagacatacttacaaactcaagttataaatactatataatgtttaagaatattactaacaaagagtcaggatggccgagtggtctaaggcgccagactcaagttctggtcttcgaaagagggcgtgggttcaaatcccacttctgacattttgttgctcatattattttcttagcaaataaaggaattttttaaaaaatttcccatacaggcattttactgtacagataaaatcatgcacgtgtattagcagcttcaggaaagaaaaaaaagccacgggatgaggatcattagttaaagagataaagtgataattacctaaaatattaattttttaaaaatttattttttatattttttaagtattttgtataaatacaaaaaaataatatagaaataataaaaaattaacaataaaataacaagagtacaacataaaaatagactaaaaaattatattttatgtaaattaaatttaaaaaaccgtaaaaatattaaaaattctgtacacaccgtatttttctaattttttttttattgtatttgcggcgaaactttcttaatattcataattattatacatatgggtccaaccttgagttgaaatgggcattaaagaaaatgagcccttattataagaataaatagtatttttaaaattatttaaaaaatatgtatattttctaaaaaatattttttttttatttaggtccctaaaacggatgagccttaggcgcgggtctagctcgccttagcctagattcatgagccctctatatgaccctaataaaaaaatattgcagcaaaagtatcttatcttacaattttgttgcaactgtatatttttagttcttacgtgtcaacttaaaaatacgtgatgacttattattgaaccacatatacatgaggtgtcggccctgagttgaaaactgccttagaagaaaaaaattagacttttattataagaataaatagtatttttaaaaattattaaaaaattgtatatttttttatttaggctcctaaaatgggtgggctttggacacaggcttagcctgcctaagcttaggaccgactcttcatatgatcctaaaaaaaaaaaaaagaaaatcacactacatatctcttttaaattgatgcctttaatttttaacatctctttcaaaatgtattatatttacctcttttttcaatcattctactaattttacccttatcacttcacaatagtctccattcttccctaactaaaattttgtccaaacattcccacaaacttaaacatttatctcaaaagaacacaaatctattatgtttaaaattatgtttagttatgtgaaggtatgtacaatacttataaaaagatgtatatttacattaaattttatttaaaagtaaatttaattaatgtatatgaaaaaaaaaagtactcttcaacttaatacgactccaacaaaatcgtcaagatacttttacaagtacaactacatttttattaaaataatgggtcatatatataataattataaatatttaggatattcttagacaaatatccctctaaattaggagtatcatgcttatatcgatactcatgttgtgaggactgaattgaactccaacgcctcacaaaacgtacgcaattttaactcttaatttggcgagaagccttaaaaaaaaagtacattaataattagcaacctacgtgaacatgaaaaagcatttctaaactagaatatacatttgattataaaagatataatcaaatgcattgtttccatttcattcctcatggtcaactgttttaaaaaatctctattattttcctatattttattattattaactttgtttcttatatataattattgtgcaaccgtttagatatagattttttggctgagcaatctgttataaattaaacttcagagactagcccgcacctcaactttcacgtttctggaagaaatttttttataatacttatttttatagcctctttttgcgggttatcttcacgtgtaaaactaattaattaataaactgaaaattaaattcaaatttgttctagacgtatcatatcaacttataaatggtatgattccaaatgatattcaacaaaggtaaaaattacttcaaaaaaaaaacaaattaaggtaaaaaattgcaaagtgaaaaaaaaaataataagaataaggatattaatgtaataaaaagaaaat

SEQ ID NO: 311592 - DNA, 930 bp, Cannabis indica
aatcaaaatataacacgtgtatataattgtgtacacgtagataatccacaatgacacttgttgaaatctaacggtaaaaagcaaaacagaagtacatttcaaacagtgttatagctaaaaaaattagtttgtgaggttaaatgtaacaaatcgtgtaattcaaataattttactgtcaatatcattttaaaaaataaaagttaaaacaaccaaatgcttattataacataattcatgctgttatataaataataaaaagtcaattataatttctctaaatatggtgaaaacactaacggtagccccttcatcactcttcaagtaatgtgaaacatattcccatgaaatgaaatatgcataccaaacagcccctaaagtgatggcgaagggaagggggcatgtagggtcatttgcctccaattttttgttcacatatattttgtatataaattttgggtattttatattttgaccttataaatttttttttttcatttatgtccttacatatttttatattgtccccataaaatttatgtattttatttttattccatatatttttacttgtatccttgtaaaatttatatttttcacttttattcacatatatttatttttattttcacaaaatttgtctttttttcaataaaattttatttttcattaatatttcaaaaaaaaaaaaactccccactaaaatattgggctagctcaaccagtgttagaatttggaaataaaataaatgaggttccatctcaaaaccaattgacaatggaaagagtaactcattcatcttatatatcacaatttatttccacacattaacaatagggaactaactcttaatacaccctcccacgtttgggcctagaaagtatgggtataacgaacggcctttaaaaaactacaggaccgaacgtgacatt

SEQ ID NO: 311593 - DNA, 1143 bp, Cannabis indica
gtaaattaaaaacatataccataaaaaatacacatgaataaaaaaaaaaactaaaaaataattgtgtaacaaatttttttttttgtaaaactacttaaaaacaactaaaacacagcataaaaataacaaaataaatacacatatataacaaaaaaattatctgaaataaactaaaaatataacacatcaccaaggcacgtaaactaaaaaataactatacaacaaaaaaatatataaataatagaaaaataactttaaaacaattatagaacacctaaacaacaacatgaaaataactataaaacaagaaatagatagggtctctgacaatatattgccagtgagatattgcgttggcaaaacattggcgccaattcacgcctaattttcatttactcgtagaagtttttctagtgaattaatttgccgacaaaacttggccaataaaaaattattttagttttgccggtgctatatagttcatcaacaaaactgttttttttttaaaaaaatagatttacaataaaattaaaattaagataataataaataaaaaataattcaaaatatattataaaattaaaatttatattgtaattacaaaactataagaattgtctaaaattaaataaaagtatttttaatttataaacattaatattatttacactacaactaaaaaaaactagaagttgttacattgtcgtcgtcaccgtcatcaccgggaggggtagtctgtgaagaagacccagcaccaggaggccaaaatggtagaattggtcgaattagaggcatcgagggcatgttgaatccaagaatggcactagccaattgtatcatttgttgctgaaacacactcatgatttgattctaagtctgcatcttttgttgttgcaactcgtttcgtacttcctattcttctaccctttgcttaaggacctcatattcctcctaggtggcagtgggttgtccggaaggacctgccctgagagttgtcctctttgcccccgtcctaattctcggcaactagcccatccctctcaagtggcgtgacagctcacccagcacatgtgtcataataggcatgtctacagaaaaaattgggtgggtcgacattgtactgctggggggacattggtcggt

SEQ ID NO: 311594 - DNA, 977 bp, Cannabis indica
gaacatgttttgaaaaatattttcacttttctacttttaaaaacagaaaactgattaaaaaagtgttaccaaacgccaccttaatatatatatggttaatatgtataattataagcaattttattttttacatactcgagccatctattttggtgatcacaatgatctacgggatctaattaagttttcaaagatattgtgtaattttatttttttataggcaatttagaaggctcgtaacgagatagtgtagcgagataggaagcaagaggatgaggaagttatgaagtatgctattttgattctcgatcaaggacgtgaaaatattcctctttgtccccattacgagtttatgatggtcgagagctcaatatagatgttaatatttttgagacggagaattagtttggctttggtgtggtgattcgagatgtgaagggtaatttggttggtagagctgattctaaagtggtggaggtgctcggggtgaaggaagctttaagctggataaagactcaatattttaaacgagctcaagtagaatttaatagtttggtggttattgatgtcatttgaagttctttgcatttagattatgattttggttttattattgaagattgtaaagcttttttggattcttttaagttccttttatttacattttgttaaacaatgtgtaaattgagctgatcgtgtaagaggcttcaatacctcttgattaatatagatgattttatttaatgaaaaaaaaaaccactggtgaagaagaagttagtaaatactccaattcaaagtacgtagattctttatgggcttaggcctatgaaactttgggccgcccaagtctgtacagaaaatgggccattgggcttacaaaaattttgggcctcgattaattgtttttagtgaatttcacaaatgcacaaaaataacaaaaaaataacaaaaatgcggtttcacggaattttaaatat

SEQ ID NO: 311595 - DNA, 877 bp, Cannabis indica
acgtgcctcggcacgtaactcctacctagtcacatttactatatatgtacaaggcagttcaaggattgggcaagctgggccctcccaaggctctccttcttaacccattttttagaaataaattttattttaatttttaaaaatataatattttaaatttgtacccatatttactaacaaatgcaattattttcttaaagaaacaagtaattttttttttagaaattttatatttgatattaaagctcaattaattattttttcaaaactatttatactttctttttaccactaagcatatgcatgttcttgcaaactgcatagccaaataattagattataaatggttacattaatgtaaaatcatcacaatgtttatgagtgtaatattcctcctttttagattttttaaccaccaccttaaaattttatggacctaagaaataactttgggtaatgaggtgggttcatgcattattaggcctatttcagaatatttacaaaattactacttttttttctacaaatttatatttataaaaatgaagaaccctgaatttgggtgggctctaaattatataggtctagctcgcattagcctaagaccgggcttgattttaacaaacacttagaaaacacttcaatttagttataacatacacttcatttgcatgtatatatatatgcattttaattaattttgtgttgatgtctattaattcttattggtcccaaattgtgatcctttccaaagtagttatatagagaataaatcaaatatgtagagaaggggaaaagacagattttgatggcccgagcagattaatggagctataatgcccagctcccaccacaagcagttgatattgagcctgag

SEQ ID NO: 311596 - DNA, 553 bp, Cannabis indica
gaaaacataaggaaaaccctaagttctaaaacacgggttgagatgattaaatccccagatttcctaagaatatacacatgagtattcaagatgttcatctcaatactcacgagtattcaagacagcaagaaaaaaagatgcgaatactcgaagtgttcttcctaaagctcacgattatacaaattttaggccaattttctcctgagagttacccagtttttagcagagaaataaggctctatatgtattccttacaatgacatgcatttttctattccctaaaattcaaaatgcagattgtttctcaaaattagaagaaaaaattcgcaagtaatttcgaaaactaaccttgagattcgtcgatcccccctttgattggtttcgattgcctctgaaacttagaagatttgagtttctggagaaaggaggatagaaatctggaggaagttttgaatctttgaaatttcagagaaagatgaagaggaaaatggaaatgagagggaaaatatgaaatgggttcgtattaggaagcttaaataccattatccctcat

SEQ ID NO: 311597 - DNA, 1872 bp, Cannabis indica
aaattgtgccacgtgtacactgtgtacacgtagacattccaaacatggcacttaacagccaaaaatggatggaaaaggctaagtgctaacagaacttgggtttaggtacaaattactctttgtttggtaaggatgattgtgtttacttaaggaggttatgccgcaaattacgcttattctaatgattatgttagaattgtgattaaatctaataaggatgtgaataagggtaatttgcagcattttagaattttgaataagggttatattgtccaaagtgcttttatttttatggtttacttttatgggtaaaaagaaaattatagtaaaagtaacatattcattaaaataaggataatttgcagcattttagaatttctttccagttttaggtacaaacacaatccatccttaccaaacaaagagtaaaacttgatctttctttccctcttcacttccttggtacgctacaagtgaagaagaggtgaactcatcaaggtcttctcttccttaagtttgatggtttttctccctctctacatatcctcctcaatcaagaatgcaataatttaaatctttatgtcaaaatttataaaatactcaagaaatacaaataatcacagatttaatcatatttctaaaagttgtttaatataaaaaatcttaaatcatattttataaaatctttgctaaatcaaaaaaagaagaagatggtaataagatgagcgaaagtactaacctgaagtcattgttggagattggacagaaggttatgatcttccaagaatacactattcctctgaatattttctccgatgaggaagaagagaatacagaaaaccctagtgtttcttgtcgaccactacctatttatagactcatcttataatgagttttcaacaaattataaattaacttatgctaactacacgttatttctataataatttaataccattttgatacccataacataattagcctcttaaatttgaatcactctttataaatagcatatatatatatattatatatatgtgccacaatagaatttttaatctaacaatctcccatgggcaacatatgttaccttataaatgtataaccttattatgagctcaaattttactattatataaaggtattcacaacaatcttgtccatcaactatacccatagaggatcaaagtagtttcgtcatatcaatcatgactaaacctatcaatggtcacatatacaaatatagtcaaatgacatagatcaatcatggatgtatagcatggaaattacatgcaatatgaactgcctatttacaactggtcctccttaaactaaagtgaggttagacttaaacataacaaaacaaagtaaatgaactgaaaactttatttctgattagaaaataaccaaatacataaatgttttaaacaaacataaagcaaacaaaatataaactccctctaaatcatgatatcctcaagcaataatgcacacatatgagcagttgttgggattttatgccttaaataaaacacatttcaatataatcaaatttactttattaataaaagatcaaaaattattttatgttgcatggttcacatgattactttcatgattatatatttaatatataaattctattaaatcttgaacatatagttattcatgattatgctgttatctacacagtggaaaataatcatgattatatgattcaaagtatttattccaatgatttatcagtgcactgaatttattttgatgtgataatcagcgataaaatttacttacacaatggtatgttgaatgtgttttccaggacattagtaaaatatactagtatcggatgcattgggtatacatcagact

SEQ ID NO: 311598 - DNA, 1032 bp, Cannabis indica
tgacgtactcgtgtataagagccatttagtccgtgggtgtaaggacccaatggaggcttgaagcggggacgttacatcttggcactgtgtcgacttatacctcatccaattgctttctaagctttcatacgttaaccaagctcattatattttttacatattggttttagattagttaatttaaaaacaaattgagaaaaattgaatttagtgtatcattctttatcattttagaaaatacaatgtctattttattaattaacaaagtaagaaatttcggtaacttttacaaaatacatggatcaaaatgaaatgggccttaggaaaaaaattgagtatttaaaagattaaaagatattttttctatcaactcttaagatgggtgggccctaagcgcggtagtagcccaacctttgcttagggtatcatacctcaaattcaatatgaaatttcacacattttagtttgataaataacattaaaaattgttaataaccactcataaacaagtcacgtcgatatagtattgaacatcttaaggtgtctaaataccaatcctcttaccctaataatttcccaactctctcatgaaaccacaaaacaaccaaaaccgttgactcaaaatccaacggcaaaagtgtacaagtacactacttatacaactactacgtgtttgtgtaacttgtgtgaaagaaaagaatcttttggatttttggctttgggaaccaaaaaaataataaaataaaataaaaagaaaatcactttctctctcttttcactatcatcatcatcatctttaaataccccacaaaatcatacacctttgctttgcccttatagaatctcactctttcttctttctttctcctcaaaactatagcttcttctttcaaggtaatatttatatatataatttcaatttttatttatttatttatttatttaatctatacataatacatgttcatacatagatctaccttctatgattaaatatacataattatatatatatatatataaatatgaaat

SEQ ID NO: 311599 - DNA, 1020 bp, Cannabis indica
atttctggcttcgtcactgcctatctctgactacttctctttaattgagataaattctttagtctttctaccattatatttaaacctcaatagaaagtatacattcatagtactcacaactcaaatccatactttatctacataatcaaatcataaatatgcgttagcttaatataacattccaaatacaaactcccactaaaaccagcacaatcttaaataataccacgtctatatatgatctataaacactttattagtttgaacttcattttaccttgtagaattcaaagtcaatgtgcctttaccttgtagagctcatgctgttactataatgcaacctgattgatttattgtcacaacatatatatatatatatatctttaatagttttcaataacatttttaattttgaagccttgtgacaaaaatctcactactgaaatctttataagatcagaatcaaaaatcttaatgatctataaaaaaattttttatctgatttttgataagtgaacatataatattgtattcttcataaattcttatagcctatttggttgcatactaaaagttttttttatcgaattatttaaatatctattcaatattcttgatatgtatgttaaatgtaaattcacatacatacttgagcatatattagattctaaatataaatgaagaatctttcatatttcttgcatttgaaggttgctttcaggacaatgacataacttattttttttagctacaagcatatcacctagtatagtatctttcatgccaaaagctttgaataatttattgatatatctattttgttataattcaaaaatatccccatgacaatctcacataccttcaattcttaatccaaaatgagtacatcattagtggcaggcaagtttttactaatatataataccacgatgtaggggtgttcatcaaaccgcttaaaccgcccgcactgcaaaaaaaaaaatgcggtttgaaattctttgcagtgcggtcacggtttga

SEQ ID NO: 311600 - DNA, 1688 bp, Cannabis indica
aatggaggcttgaagcgggaacgttacaaagagtgccaagagaaatcagatttctcttcagatcatgaatgtgtctaacatttctgagagttttgatagttccatcatagcttctgatggcaatggtgtcaatacctataacttggcacttgtgatcattccccatcatgacttttccaccatcaaccttggagtagtcaataaaccagtccttgtgttggactcatatggtaggtacaaccactatcaagaatccattcatcattgtccctgtgatctaaattggtacatgcatcttctgagtttgaagcttcaccttgttccttgattataacaaaaacatcaccatatgaactatagtgatcatcaactacagcatttgagtcatttcctttgtcctcttcatctttgtttttctttttcttatccttaagttcccaatagtttctgattaagtgacctatcttgccacagtgatggcatttccttgtttcctttggtcttgatttcgatcttgtgttccccctaggccttgaattgttcctgcacttagattgatccctgaatcttgaatttcgtcttcttgtttgtcttcctcgaatcatcaaggcttcatcatttctagtttctttttttgctacctttttccaaatgagttctgcatctcttgatctgagagtgctcattacatcttcaaaggtgagagtgcctctgttgtacattataacagttgtcatttctttgaactgatctgacaacgcattcaatatgatcacaacttgatcttcctccttgattgtttctcccatattggttagtgacagaacaatcctatttaaatcatccaagttctgctttaatggaacaacagctttcatcttgaatccatagaatttttccttcaagaaaatcttggtagctgttaactttgccatgtacagttgctctagccttttccgaattcccaaggttattttctctcctataacttgtctcagaacatgtgcgacctagacctgaattcgtcttcactcgtgcaagagaggccattggggtgggcgattcagctcgttaagctttgttcatcgacgaagtgggtttcctcgatccaccattaaaatcggtgcaaaaaatagagagagaaaagaggatgagattacgagagaagagatataagtgtggggttttggagtgtaatgtgttgtctccgtttgacgagtcagcgtcgggaagctcaaatctacgaatgggaaggagaagtctatggttcattgatgatttgttaggaatgggagggaggagtgtatggttcagacctaggaatgggagagaggagtgaggactcagggagagagaaagagaacaaaaaaaaatatgacaatatttttaataattttaaaacttaatttttttttttaatttacaataaattttaaaatgatttttataactttgaagaattatattatgtatactaatataaaaatgacatgtgtataaagaaattcacgtaagaaatacatgttggtatttaactgagataaattgatgacaccttaaatttatgggtaaataccattttggaccctgtgttttgcaaaagttacagattggaccctgtgttttgttaaatgacaaaatggaccctgtattttctaaaatagtaaaaataggaccctgagcttaat

SEQ ID NO: 311601 - DNA, 950 bp, Cannabis indica
gtagcactttgagaagtaaaagcactgggattagtagccaaatagcaatgataatcattaaggtatgagggcggttttaatctctctgcgcaacctgttaacatgaacttcaggtatagaatttaatgtggaattattatgagtgggagaaagagaaatgggatcagcaacatcagtaaaaacatgatcatgcacaacattttgaggcactcgaaaggagctagctggagtgtgaaaatgctgagtacatttagcattcgaggaatgataaaaagtaccaataggtacatgtggaatctcatcagtagacgaagataggttcctgtgttgaggtataccagaaaaaaaattctggtgtgcagcaggaagtaaaccagaattaacaaaaggaaatatttgctcatagaaatacacatccctagaattgaaaatcttattggtattcaagtcaagaagcttataggctttcataccaataggatttccaagaaaaacacaagggatagatctaggactaaatttagacctagaatgattaagagtagaggcatatgcaagacatccaaaggcttttaaattgtcataagcaggtggcttagaatgcaaaacatcataagggcttttgttctttagatttggtgtcggtgttctattaatgagatatgcagtattagaaacacactcaccccaatattctaaaggaacatacgattgaaacaaaagagctctagccacattaaataagtgttggtgctttctcttaacaatggaattttgttgaggcctttggacacaagagtgataatgcatgattccaagatcagcaaacaaagtattgaattgcagctccttggcattattggatctcatcccttttatggttttatgaaattgattttgaatcaattttatgaatttgggaatgaaaatttgggcatcagatttttgtt

SEQ ID NO: 311602 - DNA, 1146 bp, Cannabis indica
atataagcgtgttttttttttaatttaaaccgtattattttatttacttataatatattcgatttttaaattttatattttagattcaatttaattaacattatagttcaaattcaatctataataatattgattgtattagatattttaaattaattactttttaatatttattaaaatatattttgtttcacataactaacaataatataaaataaattattattattttatgttttcaaaaaataacaaactcaaaaaaaaaagagtatattttaaaataatatatttaaatttgtttcaattatatttttttatatataaaaataatatattcatttttttaataactagataataatttattaatgttgaatattcatcaatccaatcttaaactaagagcaaatagataactcaataaaattatgattagaagaataataagaggctcacccaagaaaataaattaccttactaaccgaacgtttaacaaaatataataaaacacccacaattttctaacaataaagagcaacactctcaaatgacttgtccaaaataaaaattcataaccatgcactactacgaattgcttgaactaccacaagacaattagtctcaagaatcacattgtaccacccattcgacttgattgagcttagagcttcttttacactcagaatctctgccaagtactcaagttgcgtaattcctcgcctacacttagagatagcctcaaaaactttgcatcatagtcatgggctacactgctaaaactatgacagaaacgtctttaaaattataacaccaacattaatctcttgatggtattcgctaaaaaatatgaacccatatgcactcatactcaaaacacaagttttaaccatctctgccaatattttatttcaaatattaattactaaataatattaatttttttgtgtaattattattttaccaagcaaaacattaaatattcatacatatttaccctcttatctccaaacgaactttatattttaaaatatataatacaatggaatattagtggctaaactacttaaattttaaattttttaacacttaatcacaaaaattaattttttagggccaaaattacctaaactcccattttgttttgct

SEQ ID NO: 311603 - DNA, 2577 bp, Cannabis indica
agacccgcaaactcaaaaaatcccacctcccgacccgctgccaaaaaaactaaaaacttgaaaacccgtgtgaacgggtcggggtcaacccgaaaatgcccacacgggttttaggtttgggttttaaaaatggatttttttggtcgggttctaacccgtaacctaaaaaattaaaaagaattttttattttattttattagaaagttaataatattatattaatttttattttatcctaattaatgtcaagtctattcgaaccagaccaagagtccagtccaagacccaaaaaaccttagaagaggaacttcttcttctccagaggctgcagctgcttctcttctccagtgtggtcgcttcccagcggtcggctcagtccagcgagcctcatccataacatccaaagtcagaaaagccttctccgccagtgttcgcccgtgtccacccacccccgtgcccccgcttcgatgaaggctccaacccaatcgatgaaagtatattttttttatctctctctccatcttcttgaagggtttcaaatctctttctcttcatctttgatctctatttttaagcaagtggaataatcaggaagtgtcccatgattaatctctctcaatatatttcttttatgttcacatgtatttcttttatgtaaataattaatttacaattgtatttttttaggttttgatatgtaaatattttttatttttatttatggatatgtgaaaatggtacagtgaatttttgtttctcaagtaatttatggaaacgatatcttagatttgggctcaagttatgaatactaactgtcatgaaacattcgggatcagccgaataacacccaaacccgaccatgcccaacctaactacgctcgacccgaaacccgacatacccgaacacccaaaaattaggttcggttgtgcatttccaagacccgaaatccaaaaactcaaacctgaacacgtgaaaacccgacttgtgtgcaaccctagttcttttcaaggaaagatgtaagatttttctttggacatccttctaagggatattgaatagggcttggttcccaacttttactctttgggtactttgcgaagattcttaccttgttttgcctagcctacgaggaatggtttttggatgtacgtagatacctgccgtctccatagccttctgcatgacgaccattatttcttgcattttcctattcttctctttctgtgccgccagtttggcctcgtgatcagccgctttttgccttaaggtcagtagttcagtgtaactgccatcatcataggcatcatattcttattggttttcttcgtattcctcatcattcgtttcatcttgttcttctacctctatgtctactcacgaagttgcttcctcatcttttggatccctgggaccttgtgggggatgaggctgacatgtatggtttctagtccccatcattgttccctagatcttcttatattaccgttttgcaataaagctttctacagttctcaatgaaagcaccaaaatattgatcgaaatttttggcaactagatcattaatgtaataaagatgattaagagagagtaaatgcaactattttacgtagttggggcattaattagccatagtccacgagtctctgatattaataggtgggtatttcttataaagaatgttttgctctttttttcgattaccttttaaagtgactatccaaaggaagaaaggtttcgattgtcttaagtgtttaccttggctattgtggggtttatatactagtgcaagtgtctgtttttggacagtttttatagttgaattagttagttaattcggttaaagttgttgggttcttgtactctctatttcggtctatatataaagaccattttgtgattctttggtagagtgatttgtgtgtgagctgagagtgaatgttgctgtaaaagagcatgagaagtttataactcatggctctcaagtgaacctgttttttgagtaggagcatgactccttttagttatgttttgttcattattgtatcacctctgagcttcatcttaaagtaataaaggcaaagcctcaaggcagttcctcccaaggattagatccaagtgttaccacttgtgattgaaccttgtaactcattgtgtccacttgatcatattattcttgttgatattgttcttttctggtttatgttttatggtttatgtctattattttttaattgatcttgttaatgtttgtaatgttcttggatggtgtttgattcaccataaatggtatcagagcatagctggttgctgttgaggaaccaagaactgtgaagattaaagcttgaacacaaagatggcgacagtaagatttgaggtggacaagtttactggggtcaatgatttttgtctctagcgattcaagatgaaagcactactcgtgcgtcagggcattgtaaatgccattatggaatcagtccctaaggaaggtgaagatgtcaagaaagtctcccaagaaactgaaataaaggctcatagtgcaatcctgttgagcttggattccatatttatgttagcg

SEQ ID NO: 311604 - DNA, 1580 bp, Cannabis indica
  modified_base (1480)..(1480): a, c, t, g, unknown or other
  modified_base (1492)..(1492): a, c, t, g, unknown or other
tatcggttgatcactttttgagaacaacagtagaattctcgagaaaactcattcccagaattgaattttcttagagatagattaaagtaccattgctaagctatttctattagcgttgctgggaaaattcaacaccccacatcactagtaattttctggacatcgatttgcatctcgaagtacttgatgtgagctagtgcatcttcttgttcggtatacatctttcatatcagcatcttaaacttaggcatgggtaagggcaaggcattgatatataccgagaatggtgatccccttgacctatccagttcaaggtcgaaaggttttaggctagctaggcccttgatcatgtctcttatttaatccaattatgcttgcacagaaggatctgcaactgcagcgacttggatgattgacccctcttgattgggttgtaacctcgaatgggccaaggtttggttggccattcctagagaggtggactagccttggcccaccaatcccattatgggcaatttttcatggctaaccaaccctatgttgggtagggtttggccacccgttctcccttgattagctgatgtagcctgtgtgttgatagggagtagatcacaccagttgctggagttaggtggatctagatattgaagtgattagactcacttttcaagttgttatcttgggtgttttcacccattcttgaacctagctagttaaagattggcatttgggttactatttcctaggggccccgggatgggagtttaccctacttgccgaccagaggtgtaccaccaaggggatcgccagccagaggttaaccaattaggggtgttgttgagcttgagattgttgatcaaccccttagaccgctggtttttagaatctaggtgttctcgccacaaaatcttcgtggcaagacatgtcctccttcaggtaagggaaggtctgtcctggttcctaggaacctggttggatagtttattgatagaccctccctgatctattgaatatctcccttgtagaggatatttaatgagatcctgacctcgtccaacagttctctcattttactaccttattagatcgctagcttcttaattatggcagtccagctctgcctggtgagatcagaggatgtaaacttgattatccatcaatctataaatttgtgtctctgttgtgtaaatagcagccaacaacgcgtggttcttcgattgggcgacttgtcagatggcttatctaagtctagataactcgatatcttctttgaagtctacatggggcccgcacaatggctgacttgtcaatttctaggcccatctctctagcataatactagggacaaaaatctaattgtgatgcctgagggttactccacatgggtcatttgtttagtacgaggtgctagtggagggtcctccctgggtggcatggtcgatcattgagactaactggattggtcgtgtcgacctggccngtgtacttgccnggtcgtggtgcctgccgagtggcaggagtggccgatatatgttcgggtttgtgggggatttccgatttgtgatagggatcgatgatca

SEQ ID NO: 311605 - DNA, 3359 bp, Cannabis indica
ttctaaaagcttaaaaagcttgaaacttgtcaatggaatgtacaaagaagagatatccaagaagagaagatgagatgtatgtatattgagaagatcaaagatctaaaaacatgccatgtaaaaatccaacacctcgctagacaaagctgctcaatagagactactacaaataagacaagagccaaaaagtccctatccgacaagatttttgaacagagacttgggggcaaatattatcccaaattttgtccacctgacattgcatgtcaatgtaagagaagatatagtacaggtggaacacaaccttgccaatagaaagatagggtttccttacaaggtatggcgaaaccgttaagcaataagaaaattgaactaaacgagccatcgaagagctacaacatgtcgaccaagggagcacaagttggcagacaaaaaggtgacttttagaccaagggagcatctattcgaccaagggaacctaacctctgcatgttaatggtgtacaaagctgacctccacttgccaaaggctgccctcaaactcaaaaggctggcctcctctcaaaaaagctcggaggaacatgacctataagatcctggcaggcacatggccagctagaccctggcagacacactacttgcaagactctagcaggcacatggctggccaaaccctagcaggcccatggccgactagaccctggcaagacagtgactggccaaatctcaacctacagaccatgcatggtcagtcacacctcatcctgcacgtgtatggccaaccagcttttccctggcaaggaaatgatgtgcaaccttcatccatgggcagcaagccaagctacaagtttggccttgattgcccactaagatgctacgaaaaatatctactttcaaggggcaatttggtcatttatttttattagtttaatatgtaaatatctatgattttatcggctaattagcgtttatgctctcctatataaagggccttaactcaaacctaaaaagctaagtctcatctaagtcttatttaagcccttaagtcattagctcttaactttatgtctaaaaccctattcttctcctctctctctctctcttatacacgcctaaagggctttctctcttcctttctcacacgcctccaaggccataactctctctcattagagatttgcttactgattcactttataatcttaaaaagagccatattagatcccatctatagtgatctatatagtattatctctcgttatcaatataataaaaaagagagtaggtcattacccgctaaccaaggaggttgaacctatataaaaatccttttgttcttttactttatagttctaattgtgtaacacgtggcaagcatcagtgttaatacgacttcgttgtcgattgaccactttttgagatctactgtatacatcttagtaattaattagtaatgtttaagttatattgtggtaacttataatttaaaatatatttagctaactttaacaattatttttaaaactaattagttgtcatgtaatagaacaagctacactttttacatataaattatttatatactttttttttattttaaaagctaattagttatcgtataatataatataaacaaaattataaaatgaatgttaactaagatgtatacagggaaagaagattccatagtacatatgaaatactttgagatccaaatagatctccaaaaattatatgtagatgtgcgatgccgaatctttccagcaactctgactgaaatagctaaacactggtatttcaagcagacccaaagaagatttaattcttgggaagaattctcccgagatttctatatctagttctcttctccaagataaataccttcacgatttgaagatcttttagggataaagaaaagacaagacgaacctttgaaagaccatattcaaaggttcttggctgaggctgatagatggccatacttggacgcatcttactattgagtgaatcctagaaggatatcaacgagaaatatgaaggagttcgttgagcgagttgatgacttcataaagttagaagaagctttccagcaagcctagacaagggggcaggtccatgtcgaacaaacttagggcctcacagtgccccaaacaccgttcgacgtgtcaaccaacacagacgatctctgccaactgtccaacaatgagaatatgggaggcaagcgcaccaacaatggctctaacaaaataattgcaaaaaaagggaaattcaaagattctctcatgccatgaagtctaagggagaaggaggaaaagtatgcatgcttcactcttctatcaaaactctcaatgaaatacaggccaactagctatggtgacaggtgtcaccaaaacctgaagcaccttgccgaccactcaagtggaccatcgaggctcgaccaatataaggccacctataaacctagcattgccataaaaggaaaagctctcgccagcttcatggataaacatagaagtatatctcctcaaagctctaaaggtttgggagaaaagcaagaaccaaagaagtagcgagagcaagagcaagacaactcaacctagaaggtgcattgaccacttgcccgatgctgccatggccctcaagacacctggaggcaatggatgcacatggaaattaaggtctgttttaagcttctaacaacaaggttgaatatgaagctctgaatgttagcctcaggctagcacacgaagtgcgggctaaacacctatacatccatcacgactctcaactagttgtacgtcatgtcctaggtgagtatgcagctcaatggcctatttgagctaatattatgacttgttaagttagctcaaaggttgtactaaaaggtaagtcccaagaaacaacataataggttatgcactcacttgactagctagcgccgccttgacaaccaagggaaacttggtacccactcagtacttcaaaaaaataagaatccttatttcaaaataaatagtgatcatgatggacaaccatcatggatacacctacagtagcctacctccaaaataaaccttgcaaaaaagcaggggtaaggagcttttggtaattattttaccaggatctatatttactgccatgtatgttgttttacatcctaaatatgaatttctaaaacaatggaatttgaagacatataaagatcaagaaaccttacattggttgaagcagaattaaatgactcatttcactcagatctctaacccttgtatcctttctgtagaagagtattaccaagatatgagcttgattctccttcagtttattggattcttcatagtcatacacactatgattgag

SEQ ID NO: 311606 - DNA, 1319 bp, Cannabis indica
catttactataattttttaaaataaagacatatattaatgtagtcctataatttaaggccatttactctaattttccatttaatttttcacctcaaacaatatcaaatagtacacgagatgtagttttcaatactttcaaaccattaattaataaataataataagtttctatcattttgaaatacttcacaaaaattgatacagacactagtgaaggttgaggtcaaagttaataacttaaaatcttggtgacaattaagttaatcgtgcatattatatacattacaataataaaccgaccatttaaatattttatttaattttatctaactagttgagaatgctattattcactagactattgtagtactacgtatacattgaagttagtgaaattcaaagagcaattatttctttgtttcagtacaattgacaagccataaagaaaaagctaagatcgaaaatggactacataggcatatatatctcatttattattataaatgtcttaattagggttcatctttttccattgtaatgggtagaagcttcacacaaaaacaaaatatcaaatcccactaacaagctatttcccattcaagagaagacacgtgacttagccattatagacattattataaggtgtacatgacacaaatttgacctcttgcattgcatttgcatccttataacaatatatattatatatatacagacattactttattattcaaatcactcaaatggatgtaagcaattgtatcatgactgtataacttattagtgaaaataggggctatatggttaaagcttattatataattaatctctattataaagggacacaaaatgaatttgagaccaggtaaacccctagagctacctccacttaatttgtactatgtgtcaagtttgatatacatatatacccagctggtttttcatataggagattaagtttgctatgtattattaattagattttgctttccttaagtcaaaatattatttatttttcattcttttatttcatgatcatttcatcaggaccatgtataaggaattaataggtatagctagctaggtcaatataccttcattcagaatagctaaagaggtctgaggagatcataaagataaggttttctacttagttacatgcaatttaattaatttcaagaactatgtttggctggaaagatttttaggtggaaaggtagaaggaaaggagaggaaatcattttgtttgggtctaaatttacaaaattcagtcctttcaaaggaaggaggagagaaaaaaacaaaataaagtgtatta

SEQ ID NO: 311607 - DNA, 1270 bp, Cannabis indica
gagacaaatgtcgtgacagattacgtccttaaggtgaaaaccattaaaaattctataaattgttttatatagttagcttattcctgtgaaattagtcaagtaattaagatgacatgaattacagattcttggtttggaagtatgtgctgatacaatggtgggagatgaaatgctaaggggtatctctggaggacagaggaagcgtgtcacaactggtataaacacagttgctttctgcatttttttattacttatttttcaataataaacaaacataacattaatttcatccgtcatgtacaggggagatgcttgttggcccagcaggggtgttgttcatggatgagatctcaactggtttggacagttcaactacgtaccagattgtgaactcactgaagcaatatgttcacatctttaatggaactaatgtcatctctttactacaaccagcacccgagacttatgatctttttgacgatatcattcttctatctgatggccagatagtgtatcagggtccacgtgaaaatgtgcttgctttctttgaatctatgggtttcaaatgccctgagagaaaaggtgttgcggactttcttcaagaggtaactttacctccataaacatgtatatttttttgggtagggaaactcttcaaatataaattgttatgtagtatggaataatcaattatacatggctgaattataggtaacatcaaggaaagatcagggccagtattgggcaagaagagatcaaccttacaggtatgtcactgtcaaggaatttgctgagtctttccaatcattccatgtggggcagaaaataggggatcatcttgcaactccatatgacaaaagcaaaaatcatcctgctgctttgacaaccaaaagctatggtgtcaaaaagaaagagttcataaaagcttgcttctcaagagaatatttgctcatgcagagaaactcatttgtctacatcttcaagcttgtacaagtgggtttatcatctatgtttccagttttagtttttttctactgtttattcagtttatgagctcataattattgtttccctgcttctagcttgcgataatggcgctggtagctacaacacttttcttaagaacagagatgaatcgcaatactgtagaagatggtggaatttacctcggtgctttgttcttcactgtgataatggttatgttcaatggtatgtcagaacttcctatgaccattgccaagcttccagtgttttacaagcaaagggacct

SEQ ID NO: 311608 - DNA, 697 bp, Cannabis indica
aatccagattcaagagaaggagattcgggctcagatcttggtgatactctgctacagacaggatataagggttagagatctgagtggaaggagccattaaattccgctgcaaccactgtaagaattctgaaactttatatgtgtttatttcatatcgttttagaagttcatgtttaggatgttaaaaatatacttgtttaaaataattccaatagagggatggtttccctttcgcttacaatgcacaaataggaaattacaataattctgtaactacaaaatctgaaataggaaactagaacaagttgccattttcgtatgactcaatccaacaattatagggatcatcttcgtgtctggacacaatgagattattctctgaagtcgctatcttttgtaagtttctcgacgcaaacacgcttctatctggtcggatgtcttctccacaactctgctcggataaccgactattataaatgctgactagtcagatgcaagctgctagggacatttccctccgcccatgtatcagaaatataggacatgcgtcgattgatcctatcgctacgtcaatgtgcaaaaaactggataacaccctttatatattattttccataaatataaaagctagacaactttcgttccaaatataaattaattaatacaaaaatataaaagttgttataaatattaataa

SEQ ID NO: 311609 - DNA, 793 bp, Cannabis indica
tatcaaatagtggtgattggaatacccataagttaaatagcatttttgataaagagactatttctgctatcttaaaaggaggtagaacctctgattagggtaaagataaatgggtttggacttcgaaaagcgatggtcatttctcgtacaaatcggcctaccttatccaacaaatgcaaagggctcctcactatgaggttgccctttctccatggaacaagttgtagaatagtaaaatattagagcaccataaggtcctttagtggtgtatgctgtctaacatgctcctagttcgatctgtgctcaacaagagattccatattaatgatgcgggttgtcctattcgtgaggttgaaaaggaatctatggaacacatttttctctcctgcaacttggctttcatttatggtggtcttcaccttggggtatctttcctatctgtggtactggcattcgtatgtaggactggattaaatttatttgggacttaaaattccaaggtattaatgcagatgaagcttttctttatgcttcaattgttgtcgacaccattgggcagggccgaaatgataagatacacaaataataagttagataatgtgaaatagtttattgactctattcatatatcttatactgatcatcatgcttattgttgcccctgattttgcccaatatatgtggaccaaccagacaaggacacgtggatcaaacaacttatcattcaaactatttgctaagtctttatgtaataaggcagcatccgggacatgcctcccggagaaggcatagg

SEQ ID NO: 311610 - DNA, 1276 bp, Cannabis indica
tcttaatttcttaattttctttcaagtttgagtttcaagcatgcctcttagctccttgaacttgttaaaggcatcatatttattttttagaatatgaatccacacatatctggtataaacatctataatagttaggaagtatcttggtccacctcttgaaagagtccttggaagtccccatacgtctaagtgtaggtagtctaatttgttgcttgaggtgcactttccaatcccaaatttgatctttgttgatttcctaagaacacattgctcaaatagatccatgtcagtgatctgttccttcccaaacactcctttctttctcagatatttcaaacaaccatggctaatatgaccaagccttttgtgccaaatcattgttgatctatttttatctaagatggtagcattaacatggttcttggctgaacttccattcagtatatagataccattcctagtaactctagtcataactgtcgtagatccctttattaccttcaacataccattttcaactttaacagagcaaccatcttgatccatcatagcaaatgacattagatttcttttgatatctggtacatgtcgaacatgccttaatttagtaacatttcctccatctagattcaacatgacagtaccgattccaagaattggacaagttcgactatccccaagcttcaccgtacctattttaatagttgcataacttaaaaactggcttctatttggatagatatcaaaagaataacctgagtcaattatccaaacaccttttgatccattcttggagattgtcaaaacactagcactgacgtatccatcagtgtcttctccatctaaaactacatcagcattaccaactttcttggaattgtagttcctcagaacaggacaatcttttcttagatgagtagctttattacatacaaagcatctctacttgaacttggaattatggttgcctttcttcaaattgttctgatccttactttctgttgacctcaaaaaatgatcaactgacaactgagttgtatagatctgatgcttgccacgtgttacactaaaagaatgaaaaagcaattaacacaaagatttgttatagaggtttaacccccttgtgatagtaggtaatgacctattcctgttctggttgtatttataccgagagaaatactatccaaatcactataggtcggatctgctattgcacccttaggattacaaagtatgaataagtaggttgatctcaagtgttggacagcctagggtg

SEQ ID NO: 311611 - DNA, 1794 bp, Cannabis indica
acggttgttcctaagattctcgtggaatgagcaagggaccccattcatgattacataaaacgacttactttttttgtttatttttttagctataaattcagttattgcggtgtataatgtataatgtatataattgattgatctttgtataatttttgctgtaaagcactaaatgaatttggaatgaatacaatccgtatattttactgaaggaatagtcacaagcatatattttttttaattattatttagttattttaatgaaatatatatttatttgtactaggaagctttgttctctagtttttagttttgttgagaaaatagatacttgtttctttagttggatgtcatgtgtatggggaaagttctggaagaagtctttgctatggttgcaaagaaccctgttgcctatcaggggagagatttgctaatacaagaagatttgaccttatcgatcaaaacggtgtggtttgacaacattaaaattatcatcgtcatcgatatcggagattcgcttattgggtgcttatccaaatgtgggacctacctatctttgaggtgtgaaatgtgtgccatggagtttggtgaggaatttagatgtagtttatttattttttagaaaaagaaaatagtaataagtatcttatagaggtggttcaatccaattaaataaaattgatataatttaatttaattataaaaagttaaatatatgattgaattggatattaaaaattagattgtaattgaattagatcaattattagatgttaatctcaaaatttaattaaaaaatcggtctaatctaattacatttatgtatattaaaaaataatttatataataaaaaatatataataaacatataattataacattattagatttttttgtatgtagaatttgtaatacgtatgttgaatttataatatttagttatcctatatatttatgctcataatgtattactaagaaatgtgattgacttaaaaaatgtaaaacttttaactacataaaacttgtaacgacagtacacttatgaacgatgaaacgtaaataaaaaatagaaacttaaataaaaagtgatacttagttcttacgtagtttttttttatatttttaagttaatattaaaatttaagtgtgtaattggatatccaattaaaaaaccgatctaatccaattagtaattggattggactaattggattggagtggattttgaagtataattggattggatctattatacccgaaattcggctggcacttctgaggatgacgcatgtcaaccttggagaatacgaatcaacaaatattatggcaattatattaaaagatactaaatgaaaaaactcattaaatgcggagttgatagacatatctataactcgctgactgtaaaatcttaagcgagacaaagatgtacaaactattgattcacgtgttgacgagaaactattttgcgtcagaagacacaatcataaggatgacatcgataatgcatattgaggcatcaacctcgctacagataaaaaggtgttgccgagatgtgttggcagttagaacacttagcgtataatatacattatactaaataagtataacaactggaagaacccgagtgacggatagcgaggcagctatctcgctataggaaggcatattcctggtaccttcactaatcaactccagatacatttcaatgagatccgctgctatatcgcgtcagctctctcagaaagaagttgacattcaaatgatgttggttgttgaagttcaccttgtcac

SEQ ID NO: 311612 - DNA, 1575 bp, Cannabis indica
actgagccaaacgccgagttcaaaaataccggacaccggaaatgcaaaatatgcaagatactgaataacataaataatcgaataataaattatttaaatagttataaataatttcataattaacataaacaactgctaatttccaaattaactaagcgggctttacacataccaagcacattatgaaaacgatcacgaataccttgagtagcattaggtgagaatgacataacagttttctcagtattcagaagttgtcctgacgctctatgataatgatcaagtactcgattaacagcctggcaagagtcttctgtagcttgacagaatagcaagctatcatctgcaaaaagaaggtgggatataacaggagcacccttcgcaattgataaacctttcagatggcccatggtttcttcatgtttcaataaagctgatattccttcagagcatatgagaaacaaataaggtgataacggatccccctaacgtaagcctctcttaggaataacagaacccttgaccgctcaattgaggttgaaagagagagtcgcaggaatgaaaccgtgggctgactgggagaatttgggcaccaaaatgtttgaacaatatccctgcaatcagtatctttgagccacatttgctcaaattgaaaccttgtacgcctctgagaagaaggagctgacagatgaggttgtgacacagtatatgcaattgctctatgatccgaatggtaaaaatcatgatgggaaagagtggcatcagtaaaaaaatctgaccacttattatcagtgaaacctctatcaagtctttctcgaacaacattcgcatgatgatttttatttgtccatgtaaaagatcgctagtaaaagggatagccctaaaattacaacagtcaatagttcttctaaagttatccaatagcatgtcatcatctctaggaggacccccatctttatcctcatttgaaagtaactcattaaagtctccaagaaccaaccaaggtaaattagaagcattagagacaagctacttaaaagattccaagtgttgattctcaaatgtgtttcaggtgctccataaaaggcagtaaagtgaaatttgtggaaattatcggatgaaactaaaacattaaagtgattcattgagtatgaattaagagttacatcaatattagccaaccataacagcaataaaccacccttcaaacccaacctagggacttcaagtccattactaaatttaaatgaagaacgaaaaacgatcaacgaaattatattttaatttagtctccacaagaaaaagcaagtcaggacgctgctctttgactaccagcttcagaaatctgaatgtcgaagggtttcccaatcccctgacattccagcttataatttttattgctgggggtggggctgcattggtgcaacctctgctgaacaagatgactttccttcaactgaatttgttgactgatcagaaacatgttgccaggatgacccatctgttggaatatattttaccaggatcttagatctactcacaagtatgttgcttaaacaccctaaatatgaactt

SEQ ID NO: 311613 - DNA, 624 bp, Cannabis indica
ttacattgtaatggagttttatttagggcataaaacccaacatcacggatgccttagctgccaacaaagaggacatctccctatacggagacattatcaaacaaattcagtcagctttatctcatttccccaatgccagaatccatcatgttaatcgctcaggcaaacacgtttgctcatgaaaataggtaggaatgtagtttaaacatatattaatgcccctgtgaattttcagattcaaacttgggttttgagttataattttataattaaacctacatctcgaaaatttaatattctggcagttttaagatggcaacttcgctatgccataagttaacgtcttggttgaaatagatttttgtatggggtttgttgaaatttacagattttgtttcaaagtgtaatttcacactagtttggttctgtttggtaaaacattaaagaaatggtagagggtcacagttggccaaaaatcttttttttttgacaattctaaaataatgggatttttgtcaaataaattaaattaatgctaaaaatggaggaaaaaaagagaatgagttttaaaataaagagaaatgtaagtaaatgaccctatttttaactctatagatagttaat

SEQ ID NO: 311614 - DNA, 932 bp, Cannabis indica
ttattttttttttccttttagaatagttaagggtgttcgcggtacggaaagtttcaatctcggacagatatctatatctagggtttcgacttaatataaaagaccctcaattttcatgaatggtatatggggctaaagtgcagaaaaatataatttgaggagggcaataaataaatatttaataaaagttataaaattataactaaaaaaattaaaaagaaaaaatacttggagaagggagaaaacccctccatatagagagtatgtatagctatgtcctgattgggtatcatgtcccatttcaggattatggccttggatgagcatagtgcgattgtttgttattttattggagaaatagtataaaaaggcggtatttgttatgttactattgatataattaactactatattttaatttaatataattattataaagaactgctaactatttacaagatactacctcttttattagctgtaatttttctaatgtatttagtagaacgtgtaattttattgcccataatgtcgctaagtgggcggttcaattttgatttcctcagtaccggagaaactattttataatgaccaagaggtctaactggtgtttccgtttctgttagtaatgcatgaatacacttaatttcaaaaaaaaaaaaaatactatttacaagacactacctcttgatattttatcggacactatccgcactgcttaattatataattgctcaaattcaacaataatgcgagcgatttacacatatgttaaaaagtaatgatacgtgtatactacaaaatttttacttttagtcataataaaacttgtgactaaaaatgaaaaacttgtgactaattataaattattatttatgtgttgtgactaaaggtccgtgactaaagatattagtcacaaaattataattttt

SEQ ID NO: 311615 - DNA, 2041 bp, Cannabis indica
gcctatatcaacaaggtacatcttgtttttttgtagcccatcatgaaagaactccacagttaagcgtgcttcacctggggtaatttcaagatggatgacctcttatgaagttttctcaagaagcatgcgagtgaggacaaaacacgatggaaacactcgtgttggtttgtagagtctgtcgtcatcccaggacgtagtaaaagtggcgtacccatgtataagagccatcattccatgtgcgtcagggcccaatggaggcttgaagcagggacgttacaaaattaagcttttatcctttcacaagtaattagaaaaatgaagaaaatacaaattaaggttagctctccatctctctctctctctctctctctctctctctctctctctctctatctctctcgctctctctttcagatgaagctaatcttagtatttagcaaaggttttgagggaatttgaagctagaatctgaggtaaagctcttgatctctctttgtttgaaattttggaagttttacctgggtttaaccttgcatatttggaaattaagttctgtttgatctaaggtctattctggtttattttcttatttgtttttttattttaatttgtttactcaaacttagcttaataatggtgtttttagtttcagaacgtttttcttactgctgctgattggaaactattattggatgttagtacaggtgttctggaaagtttgagagaatttagggaagaattgattgagttttgaactggtttaagatttttagtatgaatcggttaaccacaggtaggacctcagaaaatttggtttactggtttgggccattttcagagccttagttttggtgtttcctcgataattagggtattgtcatgctatttatcgataaggaagtttagatctccagatcgggttttagcaagttgtttacccatttacgtgaatgtgacatagggtatccatctagcgcgtgattttccattcaggtcagcacgcacacttgaacttggaatgaggtaagattagcatagaatgtatttatatatgaatatgtgtatgtgtaatatatgcatgctatttgtgattcgtatactaccaacactagtacggtagaggtactgagtgcattggtacagtgtatgatgttcaatgagtacaatacagtgttaccaacactagtacgaataggtatgtagtgtatgtggtacaacagttaatggtactcgaggtacggtgcaaaccctactaacactagtatagtagcggtacgtagtgcatgtaatacagtggtcgtaccttagtaaagaaagttcttactcatctgctaagtcttgtggataggtgtataggcacctagatacaagtcggtaatatattgtatgttatattcttttcttactgagtttgttgactcacaaatattactttcatgtgtaggtaaaagaaagcctaaagttgaacaacaatgagtccagagcttaggggatgattgtacatgttgagacggtacaacctgagtgttcggtctcgggacgacttgggcttcattttgtagttattgtgtgacatgtctgttaatgttattttgaatattatgtttaaaaatgagatcccgacttgatctaaatatatgtatatgtttataaagtttaaagtttaaattaaaattttaaatttagcatgatttttaagaaaatcctttaattagaaaaggcgaacaaagtaattacaaaattgttgtagtgtgcctaagcattagggcattataattttggtatcagagccttgacccatccgaaagggtggtctatgaggacgtcgagcccccaaaggggggggtgcttgtgacagtcagagccccatgatctaaaggggaaagactatgagctgtacaatcccacatcgcttagggaaggtcatgtgtgatgattttgagactgtgtaggtatgggactacatagttgaagagggcataaatggattgattggtactacctatatcaataatgtgcatcttgtttttcggtagcccat

SEQ ID NO: 311616 - DNA, 433 bp, Cannabis indica
tttaatttttaccgaacttgatttcgataaaaaaaacgagaaagatatgttgatttgaaatttggggtccattgggtgtcgagggtagtgctcatgcgcaccagaccctcggacaagaaggccctacgcgcgcgcatgcttagaaaaaactgtgtctaaagacacggtgcccctcgattcagacacgagcacccgcgcatcccaccctgcagcagactgagaaatctcagtcaaggaggctgcaactccctcctcccgcgtgcgtttgaggctgcatgcaacctcccttgggcaacaaggtgctacgcaccaaaaatttgatttttgtaatattttttcatcaattttaaaaattttgttttcaaacacctaaatgttggaatatttattttaccaggatcttagatctactcacaagtatgttgtttaaaca

SEQ ID NO: 311617 - DNA, 1114 bp, Cannabis indica
taaactcttatgtgtttatttcattgttttagaattcatattaggatgttaatcaaacatacttggtagtaaatctagatcctggtaaaataattccaacacatgacaaactggaactgtatttgctagaaagcccagttacaattcgtggtttccctttccacaatagaagcagagtttatggctaccatagaagcattcaaggaagtattatggcttcgagggattttccatgagctgaaattgataaaaagaggagtaattgtgtactcggatagctagtcatctatccatccatctttgcaagaacccaagttatcatgaaaaagagcaagcatatagacataaggctctattagattagagaaaaaatagaagaaggactggttgaattagagaaggtcagatcagaagataatcagatctgatgttaggactatggtcctaacagttaataagctctagcattacctaaacttgatcaatctcaaaaattagcatactgagatagctagaacaccaaccatgatggatacatactttcttcatcaccatggcttttaatttaaaggaactaggtagaatttgtggaatagttcctccaaatgaaaaggtcacaagtcgagtcttcaggaaagctagttgtcgtctggaaaggagttccggaaggctaccttgtccatctaaaagaagtcttgtggaaagtttgccgtcatctaaaaatgagttttgaaaggctaccttgtccattcgaaataagtcttgtgaaaagctagtcatccttcaaaaagtagttttggaaggctagttgtttcctataggaaggggttatggatagtctgttccagtaggctttgtggctatttgggatgtccttctaaattgcgcttcatgagtttgggatgtccgtcctggaagcgtgacacatgtctgaaaagagctcgatgccaagagctgacttggagatctcattgtaaggagtcagttaagtcggttaagtcttaatcgaattaactacttagttgtttgaattcaccacctttggaatttatttggaagcaaagtacgcaagttctttgagagagagtttttgattgagaggtagagagagagg

SEQ ID NO: 311618 - DNA, 3149 bp, Cannabis indica
cgtctttagatagtcgcttcttgcagacatcgcgtgttgagctgataaaacctagacatgcgagcctatatttcattataaggctgcagggttcttaagatcaactcgtacttacagagaatcgttctcttggtctatacaaggacaaaggggaagatgatcgcataatcgatatatgcgatctactctcctgtctcggatgcgattagacttcagtcactctcgctacttctcactggttatatctttaagcgaggtttaaaacttcgaggagtccctcagggacatctcagctttctgtggaaaatctgagtatacgtgtcctcttagtgggggtctggtctcgagtttctaggtgagagaaatctcactataacataaggacacccacaaatttgtcaagaaatgtgataagtgtcagagattctcacatatacctcgcttaccaccaacggtattgagaatgatgacctcgccttaccatttgcaatatggggaattgatttgattgggacacttcccacaaggcgaggaggagcaaagtacgcaatcatggcgatcgatttctttaccaaatagacagaggctgaacctctagtttccataacctgcaagaaagtcctcgactttaatgtcaaaaaaattatctacaggtttggaattcccatgaagatagtatccgataatagaactcagattgacagtgatttattcactgaattctgccagaggaacaagatttttaagagcatctcattagtttccaggcctcatgcaaacaggcaagtagaagctgttaataaaaccttgaaggatacaatcaaaaagaagttagatgctgccaaaggtagatgggtcgattaactacctcaggtactttgggctcatagaataacttagaagacaataatgggacatactccattctcgctagcatttggctcggaggcaatgctgccagttgaagtaaatatcgcgactcatagacaagagttttataatcaagaagaaaaccaagaactcttaaaattgtcatttgatctacttgatgaaaaatgtattgagtcgcaaattactaatggatcataccaacactgagtgacaaggtacttcaacaagaatgtgaagaagagactctttaacgttggtgatttggtgctaagacgagtgtttgcaaacacgagagatgcatctgcatgagtatttaacctaaactgggagggtccttatgtgattgaggcaattgtaggaactagagtttataaattagctcggcttaacaactcgctaataaagaactattggaacgtggaacatttgcaaccctactaccagtaatttgatgttgtaacttttatttctaatgtaatatttttgaacttcagttattaataaagttgaataatttttcaagtaattacaaagtttcattctttataattacttgagggccatatatatgtgtgtgtgtgattaaccggaattcatccagaaatacaagataatatattgcaaacccacttaattttaatatttatgtatgattaaccacaatttatgtggaaatacataacatactccactttaaaaaaaaattaaagtattgattaaggaacttttcccataagaaaggaaaatcaaaagtagcagttgtaaatgagatttaactcataaaaacaacattaaactacatgtaaagttgaataataatggctcacacttcgtaggaaagtattaaacgagacaccaagatgccttgaaaaaaatacttaacctaatgtatgaataggtggtttaatacgagcaatcaaaaatatacaaagtgatgaaaaattaaaagtatatttaagtttgcttaaaacatactataactgtttaaggcgaatcagaatcgaaaacttctcgcaaattaaaagcatagcagataataactcctcgcacacatagtagattaccaactacttaaataatatcaaagaaaaatatgagcagtggtaatgcttaaagtattttaaatttgatcaaaatataattgtttaagttctgaataaaaacacaaataggaaaatatattaaagttcaaatgcaaaatacgaggcagaataaaagcaaaggtggcgatccaactttgcaaatatgtctttacaaaaatgccacaagggacaaaccactgtcttggccctacgtccattttcttaaatgaataataataataaaaaaaacctaaaaactgagcctaaattgtaggggacttggttggatcttcttgttctgcttcaacctctacttcctcgcctagttcttccctccgagtcttctcacaaaaagcaagcatggcatcagccttgtcgcccaagaaacagaagtccaactcggggttggctaaccaaatttgataaatggtcctactactgatactgttgaccctctctttggtttaagcttccaactccttcagcttttggtcatgatcaacctatttttatcgagatcaacttgattcccttttggtcggcttgatgctgctttcctacttcctcctttgtccgagagacctctacttcagaatcattccactttttggccatgtatccctatgttccctaactggtgaagctcactctcgagcatttcgacccgctgagacgaccgatgatgtgtggcgtggacgagaaaaaaagcttgtgagcagaggacaaactgaagttagtaaaaaggacaaaataatgaaagtgggaacaagaaggcaaggaaattgacctaatgcagaagctcataacttctttaggccaagtcctcagtgctgcctcgaatagcaagatcccaatctctggatccaagtgtcaagagcttgcgccaaatgttggtggcatgctgcgagctaagttgtgacccttcagtcctaaccttgaggggtaggggacaagaaggctcgaggagaaccatctctaaacaagaaccaaagaacttcacttggtgcaccgacctagtaggttgtccctcaacattccttacagcaaagacctcaatccctgcaatagagacctcaatccctaaagcagagacctcaaaccctgcagcagagacctcattccttgtctttgaagacttagcagcctcaatggtaagctggctcaaggatttcttct

SEQ ID NO: 311619 - DNA, 615 bp, Cannabis indica
atatttcaaatataaatatttaattttttcaaacaaaaaatttgtaatctttaaaaataaaatacattcaaaattttaaaaagaccaaaatcttaaataaaactagcaatacgtggctccgcacgtacattcacctagtatataaataaatatctatacgatacgattgttcacttgaattatttattgaattagtgattgcaaattatataaattaaatgaacgcttctcttttatatatattaaaaaaaaaaataattatataaattatatatgtttaatttatccttaaatatcttttttaaatttttaaataaataaaaatcgttagttcttctcttgtctcttttctttactacttaaggaatttttttttatttatttttcttttttactgatttttttttatcatttttgctgatatactataactacttagttagttatagagttatggatgactattcaatggttacatttttattgtaactggttacattatcctttaacctgcttaacctgtaatagcaggttactaataggtgtactttctttttttagatttaattaattataattaactattttcttaaaataattaattaaatagacatt

SEQ ID NO: 311620 - DNA, 919 bp, Cannabis indica
ttcgtatttattaaacttatgcatatatcatatcatctcaaaagatattatcatctcttatagagcatacaatttcttcttttctaagcatatatatatgcatatcatccttgtcacacaggggcggacctacatagaagcgaggtggggcagccacacccttagaaaaaaaattaagaaaaaatatatatattttaattaattacgacatatagtttaataaaaaggtgatacttagaggtacaatattagatttggtgtaatgattaagctagatagcatatacatcagaggacaagggtttaattcccaccaagagcgtttttttttaagtttacttttgcccttgccttatcaaaacaaaattatgcaccccctcactttaaatcttaagtttgccactgttgtcatatatagtagtaggttataatattagaataagtttgttactctgtctgttatggtagttattagttttctgttgtaacagatttttccttttcccacgtgctgtgctttttgtcagtttgttgtaacaacttattcagtattgaattgtatataaatagtagctcttctcctcagttgaggcagtgccattttacataatttcacatcttcatctctgcatttccacatgttcatttctcacatataatgtcatgcatatacaaaagggatattggtggaaaactactgaactttatatttttttaatacttaatcataaaaattaattttttggagacaaaagtacctaaactcccattctgttttgcttttttacctctccgtccaagaatctcaattaatttccatggtggaaaactgaagtgtatactaatgtacacgtgccacatttttagtggtccacataatattaattattaaatactataaaaataattttcaaattata

SEQ ID NO: 311621 - DNA, 500 bp, Cannabis indica
tcttttttattattatttgaaaggttaaattcttcctcttaagatactattttgatgttcaatatgtcctgttgctagtcttcttttgatttagagaatgttttcatttctttttttttgttcgtaaaataatacacattgtttttgttgctgtctgttaacccaaatttgtcgttgttatgccttccattgttaaaaccttgaaactattttttttcttcatttaattctgtttgtacttattttttttcctccaatattagtccattaatatattctaaaaccctttccacatgaatttcttttttcattttaatttttttttaatacaccctgaatatttagttaacttaaaaataaaggctaattaggatttttttttccctcgaactttgacatgtaccaaattatgccccttaaattttttaggccgttaaaaattctccctaaactattcagattgttagatttaaggactattgtctaatttagtaaaaaaa

SEQ ID NO: 311622 - DNA, 922 bp, Cannabis indica
agagagagagagagagaattgctttggttcaaatgtgaggggtattacggggataaagcaaaagtagtcatatattgcctatggtataacatttaggtttaggaaaataattttagggttttttaagtgtagaaaatcaaatttccttatatttatttctatttttgaccctgtattttgtaaaagttaccaatttgaccatctattttgttaaatgacaaaattgaccatgtattttctaaaatagtacaaataagaccctcaattgattttttatcaaaataaaatttaataataattcgatctaaatgttttatgacaaaactgtttacattttctgtatctgttcgtgttaggaattgtcttcaagttggttacattgaaaaaaaaagttgtctaaaattaagcttaaggtcctatttttactattttggaaaatacagggtctattttgtcatttaacaaaatagagggtccaatctgtaaccttttgtaaaacacagggtccaaaatagtatttacccttatttataacagaataaagcatttttagagagaagttttacacttttagaccatctctaatggttacctcaatttgttgttgaatctacaccagtttagtgtaaaatcttttatttttggtgcagcaattccaatgattcacatccaataaacatattttacttagaatgtctcacattttatattaattatattaataatttaaaataactaatttatgttataattatatcatggttactagtaagaatttaaaatcttaaaataatttaacaaaataaaatatttattaaatcaattaaatacaaaaaaaaatattagaaattctataattttcttaatatacacgatcattttcaaaataagtaaacaaagattatgcaaaaaaaaaaaaaaa

SEQ ID NO: 311623 - DNA, 1763 bp, Cannabis indica
gttgtatatgttttaaacagcaccagctccgaatttggccttctcgaagtcctaaagattcttcttttcttactctagctctgttctggccttttgtatgtccactaaggatgcaacctttatgctctcagaagaatagtcttcggctctaaggttctcaatcttgaaagccatctcagctgtagactcagcgcaatgttcaataagtagtgcatcctaaaaaaattgaaagagttgagttagcataaattggccaaactattagcaaagaaggactagtaaaatgtatctggatgctcactgtgatagcctgataacgaagggcattggtgaggtatacaagatctcgattcacaaaaatggtccacttttccgccttcaattggcccatggaagcggctacattttattaaaaatattattctttaattttttgtatttatattaaattgtttcacatttaaggcatagaagttataattttaatgcaaagatttttttttagaaaataataagtttaattactaattaaattataagaatcaatataaacataatatttgtatatacaattaaccggattctgaacccttaataatatccccaaatatcattgaaaatatctgttactatcatttttactgttaaaatagtttattttattttgttaccaaaaatctcatcattttcggaactaggttagaattttaatagcttagattaaataagtattttcttcgatctcacgcaattctcatgggttcgaccttgttcttcacaatctctacactataataaaaattcgtgcgcttgcgagttgataaatataaaacgtactatttttgtcacaatatatactaataaaaatatttacttctttttacgattcagggataagaagacatacgatgcaaaaattgagttgttatcgttacaatgtcagtagatataacaattacttgcggtgattcacgaagacttgcagtgatgctaaattgtataagaattttttcccctatttctctatgtttaattttttttctttatttttctatgtttagttagataataacttataaacacttggactaattttaatatatttgtctaataaatttatttagaattatgtatgtatatacatttagttatatggttaatttactttttaattatatgaaattaatatttaatttaaatacattaataaaattaaataaacaaaaatatgctaaaaataaacaaaaatatttgaaaatctaattgttaggagaccccctatggtgttagttatttgctaataactgacgccatataggcgtctaaccccatttctccactcctatgtcattggttaacgacataggatctccttatgtcgtcggttaatgggcccccctatagcgtcgcctggaacattgtcagtagcaaattttgcaaaaactgcactattagaaaaaataagctttctcttcaatttttaagctggtttatcttcaattaaaaacattctcgctaccgaagacatttgaggcaaagatgtaggttccaaaaaatactaaatacgtatgggacctatgtcgtcggttatttcaaaaaaatcaaagacataagctacctatgttgtgacagtcagagtcccgtgatctgaaggggaaagaccgggagctgtacaatcccacatcgcctgggaaaggtcatgtgtgatgattctgagactgtgtaggtatgggactacatagttgaagatggcttaaatggat

SEQ ID NO: 311624 - DNA, 618 bp, Cannabis indica
aataaaacatacttggtagtaaatctagatcctggtaaaatatttccaacagatggaactgacggtctcctctcagtggccgccatcacatgatcatttttcgaggaactttaccacttggaaaaaaggcaggggaagtagttgttggaagacaaatccgaccctcgcgtaggcaccgacgctggagtttctagctggataaagtcattgcatctgacgacccctccagagttagtcgtcgtaaccacatcaggtcataactcctttgtttggccctagcacctcttgcactgctctgtctgtgtgtagtgacacagtggggggtctgagcctaaggatatcggcagtcggccttgcccccagagagttggctggccagatttgagcttctaaggacggatatcagggcagcatgtgttttaagaccgtgtgtgtttgtttcggccacctttctttggcagacgaaggcatcaaatctttttatgggcaccacctcggatctgcacattttaggccttcggccggacctcgacaagtgatcaggaggtcttcctgttgggttttatgccctaaataaaactccatttcaatgtaatctattttattcaacatcaataa

SEQ ID NO: 311625 - DNA, 1272 bp, Cannabis indica
ttttctctctttatttatttatatttttagtgtgcctgcaatttcggtaagtggagatattaagtaggagagatttgtttggaagtggccgagtgagattctgctcattcatcggtaataaacttacgggaatcggtcccaaaatgaaagcggccactgagttttataaattacaattgtatattggggacattattttgaagttgtttattgcatgatgttgtataaaaacaagacatgttaaataatattttagaaaatgcccactaacttcacagcgtgtaaagagaaccccaagcattgattagaactaggggtaggaataggatacactttcttttcttttctcttttgtattcggatttagtcaagatttcatcatgattcataactcaatagtgttgggttgtataattgtattacataatcttgttgcttgtgccacctacctaatcgtgttggataccatagtctatggacccatgcaaaaactttttctgattcaaaagtagtaccatgcttaaaagagagtaagtagtataatccttttccaataataaaataataataaaaaaaagagtagtattatgccttctataatcactcttaacttcccattcaaaagcaaaataaataaatataaaaacacttttgtttgtttagctctatttaatcggtgttataacgttggattttcgattcaacaatattatgaacaagttttatttatttatcggtgctatgttatacttatttgtgtagtgatttaggaagttgattttagattaagaaaattagccggctattattattattattattattattattattattttagttaattatttttgtttttcatttttatatatttgtttttttaacttttacgttaaaagtaaattttcgtttaattttgacgacttaacactaaacttctctcaccattcttttcattgttttcctttgtcatttgttttaggagctttcaaccatcaaagccaatttgttatatctctctcagcgattcatctttatctagttctagaatgttcttagttgcaaatttgcaccattttgattgcaaaaaaaaacgagaattacaacctaccgtgcaattcacgtctttttagttgtgagagacgataattgtagctgtttacccaaattttgacgatgatgacgtgtcaagaataataccacgtggcacaaaaatactgggactaaattaatgaagaaggagccaagtcatgactgttgagatgcccccct

SEQ ID NO: 311626 - DNA, 2598 bp, Cannabis indica
ggtgctttcattgagagcagaaacaaaagttttttgtcttaaagtcttgataggatacaggatggttgtaactcgtgggagaattcaaactgatctagtcaactagatggtgatagatccaagcgtgcagactcctgacaatgtaagagaaccatagggacaaccctcggacaagttaatacacaaccaccaatggtgggccgtggagtgactttccctctaactgggttcactctaggcatgcatgaaagaaactgggaataccagtacggtggctgagcacaccactcctagcactgatatcacatccaccacgaactctcaaaggccagttagagatgatgctgagcttcaaaacttgcgagctgtgccagggttaatgcaaggccacaataacatatttcaccatcaccatcaagatatccgagtagctatcaaccttgcctttgatgaacaaagatgttagttcatagagtggagagatcaagagatggaagtcatgagagccctgtaggcagccattggcaatcactctaaacaggccactatactaatcagaagggcctaccaagttaccagtcaccaactagtgactgattctagcgttcccttgtgatcccaggatgggtcggaagagtatttagctaatcataccgcatagacttatattagtcaacgtactatcaaatccaaggccacaggttcaaactgtggtccaaacggtagatgggcagatcttgccaaatcgtcccttgggaggaggtactcaactaaataatcatactcatacagaggtatcaggccaacctctcaactaagtgggtcagacacaaagacctcttggtgcatcagtgttcgaccggttaggtatcgtacatgaccttagaaacgcttaaaattgcaaaagggggactcgatgggcaaaatattccacctaccatccagttaaataactatgtccagatctagttttaagagatcctaatgtgacacaggttagtcaataggctggccaagttcatccacttgtgcaagcacaaataaatcaacttaaaagcctcgtataaggcctaactgacctaaaaatcaagatcttgaacttgatgggacaagcagatcacccttctcacctaaaatcaatgctgttgacctacccccaaagttaaaaatgtcagtatgcaagatgtatgcatgaaaagaggatactttatctcacttgatatactttgagatgcaaatagccttccaggagtaagaggtaattaatgtacagtgcataatttttccagccacactagtaaaggccgcccagtaatggtatttcaacctacctctaggaaagtttaattcatggatttctttctcatctaaattccatgcacaattttcctcctctcatcagcttccctctcatctagaagacctagaagaagtaaaacaagtgccaagagaacctttaagagcttacattagcaagttcatgactgaagcaacaaaagttaagggtctcactgaggagggaaggttagccgcaatattggaaggtattgagcctctaagagaattgtggaaggatcattaaagattaatcgtaggatcaatggtagaatttttggaccgagcatatggattcatcaaacttgaagaagtagtacggtgtgtagatatagttagacaaaagaaaaattagcaacacaccactacaaccactgcatctacccaactagcccacaattcacagcatcccagcaatttgaatcaaagtggaaatagattaaaaatggcaatagacaatcactacgacaaaaaccccttttagtgacctgttttgagagtatctaaagtgttttagtgacccttcaatgcgggtcactaatgtgggtgtcaagaaatatactttttagagttacaaaatgcgtgtcactatatcatttttttatttaattatttatttcatataaatagtaactcaattttgagtgtcactatatcgttttttatttcatatatagatagtaactcaaaaagggcgtcactgtataaatgtatatatattttaattttttttattttaaaattattaaataatatgttaattatttttttaataaaattgattcactaatcaatattttctaataatcatgctaaaaccaaaagtttacaaaatgaataactttttttaccaataataatatttttcatatataaaattcaaaatacataatttaagcccgacacaaacaaaatcaatactaattacatcaataatttctcaacataaatacaactctaattcagtacatcatacatttctgaaaaagaatatcatttttacagtcaaagaagggctcatttacaacatacacttttggaaaaaaaatcatttacactaacaaaatcacacacagaatgaagaacaacctagatcaaccacagacccaaactcgatcaaacacaaagccctatcgaacatagctctttccgtccatctgcatacatacagaaacaaagagaaagaaataaagaggcgatggagaggaccatcaacaccattcgagcaaaaatgagagagagagagagagaagagagagagag

SEQ ID NO: 311627 - DNA, 953 bp, Cannabis indica
tttatgttttctctgacagcttgtctaccaactttttacaacaaatgtaacaccaggagatgtcatttaccatgattaggtcacaatctagtgaggcagcttgcacagttcaaactattgatgaaagtcatccaaatcaagaagagcaactccataaattagtggatgagagagtgaaagagatcaagttagtaggaaagaaagtgtattctcattgtgtatgagttgagttctacttactggcaatgtgtcaaagtcgtaatgttaggccctgtgtttgctgatatgactatgtattcttggaaaatgcatctttgcgaattggtattccattccataggcatctttgtaaatcattgagtttattgttttaagtaaagaatatttatatgtaaggatgaaggtcatgatcaacttgagtatctgtagcttactctctctcacttacacatgttttcattcattacttttgtttatgagtacaattaatttgggactcagaactttctcataattgattgtttctagatatttaatctatggaattcggtgaaaaaaaaatatataataatagctttaagaaaatatgttttgcgtgttaatgtacgattaatttgcctctcatttgtgaaaatgtaagtgattagtgtcaaaaattgtagtgttactacagaataggctctcatttgtaacacaatgtcggttaccttgctatttgcccgatgaaactttacaagttagaacctttactcttctcctcccatcatctacacgagtgcactagtccctttatttaaagaataaaaaaaattaaataaaaaacgagagaaacaattaaacaaaggtataaaaatcttcagaatattaaatactaggaaactaagccgcgcttcgcacggtgttatccaacttttctaatcttttatttacatattttttatatttattaagtg

SEQ ID NO: 311628 - DNA, 1109 bp, Cannabis indica
aaaactttacgctggatggatgccctaatcacataacaaaaaggggtaaacgacacgcccaaaaccctaatccgggaaaccaaccttcaactaaaggttctgccatagacaattgaaactacaataccgtaagtaacaaggaatcacccaaccaaggctctgaaatggacacgaatcgtcgaaatggattgttcaggaaggctgtcatagaaccggttaaccggttttatagaacatggcaaaccgattaaccggtttgcacaaggttttccccaaataatccaaaacatgcacaaaacgtgtccaaacctcaccaaaacttccagaacacctattttgagctcccacaacatattccaagcaacaaaattcaaaaattcacacagaactaaaacatgtcatgggtgaaccaagcttgagttttcaaactcaaacttgtgcatccaccacaccatatccccaaaccagaagcaaaaactcaaaccaaactcaaattgaacataaaaattgaacttcaactcattaacagcccctataactcaaaatcgtacattcaagctaaacttcaagcttaagaaactaaagaatcatggtgataaggcttacctccacttggaaactcctagatttcttgctgaattctagaaaaagggatgagtattgctgatttctttatggatttggtggtggtccagcaaagagagagaaagagaaatgagtttttctcttaattttgtttttctttttaatttcttattttcttctaaatggataaatcacttgctgaataagtgtctaaaaactagctgtcaaactctagataaggccacctaatctcctaaccaaatgaccaaaatgtccttaatggttaaactaaagacaacttaagcctaggggtaaaatggtcaaaaactattaccccgctcaaactcggtattctatttattttcaatatttatcccactaagaaaaaggttctagacttacccatgcgattcaaatgaccatccatcgctttttctgtcatcgccgagcaaaaattataaaagtagcataattcacatataacacaaatattacttctagagtttaataaaatctccagaatt

SEQ ID NO: 311629 - DNA, 1558 bp, Cannabis indica
aagttaatttcttattatttttcagtttttttttttttttttactttttactgaacaaaatgtatttttgtaactttgaaacattacatgcgtatttttgtaattaaaaattttaaatcatttataaataaaacaaaaaaaaaacataatattgtaaaaatttacctaaaaaattgagtattatcactctaaataactaaagaaaataaaataacaaaattaatttgaaggggcaaatgtcccctcatgtatgtgtagattcttaaccacatatataatcatatattaattaagtatttaaaaactagttaaccaaacactttttagtgtacatgagcacatcaaatccaaagagccttaataaataaagtatgtaatttatacaatataatctatctaacttgcttggattggatctctttgtaacttaatccgtaataaactagttccactttccaagtcatttccacaatttttctatttctttttttaatttattttttgtgaatatgaagcttgccttgaagaaaaagaaaaaattgaaaaattgaaaaagataagatttagactaagtcgtctctccccatatgaactttaattttcaatgtcgttgcatataataccatttcccatctttgcatatcaactttgattgaattttatataatttaacataacaatttttataaaatattgcgaatgaaatataaagagaaattttttattaattacacatttattaagttaaaattattttctctcgctctgtaaacacacccatggaggaacacacaattggaccacccacacgatccacgactcgcgaaccaccttgacttcgcgaccacaccacccacacgacccacgaaccaccgcaaccggaccactgcaaccaccacccaacaccgacaatgtcttcgtcaaaggtaatccctaattttttaatgatttagaattaaagcaattagatttagggttaggtctgtgtttttagtagagaatatgtgatttttgagatttttaggctcggatctgtgttttggaaaagaatttgcgatttttgcctggcccaatgcaggtccgatatagggtctgatggtagtttaatgctgaaggggttgaaggttgaagaagatagcccgataggtctgatatagggcccgatagtcctcataattttaagttttattatgacatgatgggctcgatataaggcccaataggtccgatattgtcttgttgatatcggacccatcgtttcacaataaaaattaaaattatgaggatcatcgggttactattgggccttatatcgaacctatcgagctatcttcttcaacctcaaacccctctaacattaacctaccatcgggccctatattgggcctacatcatacctgcatcgagccagatctgggcctaaaactctcaaaaattacaaattttcccctaaaaatacagacttaaccctaaatataattgctttgaccctaaatcatgaaaaaataaaacgattacagttaaaaattcatgaaaaaaattagggattacctttgac

SEQ ID NO: 311630 - DNA, 939 bp, Cannabis indica
ttaggctaagtgagccctaagtacaagcctagcctgcttatgtccagggccgggcttgatgatatttaaagttaataaaaagtctcttaccaggctgaacatctgagatccttacacataatttgatacgaattggaacaacacaacacaagcttaatgtaacgtaatatcacaaacaaaccaattaatacaccaaactatacaaaacatcatgaagaaattacattgtatacccattttattttacttgttttaatttttaccttcattttcatattttttaagatatacatactttataaatgatatttctattaaactccttaggttaatgtaaattacatgcttagacttaagtacagagtaagagtatattggacaatccactcataaaaagtagatatattttaataaaatataatatgaaaatatttttgattaatagatagaaaaagaggtattcttcaatttatccctaacatcataattgttattgatcgatttggatccacgtgaaagttgggctttgaacgtgggcttgaaaagtgctttaattggagagagaaaagcatgaagaaatggataatatttggaccatttctatttgggcttgttatcatctttactaacttatacaccaaatctgaaaattatcacataattagattaaattattaaaggataattacataaaacactacttatttatatatatatatttacggtgttctataaaagcaatacaaaaataacaagaaaactatataaaaataatattaaaataacaacaaaaaataacatacaaataataaaaaatcaacaacaattaacaagagtacaacataaaaatacatcaaaagattatattttctgtaaataaaatcataaaaaaatcataaaaatatttaaaattctgtacatctgtatttttgtaatttt

SEQ ID NO: 311631 - DNA, 1656 bp, Cannabis indica
agtgggtattttgtggctaagtaagctttcggtttaacaattccattgagggagcgagttgtcatggcatgagtgcgagtgacagggttgggaataacaggttgggttggtgaggcaagaagagaagtggattgatttgtgggattattaagtgttggggaagtgggaaggtgtgtatgtatggtaggtacaggtggtggacaatttgtaggaggctcattttgaggcataggagaagtgtggacagtgttggctgctggtgtagtttgatgtgtaacatcagtaggagtgccctcgtgttgtgatggtaagttggtggtgttgacaggaggaacaacaggattagtggtcatatgagaggtagtataaaatgtagaagtaggatgtatgtgtgagtgatgtacctgggaggttgttgcagtagtgagtgaaccaggaaaatgagattcattaaagacaacatgtcttgttatgaacattttgccatttggatgttcacaaatgtaccctttgtgatgtgtagaataacccaaaaataagcaatgttcagatctaagctccattttatgtgagttatatgcccgtaagtgaggaaagcaactgcatccgaaaggcttcaggatgttgaggtctggtttttttgaaaacagacattcatatgggctaacattctgcaaaaccacagtgggaagtctgttaatggtaaaaacagctgaggccattgcatgccaccaatattccattccaagcccggcttgtgctaataaagtcaaaccagtttctgtgatgtgacgatgcttgcgttcagcacgtccattttgctcactagttcggggacacgggtgctggaaatgaatgccttggtcagtcaaaaaacgagcaaatggtctatactcgcctccccaatcggcttgaacactcttaattggtaactgaaattgtttctcaactagacttttgaacctaataaaagtgtcaaaggcttggcttttttgtgttaagggaaagatccaacaatacctactataatcatctaaaaaatgcacataatacttgaacccttccttggatgttatgtgggatggaccccataaatccgtgtggatgagagccaagggttgagtggctctgctgtgagaagtggggaagggtagtttatggcttttgccttggtgacatgctttgcaaaattgcaaattgctcatagagccagtgtgtggtagttgtggcaaaagtttagctaaggtattgttggctgggtggccaagtttgcagtgccaactattgacatcaatcgacttagaaacattaaaaacttgacaaggaaattgagctgaactggaagcagtggtattattattattcatttcttgattagtacaagaagaaagattgttacattgacaagtacaatgttctaaagaattattagacactgctgcaagattacattgaagggatgaattgggacggtcaccaagctggtaaagacctcctttagctttgcccttgagaagcacattccccgtgtcagtggttaattgagagacactaatcaggttttttttcatagaaggaacatgaagaatggaatttagatgtaaagattgagtgtgagttagggagggaagagtagaatgaccaatgctagaaatg

SEQ ID NO: 311632 - DNA, 3050 bp, Cannabis indica
aaatttacctctaattttttttaattgaaacatatctctttttatatgtattgtacccaaaatgccctgatataagggagttacatggagagtatcttgaagtgaaaggggtaaaattggtacaatgtttaaaaaaagaggtaaaaataatagactttaaaaaagagggtaaaaataaaagagtacaatataaaaagggtatagagtctaatttcctcttcttttctactattttgggcttttttcccttaaatgataatgaaccctccttcgttcgacccataagatttctcccctaaacaataaatttatgcaaatttatgaaagaaggagtacttaaaaaaatatatttttttattaaattgacaactagtagccaaaaacaacttcaaatacatatgaatcaaaactgaaaacaccaccattgccatatatttgaacaaagcaagcaatcctaaaatacaacactaccgctgccatatatttatttatatttctctccgtacatttctctctccgtactgtagccctctcgtaggaaatttgaatttgtcccgtactgggcccgtctgggccgtgtgaggtgtgacggaggacgccatgtacgtccggccaccattggccatgggtagtggcccactacctacagacacgaatcaaagtgttttaaggtttaataccctttcctttttggatctggcaaaggatttggtaaaatattgttgtggtcatcttcacctatccagggatcctccttttctctctgtttttcctaatctcattattgcttgtggggtaacttctgagttggtttcaggtcctgtgacaatggcggcggtgactgaaagttctattgttgatgaaatcatccaggagacggagaatgtttgtctggatgacttttcgattgaggtttctcctgataatgatctttctagggagacgattgctaaattggtggtgggaaagttcttctcaaagaaggtgatatccaatggaactcttaggaaagcattctcggggttgtggaaacttagtctgggatggaggtttcaaactgtgaggcctacgacatttatcttccgccttggaagcccgaaggaagtcaagtatgtgcttgagaatggtcagtggaatctgtgctgtggattcttgttggcagctgctctctcggaggacggaaaatgggagtccgcggagctcgcgaatttggatatctgggtcaaggccatgggggttccattaccatacatgacggaggcctgtattcatcagatggttggtcggatggggaagtttatccaggcggataaggttagaaaaaatggtgtgattttgaatgatttcttgcgattccaagtccgattgaagttggatgtgcccctcctggctggagtgtctctcccagcctacggtcaaaaaaagatttggagttactttaaatatgagaaattgcccattttttgctttaaatgtggagtcattggtcatgttgatgctgattattctgcaaagaaatgggtagttactgttcaggatgggaggtctattcccttgttcggttcctggctgagagatggttcgaggttggcgaatggtttgcgttgctagaagtggaaagtatccatgatcgtagtaggttaaaaaatgatgatccggtcctgaaagagatgcctcttatggctagtaatgaggctctcatcccggcgaaaggtgcggaatgtagtggtgtcagacgagagtggagaaagatggaatggaaggggtggtttcgtagagagccgataactctttcaatgttgtgtacaatgattatgtggatacatctaagttccctacccagcatgtggtgcatgtggcaaaattatttaaagaaaaattggggcctattaagttctctaatattctaaatggtcctgattggtatagtttttttgtttatggtccgccttctagatctgcgagaaaagatttttgggaagaaagaaccatagatgctctggccttgaaccatccttggctcttgatgggtgatctaaataccatcacgggtcaatacgataagttcggaggccgcgaggtggaggagagtgatggtagtgaccttaatgatctcttggatgccacggggggtctggatttgggttgtgtggggaatcaatttacatggaccaatgggaggagctttcaagatctcataaaggagaggcttgaccgtgctttgtgtgatccgaagtggatggtgtcttacccgaaggctggattgcgtgctttggctattaaggattcggaccatgcccctttggttttggacctccttttggatcgtgagagattccataccccgttcacgtaccttgatgcgtggagccgggatgaggggtgtaaagcggttattcaacaggcttaggccattgatgttaggggggctcagaagtttccaactcgttgcccagctggataatacacgtaggtgcttggaaaaatggaataaaacgcacttcggtatgtgtaaagagaaactaaagaccctcaataatttcttgttggaagtgcaacggcgggtgccctcggagtccaatttgaagttggaggcggatattctccttgaaatcgatgaggtggaagcgcgttatgcggaaatttggaagcaaaagtctagggaactttggtaccgcaacggagatagaaactcaaagttttttcatgctgccactgtgatcaaacgcaagaggaattttattaatgccgtctgcttgaatgagtctgaatggataaaaggtcgacagttggttggtgagtactttcggttgaattttgtgtcgattttgtcgtcgatcttccctgttgatccccagcttgatgacttggtgatgaatgcgatctcgaaggaggccaatcaatctcttgtccgagttcccactgcggaggatttcaaaaatgtggtgtggtctatgcctcccctcaaggccccggggccggatggtatgcctgttagaattttattttaccaggatcttagatttactcacaagtatgttgtttaaaca

SEQ ID NO: 311633 - DNA, 3319 bp, Cannabis indica
ttttttttttttgtatttaagtggttataatattaatgatttcatgatatatatatatataatatatcgacgtggtaaaacaaatttaactaccttatttatttattttaataaatcataaaattttattaataacaactaactaaaataatagttgactccttctaatttataataacagtcttttctacaaaaaaaaaaaaaaaaccaaaaataatagtttgcaatttaatattcattattagagacacattagaattataaatacaaactaaataaccactcacttaattctcatatcgtttaataaaaaaaaatgagatgaaaaagattgtaatactacaattaatcttaagaacacttatattttatttcatccaccactctgaagatacaacagtagaaattattgcagcaagttcaacctcgtagcttgagcactcaactattgtttaagatacgtaactgcactactaacaatttttttagtcgtaaaaaacttgttattcctaaccactaacaataatttaatggcgagtcattgaagaacaaagaagaaccaacaacaaaacaaaataaaatcatgtcacatgaacaagactaaaatactcaaaattatgtcacacagacacagacaatattagaaccctcaagactatgtcacacaaacaagactaaaatactcaaaattatatcacagaaataaaactaaaacacttaataaaatcatgtcatagaaacaagactaattgaagcagcaaaaaatcaaatgataatagaaaatacaattccagccaagctgcacctaagcccagaaaagtcagcaggccttgttagaaaataaaactaagagctctaagaaaacttacttttttatactctaccctcgtaacaaatatacatgtactttcagtagctggtttgaacaagatttcagtagttggtggtcgattcttttaggtaatgtgggtgatgtcatgttacaagaagcagatatggtggcttggggaatttgggaagctcgtagcaaagtggtttggaacaaaaaatcttcgattgctttattggttgtacagtcagctagaagtattcatgattaatttttatatgctcaatctaaaaaaggagattctttactattagtttcggctgatagtaaagtcattgagcattggtcttcaccggcttactctcaaatcaaggttaatgttgattgtgcaatttttgagcaggaaagatagtttggtatgggtgtttagcccgagactctaatggcaggttgttggaggcatttaataagggatgggtgggttgtgttcaacctgaaatgacagagattattggtatcaagaaagtgcttagttggatcgatcatcatcagtgggcgaatgtgattgtagagacaaattgtttaatgtatgttcaagcttttgtctagttctatttctttaccttctcagtttgatttaattgtttcaaattgtaatagtcttttgttttcttaataacatttctatacgtttcgttaagaaatctgctaacaaggtcgctcgttgcattgtgcgtgcttcttgtttttccccaagttgtactataaggagagatctttgtctcctcagatagttgctattctttttggcagatttcttaatttaatgaatactgatattttcattcaaaaaaaatatatacatgtactttctagtatttattcatacaaaaacaagcatctttttttttttttcttaaaacagaaaaagaataaaaataaaattgacccacaaataactattagcacattgaattttatttagaaaaatttataccacacatctaaaaacggtattttttttttggtttttatgaattttttttttacatttttacgaaccttttttctattattatttacatttttatagattattttattttattttactttattttgcaaatttttacttattttcttagaaaaaaatattgctttcccataaaaaaaaacgtcaaagcaacattgttctaaaaaaaacacttcgtattattgtaaaaaaaaaattacgttattttctagtaacagcaatattaaatcaaaataatagttttttaaaaacaacaaaaaagcaatactatgtatttttgtaagaaaaaaaataaaatccgtaaaaatgtaaaatttttactattttttgtatatttataaaataatatcttttatttatttattttctatattttaagctccaataagagtatagtaaaattgtgtgaaaaataaaaacaaactaatattaacacaattaataaaaataaaagaattaggatagataacaacaatttataatattattctgaaaaataaatttatttatatatttatttatttttgtagatattctcggtaagataatgtgttataaataattttgagcttacatatgcatatttaggtgttacatgtgcaaatgttttgttttggcacataaattatggctcggatatcattaaaaaaaataagtcatgaaatgcatgttgtgtgtgttgtaatttaattaaatatatctttaatttctaatacttttttttatgaaaaaagatagaataaaacaaaaagaatctctacattttatataaaatgataaaaaaatagataaaattggattatttttaatataaaaaatgaacgtgatagtatataattagtcataatacatgtattaaattcagaaattagaataattaattgttggcaaataaagcacaaaacaaacattttttttatgaagtaaacacaaaaacagacatttattacataccaacattcatttctgttatgtgtagaacctaatattattatttggtgtctaatattagtttaattctctctctaatgctaggttttgttggattccctcgagtgtaatggatgtggccatagtacttaagaccttttctcactatgtgtaattttataacgaaccgaggtcatactatctaaaaccaattctactaaaatgactctagaattccagtcaaaaaaaattgcactctctgatcatgagtcttgctcatatttagtttcattaccataaaaatcatcacgcccctattgtttcctttttagataatgcagcacctcaaaaggaaactaaaattttatctgttattaaccctctccagaataaatgcactttaagcctcataaataacaagattaataaaaattttaatacagttagccaagaccttcgtgataactttacaaagaacattacacaattgttattggcctcagatccctcatccccataggattgcg

SEQ ID NO: 311634 - DNA, 1608 bp, Cannabis indica
aaggtgaaccaaaacatacacaaatgaatgaaaaaatacttctgtttctttattgatattgaataatccggattacattgaaatagagttttatttagggcataaaacccaacacttagctggtaccactttgttgaaaaataaaaagaattttggagagaatacttcaatggaagaggctatatattataactcaacttgtgtgatttgtgacttggtacaaaatgacgggattacatatctatttataggactttatggactaatctagaaacattattaaatgattagcttctacatttttctacacaattcctactactaacacaaatgaaaaataattctaaaaagttcaaaagtactcaaataaacaagaaaattctagacactttagtaaatatataaataatctaaaaactttagtagcaacaagaaaattatagtaattaactatattaaatcaagtttaatacttcaacaacaacttaaatcgcaactaaaatctatatatataacagctcacataaaaattatcggagcaactcaaaccataaatttgaaaaaaaaaaatggtatatgaagtaattctcatacttttattttttaacaattatctattctatataaaatgtggctgtataacagaattcttggtttattagaaattattgggtattttttaaaaaaaaaataaaaaaaaataacaaattattagatgttgccacgtaaagggtcaacatcttagttaaacctaaatataattaattcactaaagtgttgcaattaataataaatttgttcatattgttttttttattaaaaattatttttaaattttaatatttagaatgctttgatagtttaacagatgaacattttcattaattgcgaagataaatttaggacgaataataattttttttaattactattacaaattataatagtaatatttgtttttatttaaattataccttcaaatttcaatgattatcactacattgaatattattaattttaaaattataatattaaaaaaattaaaaactaaaataaaattaacatgaattgacacgtaacatctagtttaataaaatatataattagaacacacagattttaacgcccagattatgccaaaaagatattctgtgtagatcacggacgctgccatctttgtagaatagtagagagaagcttaatatataatagtagaatagttcacgggcgaaaacagaagaattaattaaagagcaacccgtgaacataacaaacaataagtctcctcaaataaataatattggcgtacgttttaagcttaatcggtaataacccgacaaagatatcatataggacctctctcattttttgtattgttcatctaaatcaacccgtgattgtgattgattggtacgtagctaggcagcccacatcccaggcattgttcttattaaaattaggcaatagtagtgatgcaacatctaatttattagcattattatttgatactagtcgtgaccagtatcttaataggagattttttacaattagttagttatattttttaaaaaatatttttttaaaatatatgagacctgataattaatt

SEQ ID NO: 311635 - DNA, 1490 bp, Cannabis indica
aaattacatttattttagccatcttcttttgcaacggtatgtggtggtttcagtggtggtgatcataggaggtggtggccggctcggtggtgttaatagtttgaagaaacaaaaaattgaaaaaaaaatagtacaaaagaaaaataaagaaaaaacaattcctttaatttttgtattatttattttaatctaatttacttaaattttattttttaaaatatttatttacgtaaaataataaaaatatgacatgtgtatactatgtctacgtagacaatcaactgtacacacttggacaatacaacttggctaataaaagtcaaatttaaatggaaataacaaactgctaatagaacacgaatttaaaaaagagattttcatatatcacaatttactctttttattattaatatatatttatatataagtagtatttttatatattttactatgaaaaaagagaaacataaccaaccataaaattaacatcatatagagtttttagagtcattaatatttattacaataataataattgttatgtttggtaatatgtattaggtaccacatgaaagatgcagtacttgatggaggaatacctttcaacaaagcacatggaatgccaatatttgaatacactcaaagagatcaaaggttgaataagattgtcaacagagcaatgtctaccctctccaccattatcatgaaaaatatcctcgaaacttacaatggtttcaagggtcttaactcgattgtcgatgttggtggtggtactggagctactcttagcatgattatcgctaagtacccttctattaaaggcattaacttcgatttgcatcatgtcatcgaagatgcacctccattgcctggtacgcacaatcataagagtctcgcactttaaaaattaaaaataaaaatagaatatatgtatatatatatgcatggtaaattttgaattttttcccttgttttaaattcttataaattattacaactatcacattgtatcttttctatttaaaatttaaagaggacacgatttaataatggtaatattcgtttgaagcaagacaacttgtctattcaataataatttagcacaagtgtacaattctttaataataatagttcgagagtgtaaaataaatgccaacttctcaacttgccttaattctttcgaaaaaagtgatatgtgaaaaatttaagaagtacaattaaataataataataattatgattcgggataaaaattaatttatttattttaatatatattattaatattattgttatatatataaatatatcataggtgtagagcatgttagcggagacatgtttgtaagtgtaccaaaagcagatgcaattttcatgaaggtacatgcatacaatctttcaaaagatatatatatactagcaaaaagttacgtgcgacgcacgtatattaaattttatgctagttttttttttatgttatttaaaagtga

SEQ ID NO: 311636 - DNA, 1132 bp, Cannabis indica
ggaaggaattggcaagaaaatcttgaaagaaagattaacaaaagaacaacactcaaacaacaagaagatcaagattctgatgctgatattcaaaacgacattgtgtttagtgtcgtggggttttgaacggtgccgtttagtctaagggtttacttagactaggaaaggtcaattttgaccttgatgctgatattgttgtctttgttggtatagggttaaaatagtaaaatcctacagtatatactataggtcacatttagtttgattattttttttaaaaaaaaaaagaattaatttatgccattatgaagaggtacaacaactatactaaagatgcatgtagtttttagtattccaccaaacttgtttttttcatttttttttcttcttggtgatttgccaacaaatactccattgtttctatgttgattgggtttggcatgtagtgttttaatcaacatatgggaaatataatagcaaattttccatttaatttaatgaaagaagcaccaaatttaggtagagtaccaaaattagttaatgatttggtttggttttacacatcattgagaaaagagatatactattgggtcatggagcacatggatttggttcgggctgccatttacaattcaactgaatttttttttttttttaattaaatataaatagcaagatgccttcaaaagatctatggtttttatatatgggtaatttgcaacaacatactctgtgttcaatttttggcaaacatgtttgtactttcttttaatacaattatagatatttgcatttaaaaattgaaacaaattctaaaaaaaagaatgttttcaagggagtaaaaggaataatataatatgaaaataaaataatgtggtgttattaagcactaatagtgttcaatactaccaaaaagaacgttttatgaatagtttaataattttttaaaatgccagtattaatattaatattaaattatatcaataattatatttcatattataatagtattgaggacttgaggtgtgcataaatcgatccaatctaatgataaccgactgccagacattggatatccaattgtgatcagatcagattggatgttatttttgaatatctaattggatcggat

SEQ ID NO: 311637 - DNA, 661 bp, Cannabis indica
gaagttcatgtttaggatgttaagaacatacttgttagtaaatctagatcctagtaaaatatattccaacagatccaaccaaagccattgcataggaagaaaccttgacccttaaatgaaggaggagatcgcaagcactctcaaggaatctccaaacatctttgcctgatgtcataaggatatgataggaattgacccgaaatttttcatgtattgacgtgaatccagatatgcctgtcatgcaacaaaaaagacgtttattagatcccgtgaaggtagaggctttgaagaaagaagtagaaaagatgttagaatttttttcttttgggatgtgtattacctgaagtggttggcaaacccagtccttgtcccaaaacccaatgggaactggcaaatttgcatagactttactgatttaaaataagcttaccccaaagaccgatttcccttaccaaggattgacaaaatagttgatgcgacatccgaccacgagttgatgtctttcatggatgcctattcttgctgcaactagatgaaagtgcatgttgcaaattaagaatacacaagtttttgcaccgaaaaggaggtatattgtgttaggttttatgccctaaataaaactccatttcaatgtaatctattttattcaacatcaataaag

SEQ ID NO: 311638 - DNA, 874 bp, Cannabis indica
taccttttgtttttgaatccttaattttggatgatttagtttaatgaaatttaattattattaaaaaaaaataacaataaaaaaaatataaaatgatatttagacttttgtgtacgtttttttttttatattatatgtagatataaattataaaattacaatataattacatgatcatcaaattattaattactttcaattccctctcttaacttttcaaataggcattattaatattttatatatgttactttatgtattatgttttatcgaagtcacttggtttttattatatgttatccatgtcaatcagtgggctacatatcgttagtgattttcttttcatctaaatatggtattttggtttcaaaaaaggaaatatggtattttgtggcaaatattagtctccatgagtccatttaatataatatggctttgttcaaaaatataaatatatataatttacaggaaattttcaagtatatatgggaaacattgtttaggtttgaaccaattgtggctatagaaaaacgcgtgtgttaaaaattttaagttcgactgctaattatatatatgaatatataaacacttaaataaaaaaaaaaaattattaaaggtaacaagttacttctttaggtaaccaatcaccataaattatttcccccatatcttttaatttttttgattctcattgaaaaaaaaaatatagttttacaaatttagattttaaaaaactataaaaataattatttaacgctagctcaaatgaccctagagagtatggtggagcgtgtgcaggcccgtctcaaggtgttgagaggcctagggcgaaatttgaaacggggcttttttttacaaaaaaataaaataaata

SEQ ID NO: 311639 - DNA, 680 bp, Cannabis indica
agctgttttggttctcattgtacagtttagattgttatcaaataatattcgtttattggtttaaattcaattccgcaatacaagtattatgtgagctttgttgatgatttcaccaagtttgtatggttatttcctatgaacactaaatctgaagtcaccacaattttctgtcaatttaatacctttcttgaaagattttttcatactaaaatcaacaacactcaacttgatcttgaaaaataatatggacttaattaagcataatacgacacgataagcttaaaaagcatggtatgtatgcatgaatagtctagcccgaaagcacgatacgttaaaaatcttattaataataaatatttaaatttcaataattctaatattttttatatgatttttctattaaatattgttgaaaaattatacaaaataaattaaagttacaaaaaatacatatagtttagtaattatctcattaattgtaaaaataaaatgtaaaaaaattaaaacatttgagcatgtataagaaaatgtgatgacccgagtaaagcacgacacaacaattttgggtgtatgagtcatgtcgggcctacccttgaaaaaatttagcacgacatgatactattggaatatgttttacaaggatctagatttactaccatgtatgctatttaacatcctaa

SEQ ID NO: 311640 - DNA, 1659 bp, Cannabis indica
cataaatttgccctctggctcctcctcgtgttggctctctaacactatgccacaagtccatctcccaaaattaatcatgtatcctcttgacgactcgctaaattttgacaaacttgataacacaaagtcttactcttaagacttgaagtcataccactccactatctcccattggcatatgctctctgaaccatttggattacagtgtcccatacaacaccagtgttcccataaacataaagcacgcccataacatgtcgcaaactagctcagtcttgatcttagccgacgcccatcaataatgtctgtctacaacttgcaataatcatgcaagtcttcccagtgaacaacccatctcttgtattatttccctctggattcacacaccaaaactaaacaagtaccttgattcttcaaagatatgaattagtgggatcccccccttcaacttgggaaaaacctctctcttagaggaatacctttaaaggtatcgctcgcaagctaactacatactcacatatggtccctccattccaaatgtcactttgatgaagatgttaaactaataccttagtcattttgagtcttcgcccctcggcatttcaatgttaccttagtaccttactcctactgactttcgccttagacaaacattgacatggtgttatcttagtacctatgtcttgtagactttcaccctagataactggcactgcctgtgtcctgagtcttcttgactttacatcctaaacaaaatccatctccatgatactcatcttgatgcttgtgatgaatctctagtctgatgagtgaaccgtaatggtctctcccccacttcatctgatggcatcctcgacaacatggccacatgcgaattcttgactgcccaactcttcatgcacaccatgccatctaaaagtgcatcccgcaggatgtgactctcgagttaactatatcatatagcacccctatcaatttctatatgcatgcaatgtccactaaaccatccaattgattctcacttgaatcacgcccttccaggctcccttgatactaagttccaattatgcagccctctggctttcatgcaaactctagcccccttcttgactttcacaggctcagatgcttttgttgcaccatgtcgccatgtcgccacgcatgttaggaagccctctagacaagccaccaactagttacatacattagacctctgtctctttccaacatggtgcataagtcgcttgtgcgtatgcaaactagcccactaatgactacccgtgtcatctcgtattgagacttgtggccaaggcgcaccacaacgtctcttggaggttcaggttgcatcccgtgcaagcggcatactggcaagccaatagaaatgtacccgctaacctctagcagcattcttagatgtactaccgggtcggccggataatctccatgagtattccaactcatggagacatatgagcccactcgtggtcctcatatgccttccctactagtcccactcacttattagtagctcacttaacaccaaagttccaaggggtggtggagagctgacacaagatactccccccttaaagagcattctaagcttttagccttctaccgggaacatatatgaatttttgctctgtagacatatggtca

SEQ ID NO: 311641 - DNA, 4682 bp, Cannabis indica
aaaataatttccaacaatcacatgtataagaaaaaatagacatgcatttaaaataattgaatcttattttgagaactgtaactatttaaaattttttaaaaatttacatgtaattctaaataactacaacgtacacaattacaaagaaaaaaattagattaaaaagctctcttggatacaaaaacagacagggatataaactttcattttagaggatttactatagatttatctaataatttttgtaccatgtaatatatagatatatatatatattcatatatagtacactttataaaaagggttgttctggtacgttgtatatgtttcgatatttaacaaaattatttagtgcattttatttttatgattatgcattgttgtagttatttaaaattacctataaacttttaaaaaattctaaattacagtaccaaaaataaagtttatatattttattttacttataactgtatttcttatttgtgtggtaaataattatttgaactttattcttaacactgtaaactatttatgattttttttaaaaaattatataattgtattaatattaaaataaatttaataaaaatatttgtaattatagtagaaattattgaataaaaattgtaatttctataaaattatatcttattaattaagtgatcaatttttaatttaataaataacaaatatttaattatatatctcaataaaaaaacactaatatccatcacggttatctgtccatcaatatatattttttttaaaaaaccaaaagatatgtcaattgaaaaataaatatataatcacaatatatatatatacttatatataattttaataacactacatatattatacatttcataaaattttgggggccatggccacactaccccctaaagtacttcagcctttgtgcatgagatatttacaataatttctacagttcaggaaaattttggtatgagaaaaaaaaattaaggggcaaaactatacaagggtcatagttcggaggataaatcttatttattctattttaaatttcctaaactagtaaaaaagctaacaccctgtcccacagggacgccacgtgtgtatttttataaatttattttaacctaatttattagcttagaaaaaatatggtttaattgaaatttttacttaaaataaacttaagtgttattaaacataaatccaccgttaagtatgaggatcccttgtataaaacctttacattctgttccaaaatttattttacaaaataagactacatttcaaaataccgtaaagagggtggatcctgtccactggaaatcgaggcaccgcggttgatatgtacacgtctagaaaacctctgactcatagttgatccactttacctgcaccatgaagcacccgtgagtcataaagactcagcaagaaaagctattaaatcacacgcaaagtaaaaaaaaaaacaagtaatctcaacatgacataataaacatactcatctttcatcacatattcagcaatgcatttacaattacacgtctacaagatgactcaatcttagtgcctcataaagcacccttaccactcgttatccacgagctatatatgtcactatcgttgtccaataaaacaattgataagtaagaaacctatcggcaatttcaaacaagtaattactcataacggtaatgaccgtttccacccctcaatcataattgaggcacaacaaatacacatcattacctcgatcataatcgaggcaccaacgattacaattgtttcttatctaacatacttaccggtgcataaaaattttcttagtctagaaatcaggtgtgcacgccgacctgaatggaaacaatgctcgacgatcctgggtcctatgttacgacaaccaaatctggtaaataccttaacaaatttttgacagaaaccctaataccaaaactgaacaaaccctaacttccattagctcgaaaataggttatacaactcccaaacaacctaaactagatcatgggaatcatcctgagccaaaaattggccttgaagaaaactgggactctcccctacagaccaactagttgactgattctgctataccaaaaggaaccggtcgatcgaccgattctggcaggtaagaaaatcttgggttttctccctcaaaaccgatccaaaacctctccaaacctatccaattgctctagaacggtataataccataaacacaatgtattcaaaactccaattcacaacaattcatccatttaatcaaaatatagcataatcaaatgagaattaagctcaaccctaaattcctctaactcaaaactaacagctttgtttctaaccaaattaaacttaaacaaatcctaaatcaagcggcctaaaaacttgttctaacttcaatttagtacctcagtctcgaaatcttaaaatctttacaaaacctaacctacaactctagaaaatcaaaggaaaagaagtggaaaattaccttaaagcttgaaccacccctaacccttgtcaaaacagcaaataattgaggaattttccagaaaaattccttgagtgcagctagtcctagggctcgagcaaggagaaagaaagaaggagaagttacgtccttcaattaattattttcttagtttatctcttattatttattaaacttaatttaatataaacttatctaaataacgaaaaccccaatttcagccaaaaattccatataggacaaaattaatactcttcaccaaaaggattcttttgcccttcataaccctaagattaaaatcaactcctaaggataatttagtcatttctaatcaatctcgcttacctgttaattgaaaattctaaactagtccggtataattccaacataacacaacttaattgtcgtgacatttctgactactccgtcgagtttcccaaaccgccaaacccgaaaatattttatttcaaaagtggtatctactatatccacatactccgataaaatctccataatttataaattacactttatttaattatttattatatttactctaataatcacacaattagctcaagtaataagatcataatcttactccaatatcaatataatcacatatgtaataaaatatacccaattaaatattgtaatattttctgggatattacaactatcccctccttatagaaatttcgacctcaaaatttaccttaataactcgagatactgctcccgcatctgcgactctaactcccaagtcgcttcttcacccttgctgttcctccacaacactttaaccagcagaatagtcttgttccacaacactttttcttttctgtccaaaatctaaaccgattgttcttcatatgacaactctgtttgaagctcaatatcttcatagcttaggacatgagtcgtatcagacacatacttccgaagcatcgagatgtggaacacgttgtgaactccaaataaagcagggggtacggctagccgataggctacctgtccaatcctttccagaattttaaatcggctaataaatttgggactcaacttttccttctttctaaacctctgaattcccttcattcgggacactcgaagaaaacaaatttcccaacttggaatttaatatctatacactttggattagcgtagctcttctgtctactctgtaaggcaaacatacgagctcgaatcttctcaatggcctcactcgttctttggactgcctcaagtccaagatacctccgttctccggcttcatcccaatgaatgggtgaacgacactttcttccataaagaattttatacggtgccatgccaatagtaatctgataactattgctatacgaaaatttgatcagagggagatatttgttcgaagaaccctcaaaatccaatacacacgcccgaagcatatccttaagtatctgaatagtcctctcagactgaccatcaatatgaggatgaaaagttgtactgaattttaacttggtatccattgctctcggtagactctcccagaacttggatgtaaactttggatctcgatctgagacaatcgactttggagcaccatgcagtcaaactatttctttgacatacagatcaacatattggtccaccgtgtacgtagtctgcaatggtaaaaagtgtgctgactttgtatatctgtccacaattacccaaatagaatcataggatcctactgttcttggtaatccaaccacaaagtctgttgttatatattcccatttccactcaggaatcttcagatgttgaagtaaactcgctggtctctgatgctctgccttgacctgctgacaggttaggcatttcgatacatactccacaatgtcacctttcatgcctgaccaccaatacagggcttttacatcttgatacattttagttgtcctcggatgtaaggaatatggtgtggtgtgagactcatctagaatctcctaactaatacttgtgtcgtcggctggtacataaaccctgcctttatatcgcaataatctatctgatgatactgaaaaagtcctttgctaacccaacttcaacatcttctttatacccctgaagttcggggtcactctgttgagctatttgattattcttgctagcaaatcaaactgcaacgtgatattagcaagttttccaacca

SEQ ID NO: 311642 - DNA, 1362 bp, Cannabis indica
ttaaaaaaataaagtttgagaaccaacttgccaaaacatgtatagtttagggacctgcagtacaaataagccatatataaaaattcaagtaagggataattttgtcaatttatcatttgtttcaatattcattctaataacaaactaaatattttaatcgattcctattactcttcttataatttcattacattacttattaccattactattacattccagcaaactaaacatcacctaagctctcaaaaacctcagtcaacaaatcattgttaatcaaatttagaatacattgcaagattattaaatatgggaaggtaaaaaaataagtcacgagtgtgtcatgcattttgttagtgaatctatagactttttgttagctaatatatgggacatatttttgaatttgaagtacaatttaatagtaataagagtaaaaaatctcttttattccataacttatattatatattttttttattattatgtatatgaagctagtacaaatattatactttgctcaactatatattattcccacacatttttcgaatcgatcgaataggtaccttataattgtgcgtttataataaactttttaaataggatatactatatatatatatatatatatatatcttattcgattgtatgatatgtagtgtctaaattatgagtctcaaatcatcttacattatattatatttatcgttattaacttaattgaatttcagtttcacattacgtttatgatcatactttttcggtctagtgggaatgtacatgaacgtatatagctaagaataaatgtcatgccgaatctaatctaatctaaatccaaaccaaagtttctaatttattgatttttttagggtttgtgggtcctaatcaagcacttaatatttatggtattctgatacatttcctacttattcatcatcaccatgaccagaacacaggagaggttacatccattaccactattaattattattattattattattactactattatttgtggtaatgaaaatgtttccacaaatgtcattcttggaaagttgtttactcgcggaaaaggcttctttgtcctttcgggaagggtcttcagcgagtgccttctgtccgtgattctggaagctcgtttatgtttctggatatactgggacttacgctaacgtggagacttcactcaaagaggagtttgttattaagttaattattttctaacttatcaaccttattttttccagccaccaattttaagatcttgatcctaagcctataaataccacattgacttctcattttagagacacagttcagattgagattgagagtttaagagagagagagagagag

SEQ ID NO: 311643 - DNA, 1330 bp, Cannabis indica
aattatctctattcactattagtcgaaataaataaaatacttattctcacacaaattgtataacaaataattaaaatatatgtatatttttaccgggtattacagattcctccttattttgctacagaaacaccaccactatcatcatgattttaatctacgtggatgacatcattgtgattggtaacaacagagaaaaattgagaatgtttaccaccaaactcattcaaatttttgctctgaaggatctcagacccttgtaattcttcttaggaattgaggcacatcgagatgatactagcctttatctaaatcagagaaaatagatacgtgagttgctggccagaacaggaatgactcacttgaaaccctactctacaccaatgaccgtgggaaagcctttatccaaaactgatgggaatcttctcactaattccacagaatacaagagtataataggaggcctacaatatctaacacacacaagaacagaccttgcgtttgctgttaacaaactgagtcaattcgtacaagcacccacaacaacacactggactgcagctaaaagagttctaaggtacttaaaagggtatcatgcactccacatcaagtactcaaaaaaattggcaattacaggcttctctgacgctgattgggcatgttgcccagatgataggagaaatgtggctggttattgcatatatctcagagatactttagtttcttggtcatccaagaagcaggccgttgtctctcactcaagtactcagtctgaatataaggctcttgcccaagtcactgctaaaatctcctggatacaagccttgttgaaagagattaactttccacttcagtctactcctattacatggtctgacaacatgggagcaagtgctctggctgccaatcctgtttaccatgccagaacaaaacacatagaactcaatgtccactttgtaagagataaggttataaacaagacacctgacattagatacatttcctcacatgatcaagttgtagattgcctaactaagagcttgactagccatcgacttcatttcttaagtgacaaacttggtgtcgttgagaccccacctagtttgataagggttgttaagaaatgaattaagaaggttaattagtgtttactcttgttttgtcttgatgtgtacaagtgtcacaattgtcactatgttagtcccccctgtacaatgagtgcatatcattttgttatcattttattcttttgtaccgttgtaaatgatgaggttattatacctttgaatattctagaatatctctgtaaccttttcatttagaaagtgtg

SEQ ID NO: 311644 - DNA, 826 bp, Cannabis indica
agaaacatcttcgcgagatcatagcgccttcttgggcacccactagtgtcaaccaagacactaacacaatttccgatgcccaagttgaccaccattagtcttagtggataggcccaagattgtttccttcttgccacgtgtcaaaaatattgtgcatatcatcgggtcaaatttccatgtaaacacccaataaaataaagctattttccactagtgttacacaagttcaagaacataatactaatggtgaaaatttttacaatgcacccgtaaaagagttccactaatgcactccttatttgtatcgtcatatgatagaagttttttagtctattttttttacaatcgtctacgttgtagttatctaggacatcctaaaaaattttgagaaattcaaaaaaactttaacatgcaaaaaaatagggttcaaacacacgcgttaaaaaataaaagagtcgctagcaatagactgtttgaatcctatttttgacatattcaactaaaaaattctttcaaatagccaaaaacccaataatgttacattgtacaagtacaagtaacatgaacaaatttattaaattatcatgtgcaaattgagatatattttcccatgtgaaataaaatatatatatctttttttttgctaacgtaaagaaaataatgtaaaataaataaaacttcacaaattatgatttaggccgtggatttctatggtggtaatgctaagcaaagctggaaaagaaaaaaaggaaaaaaaaaaaagaaaaaagaagaagactctctctctctacacccacacactctctctctctctatgtacacaccc

SEQ ID NO: 311645 - DNA, 517 bp, Cannabis indica
ttttaaaaattattaaaatatatataaataaattttaaaaggtttttttttttttattttggccctaatccgtcctgattaaaagaaatgtaatatttaatcacaactacaaaggtattgttactaaaatatatgtaattcacacattcgaattaatcgatcgaccttgatctctcttgtttataaataaattatgagagtattagtattgtttaatattatttttatgtgtttatattattatttgtttaattatatattaagtttcatgtaaaatgtatcactaaccaaaactaacaaattataaaggggtaaatatcattttagaccctctgttttgcgaaagttactaattggactctgtattttgttaaatgataaaatagaccttgtattttctaaaatagtacaaataggaccctgaattgattttttgtcaaaataaagtttaattataatccgatctaaaagtggtatgacaaaactgtttacattttttgtatctgttcgtattaag

SEQ ID NO: 311646 - DNA, 1793 bp, Cannabis indica
ctctctctctctctctctcaggagtcaaaggcacatacatagtttcgtttttattaagtccataacaaagtaatgtcatttagatatttttatgacaaacaacaaagaatttcggcaagttattcattatcattaaaaagatccaaagggttagtgttttttattttggtttaggtatttgattggattagctaggggtataggattgcttcaaggtacaattaatagttaatgtgagctgaagtttggtgaaaacgtgagagactactgtattaggggtatatatgtgtctagtactactaagaaaaagggatgttccttgtgattgggaagagagctagctacaccaaatcaaatattagtattatttttaatacaaaatataaacctaacatagcttcacagcaaattacccatcatagtaatctatattatataatgtgcattataatctttgttgacttgattggaaagaggtatagaatccttttcttcttctcttgtttttgttttatgtatgtatatatgtatataaaagtatgtagcacaactaactgtagtaactaggtaggggcctgtttgttggccgaatacattgaccataaaagtaaaatcaggaattctgatctttcttctcttatatatatatatacaagtgtgattaagttttgcaaatctttgtgacactttgttctctttcttgtgtaaaagatagatttagttagcatagataagctcctataagaaggaaccaaaaaaattagaaacagaggagacaattgggagacccctgcatgaggtttattttgtttgacagaaatcattgaccacctgaagattatcacaatagaacacaaattcctggtagcccatatgcagagctttgtctgctgccaagcacactgctaaagtttctccatagagacaatctgtgacattaactttgtctgaggagagccagagtatagttcctccatgatcacgaaacacagcagcacttgtagaagagtttgctgtggtgttataagaatattgttcctatggatgtatttctaattttctatacagattttgtcctactattttccattctaatttgagatatattatgttaaaaaaatactattattgtagccattagcgaacctaataaaaaaaaaccagcaatatagggaataggttaattaaattgttgttttgttgtttggttagaagtttcgaaattgatcgagattggatgagtgtgaatatattaataggaaaatataaggaaggtgttgatttcttttaggagtttttttgcaaagaatgtggataattctgatttgtacagagtttcatgacgattgttaatcctacaagttttttgaaaagtcacgtaaacatgaataactcttatttatttagtttttattttaattatacttttaatgtaatgattaatgttttttatcttttgttttataatttaagtcagacattttctatggtaacggggagatcaatgcagtacgggatgagtgaaccgaatttgtaaagcctttgattatagattaagtataaggttactacttttgttataatacatgagtaacaagttttatgaatgttatttttatattatgtaagtagtttatagttagtgcttatgatatacatggaatttaagttttaggatcgtttctattaataattttggtattatgtaattagttaatagaattcatcactaattttatataagttttataaacgttattttaacttttttgtattatgtatttactattata

SEQ ID NO: 311647 - DNA, 1174 bp, Cannabis indica
atctcttctactacgtatttttaaaaatatttgtaaatgaaagtcgtttttttttaaaaaattattttaagatgtaatatattttattattgttgtcgaaataaaattactatttagttacttatagtacaaatgaggagatattaattggttaattttttttaaagaaattttattattgttaattaactcaaaatcatttttagaattggtttaattgatttatgttacttaagaacgtaatgttgtggtggatatttgatttttaaagctgtttactcagaaattgactcttttgatgtggacatcaatatttgacatgtagcaagatgaaaatatttacggagttgagtagtcccgagtcatagcaatcaacctagaaggggtccctagccctgcgaccaggttgactcagggaactatggaatgagtatttgtatctcgtcaagttgtttccaactcactatccttcagtattttgaaccaagaagtcaagaaatgcaaagagtctaaacgatctcctggaagtcaacctgggtgcccaacgccaaggttgacatcctaactaggattttagttttctagtccatcttagtgcaaatgacacaaactttgtacttagacttcaataagacatgccacgaacatgttagcggtactagaataagatacaagtgctttcgggaaacaaacggagccatctacaagtcaaaatcgagacccagcacccaggttgacttggtgctaggtcttaatgcccaagttgacattttgtcagcttgggccagttccaagtatttattttttccaaaaagtgttttgggcacttttcttgttgttagaaataatgaagatacaagtgttcttagggagcaaatgagaatatctgagggctaaaataggactcggtgcttaggttgacatacaacttggttcgcatgtttttgctcctcaatatgtttatttgttattttgttgataagtaaatttaagttaactttaatagaattaaaaaaccaaaacacgttaaactaagaattgctgcacttttagagcctgtttggctgtgttttcagttttaaatttttaaaattgtatttacaaaagtgagaatagaaaacaatttaatttaaaatttaagtgtttgacacaaattttttaaaactgtttttag

SEQ ID NO: 311648 - DNA, 2021 bp, Cannabis indica
aaaacatattccaacatggtcatccgtacggaaggggaccacttgacagtaacaggtagcatgcgccgccgatcatgcacagtaccaaaaaggcatgtcccttttggtattgtgtgcattttccaggcctaagacagtggacaaacccttagtttttttggatctggtgtcagaaaggtgccatataagaatactctaaaggtcccttttgttgccttttccggaatactctatgagggcgtctagataggttcggttgggtctttattcttttggacgagtcgcctttataggaccaataaggttcggctttattatgtctatacatgggatttgtagctgaatctaacgtcgtgatccaactctaagatgggttgacccattagtttgactgagcttgtgaatggccccgtcttggttaattttgatctttggaagtacatgtgtcacctatccggaaacacggataacatttacccccaagccttcaagactcgggagttgtggaggccagtagcttcctttcagagtcattgtggtacgtgggatcatgaacagttttggccctttagaatttcgaggcaataggtcgcggaagctcgcgaacttttcatttttctatcagtggaaaacacatgttataatccctttgatccttgtgtatcacgcgatttgagaaagcatgtgaggtttggggttgtaaaaccacaattggtcatgtcagtgggatgaatgccatcattaagtagccttgatctcgtatacaacatttaatggcaaccattcgtatccccggtattatcttaatttttgtccacctgacatggcacctccatgtggcaaaaagctgaaaaacacattagagacagttcagcactaaccagccaggctagtgttgtgcaaccttccatcctttaagatcccatggttgcacggtagacacaaacaagaaaaacatggagacttataagatctacatcttcaaggttctgaaccaagttcatcttgatatttgagtcactagcaaaatacaagcacatgcaagatcctggtcggacctttagctggttggtcaggggaggcaaccccatgcatcgggcaacctcaagtatagctggccagccaagcgtataggtcacactccaacacttgtgtttttccacacaagcctttcaaatcatcctcaacactcttacaactttggaacagttcaaactacccaggattttagggattcaacaccaaaatgtaacaaccctattctttaggtatactttctgttatgtcgattttttcccacctaacgtggcatgtctacgtggccaatatcaatgccacgtggcagtacaactcactaacaagaaggccaaatcatctactcagcacttaaaccaatggggggtcccgacactcaaacaggatgatgaatgatagaccagccacctcaaggaggttggccgatcacccctggctggccctatggctagcataggccgaccagcttctgggcaacacaaggctggccagcctgcatcattcaaatgaatggccggctaaacattagcttggcaggactttagcgtacagcttcatgcgtggtcagcaagctagactacaaattggaccttaacggccaacaaaaatagagggaaaatatctatttttaaggggcattttagtcatttgtattttactaatttaataagtaaatatttgcatatttttctggataaaaggatttaagctctcttatataaagagccttaaccaaaccctaagaccttaagctttaagtcactaagtctgaactctctctctctctctcacacacccaccattgcttctctcttaacttgagatttatcatctttgattcctacatagtaatcttaagagagctatctcaaatcccacctatagtgatctgaatagtcctatctctcggtatcaatacaactaaaagaggagtaggtcattacccgttaactaagggggttgaacctgatggaaattattttacc

SEQ ID NO: 311649 - DNA, 890 bp, Cannabis indica
tgcaataggagtttctatgaagaattccgtcaaaatgcgaaaaaaaaaaatattttgaagtgtaaaaataaaaaaattctagttttttaaaatttaaataaactttttaagattttctaaaaaaatgttaaatctttcttatttttatttggatggggaacgatttgttagttgtcaaagtttaatggttaaatttgttaatttacaaagacttgtcagtatttaaacaaaagaatagaacaaaatctaacataaaactaaatttctgtaaatggaaaagttcataggaaatattaacaagttgtatattttagaggtatgttctagtagtgtcataaatcaaaaatacttattattttaaacaaagtgacatttttctcttactttcctttctccctcacaacaatacttgaaaacaacaaaacaacaacagaatcatacacactcgaataccaatcagaagaaggaggacagtcagaaacaagagaattcgagaacgtaattcgacatagttaactatacgaagctggttgctgatgaaatggtagaaaaatttaaaaataacagtaaagaactagatccaaaaatcgacatcaacaacgcgaagctattaacagacaaacaccacccagaagttgagaaaggtcaggcatacaaagataaggaaacactaaagaatgtcctcacctactacgcaatcaaaaacaacttccaatacatgttttgaaaatatatttaaatgggtttcagtaagaatgtttttaatctcttcaataacaaagtaataaccagaggtcataactcttgaatggtagtattccgatcgagtgtacttggattcccaatcctataaaaaaatataagaaaatactattaaaacaaaactaaaa

SEQ ID NO: 311650 - DNA, 4225 bp, Cannabis indica
ttaactccttacaagtttccaaaagcaaaagaaaaacattcatggcataatttggcaaggcttgagctatagatttcaacaagacctcctttcccgcacaagacaatatacgaccctcccaaccttgaatcctcttatgaagcttgtccttaagaaacccaaggatagcattcttgttcctcccaaccgaacatggaagacccagatagtacccattttcatgagcttcatagatttccaacgaaacacaaatagcatcttgaagatcacaatttgtattgttgctcaagaacacggaggacttagtaaaattaattctttgacccaaaaccacctcataagtgtgcaaaagctccttaacattatgcgattcatccttagtagctttacaataaatataactatcgtccgcaaaaagtatatgagaaatgattggcgcacctcgagcaatcttacaacccgtgagcgaacaactttgctcataacttcgcagcaaactagagaagccttcagcacataaaataaagaggtaaggcgataacagatcaccttgacgcaaatcccgttgagcagcaataggtcccaactccttcccaccatgcaagatagtatacgagactgaacaaacacattgcataaccaagtttatccatcgcccatcaaagcccatcctttccatcttagcacagagataaccccactcaagtttatcataagctttactaacatcaagtttgagagccatatagcactccctccctattcgttttcttttcaaatgatgcataatctcataagcaatcataatattatccgaaattaaacgaccttgtaagaacacactttgagtgtcagatatgacagttggcataacattcttaagtctattagccaccactttggacacaatcttatgtaacacgttgcataaaccaatgggtctcaagtcccccatatccataggatgcttctttttaggcataaaaatcagaatagttttattcagatctggaggaaataaaccatggtgaaaaaactgccttaccattttaataatgtgctttaacaatcggccaactcttttgaaaaaaaaaaccacggtaattccatcaggacctaaagacttgtctggatgcatttgaaacaacgctttgcgaacttcctcctctgaaactggcagcagtagctcggcattttgctcaaaagaaacacgactttgcacactgctagtaacctttctctaatcggtttgagaagaagaaaaaaggtcattgaaataattaaccataagcagatctaggccactattccaatccaccccagcaccagattgatccttaagctttgtaacaaaattataccatcttctattagtagctgaggcatgaaaaaacttgctattgttgtccccttcttgcaaccataactgcttcgatctttggcgccaaaatacctccagttcaatataagcttcgaataagttcttccttgcttgtttataatttgcaacagagacatcatctcaacccaacttccgcctttggacctcattgcgacactttttaattctatctataaagttgcctgtgaactcctttccccaaacacacagctgttgtccacaaaaactcactttattcataacctcatcattcccacaaagctcccagctatccttaataacttgaaagtaaagaggctcccttaaccacgcattctcaaaccgaaactgtttagaaaaatggtagccagcagtaggaaccagctccataagaatcggggcatgaaccgaagtagatatttcaaggttgtgaagtttagtagatgagaacatgttcaaccaagcaagattagttagccccttatccaatcaaacttcaatgcaataagtagtaccccttccacgctcccaggtaaaaggatagccacataactccatatcctcaagaccactatccgccaaagcttgctgaaaaccttgaattaaaaattcaggatatctattacctccttttttatcatcatgtgagagaacattatttagatcacccgtcacacaccatggcaaagtagagttagcaactagagtatgcaaaagattcgaagtagaaaaacgacgacttttatttggttcaccatacataccaataaagcgccactcgttcatcccttcaatagtaactcacacatcaatataggcattcgaaaaaccaagcaaagacacttcttcttcagctttccataacaaagcaatacaaccacttctaccatccacatccgcagccatcattccctcaaagcccaacataacccgcactctctccatttgcgaatgactagaaagagtctcacaggaaaacacataactgggcctcttttggatcacaagatccataaggaattgtgaagcccatgggttcccaagcccatggggattccagtttcgtcccaatggattggggaacgacaatttcttccatagagtagcttatagggagccattcctatggtactttggtaactgttattataggagaattatattagaggcaaatatgtactccatgaacctctgaagtccatgacacaagctcgtaaaaaatctttaagtatttgaatggttcgttcagactgtccgtctgtttgaggatgataggttgtactaaactttaagctagtacccatagctttctgtagactcacttaagactttgatatgaatttaggatccctatccgaaatgatagactttgggaccccatgaatgcgaactatttccttcacgtacaactacgcatattgatccactatatatgttattttcacgggcaagaaatgtgctaattttgtaaaataatccactatgacacaaattgagtcgtacattcttgtagttttacataatccgaccacaaaatccattgcaatatcctcccacttccatttcaaaaattctaatggctgaagtaaccctactggtcgctaatgttctgctttgatttgctggcatgttaagcatttagccacataattcactacatccctcttcattccgtatcaccaataataaacttcagatcttgatacatcttggtggtactcgggtgcaatgaataaggggtagtgtgtgcttcatctaggatctcctttttaagctcaacagtactctgaacacacagtcgagccttaaacaataacatcccattgcttacaattgagaaatccttaactttgcctgctaaaacatcttctcgaggagtagttaattcagggtcttccagttgtgtcattttgatcctgtctagtaagtctggttgaagtgtcagattatacaattctccaatttcaaactcaatgtttgccctagacatatccgaggctaaccgacgaaagatcattacagtactaaaagtttgattaggaccctttcggcttagggcatccgctacaacattttccttcttgggatgatacaaaattttgcaagcaaagtctttaactaattctaatcaccgcctttgtctcatgtttaaatctttctaagtgaataagtacttgagacttttgtggtcagtataaatttcataccgtttaccatataagtagtggcgccaaattttcaaggcaaacacgactgctgcaagttccaagttatgagttggataacgctgctcgtaatcctttaattgccgtgaggcataagctataactttgtccgcttgcatcaatacacatccaaaccctatttggatgcatcacaatataccacaaacttcttttgattggttggcagggctaagactagggttgtaattaaccgttgtttcagctcttggaagcttttctcacacttatctgaccacacaaatcactgattctttctggtcagctcagacaatggcatagcaatcttggagaatccttccacaaaacgtggataataacttgctaagccaagaaaactttgtacctcagtaactgtttttcggtataggccaattttttcactgattcaacctattttggatctaccataattccgtctttcccaacaatatgtcccagaaaagacacatgtgacagccaaaactcacacttttttaatttcacatagagtttatgatctctgagccgttgtagaaccatgcgaagatgttgttcatgttactgcttctcaccgagagtacacaaggatatcatcgataaatacaattacaaagttatc

SEQ ID NO: 311651 - DNA, 719 bp, Cannabis indica
gggaaaacaagacatttttatatgatttagtggtacttgtggtttgtgcaaaaattacttttagatgtagacatcaattaaatttatttttaaaacgtgtatatatatatattcataatatttttttattaatttttcttctccttcaattcaatatttattgatcaattcccataatatttttcataatttattttaaaataatgtatattgatttttatttggactcaaaatacattatatatatttttattttaatttataattttgtcatagtataaaaataaattttattttaaaaatatctatatacatacatatataagttaaaatataataagacaaaaaaagtgactctaaattaaaaatatataatattttatatgtaaaataagtgcatctatttttttttttaataaacaaaaaaaactctcctaaaattaaaagtgcaacaggccagcatgaatatcttaaataatttgaatatttttgaaaagtaaaaaaaaaaaaaacaattaaaattatccaaattaaatagaaattagagtacacatgacatactcaatctctataaatagttatgtcatttgccaacatttttctcatctccaattcttctctctccttatattaatttccaagctaaaaccctaattatttcatcatcatcatgtccactcaaatcttagcatcatcatcttcaaatgacaacccaaata

SEQ ID NO: 311652 - DNA, 528 bp, Cannabis indica
cggcagccaagggtctttaaaaattagaatcgtgtcacccgttccaactcgtttacgcaaccctttaattaaaagagaccttccccaaattatgctccgccaaacataactaggtgtctgcccaactgcatccaaaaccaaagaaaactcgtagattaaaatattacactcacaataccacccataataacatattattaaacataagatcaacaaactaaaaatggcctaaataatataaccaacctccccactaaaaaccaaagaattcaagcaaaacattaaaaagaaccatacatgttatttacgtcaaagccaacctccccacgaatttcaaccttttggaaagagttgatattaattgcagtaatacacaactaaggtggtgtttggttggaggtaataaaatggaatagaatggaaaggaaacaattttcattccattcctttgtttggttgcattttaaagtattggaatgacattccaatggagtgctctttccaccattttggtggaatggctattcc

SEQ ID NO: 311653 - DNA, 1940 bp, Cannabis indica
ttcagttttgtcagtatagactccgttttaaatttattgaaggaacatttgaaagaactgatactacatatttttgtttagacccaatgatcaagaatttagaccttatatgtggcctgcttaagaaaataacatggtttgtacgaacgaaattagagtaaaattacaattttacaaacattgggtacttatgtcgctaaaaataaatattgggattatgccacttacaaacttaaaactttgggtacgttttaccgctatttaccctataaatatgggtgcactcttaatgggtattacccatgaatgggtaaaattaggaaattttgagtttttattttttctatttaattaaaaaaaagtctctcatttttatatcatatgggctgagattgtttcatcggtaaaaaaaaattaaaaagttaagtttaagttaaatatttttgtatgaacatatttctaatatagtctaaaagatatattttttgatttttttttaattaagtagttaaattaagcatagaaattcaaatttgtgatttcattataaatttgattgtttgatattttttaaattaatatttatagttaaatttgtttaataatcattcatattcatagataatatcattgtgttctatatatatatatataacatacagtaaaagaaaagaacaagaagagagaggagtgtaattaagtaaaaaaacaagagtgagtaattaattaaaaaatacaatcttctctacatgtaaagatgcagagttgccttctttgaaataaacacttgttgggagtgctcaagttgtactcgacattctttgttgattgaaatatggatcaagcaaaggctaatgaaatacttctatggttttttgcactaatgaatatgctattttcttgagttgaattgtgcatttttcatttgtaaactgtgaccattatgcaaaaaaataccaaaattaggacaaattacaaaatatgttgtattgtataatacaatatgaaattttgaattatatcaatattaatattgtatgagaagtgctaccgtcaacctcctgttttaatctcttagtcaacttccacgcccgaaaacacatggaatattttttttacgagagcgttatgcttacaacatcattcctataaatttttaaaatatttcaaatattaaaaattctgttttcagtattgtaaattattcagaattttttaaaaatttacagaattcatattataactataaaaaaaataaaaaaatatttcaacatataatttcaaatatagaaattgactaagaaattgtaataagaagttgtaattagcatttctcattaagtaatgttatggctgtgtggtgtttaatgaatatattctcaatataactatattaggcacccatatatatattggaaataatggataaatttggctttgtcaatacaatatcagaatttctacctcttagtcaatctccatgtctaaaatcaaatactgaataaatatatagggaaacaattttgtcttactttcacagaatgtattccatagttcattagatgagtctcaggtacgttaccatttttcaaccctaattacccctaaattaaccccaaccaaataactctcccatctaaaggctgtcgtacatcacagaatacattccgtgaaagtacattaccacaaaaacctgtccctaaatatatatatacaacctcttacttaatacatacatacatagtcattattttttaaaactatagtcattattttttaaaactgcccataactttactaaataaataattagtcatcaattcgccacaaagcctcaaacctcactcctaccttcgccacaaacactacccataaaaaattgagctcctcctcacaaaaaacataaccactaaaccaaaagagcttgtcacagacctgat

SEQ ID NO: 311654 - DNA, 1024 bp, Cannabis indica
atttatgaatgatttacatattttaacagattgatattttgttatttttctgttaatttataattgtcttttttttattttatagttatttttatgttgttgtttaggtgttctatagttgttttataattatttttttgttgcttttatgtgtaattttttttgtacagttgttgtttaatttatgtgcaattttatcgtttacattttcagtttattccaaacaatatttttgttgtatatatctgtcgttcgcggaagtaataaatagcgaaagataacaataaatatatatatcaaagcggcaaacaaaaacacataaaattatgtggtttagtaatttacctactccacaggatgcaactgatattattaatttgagtaggaaatatacagaatacaataaggatatagatttcctataaataatatctctcaggtgtttcccaaagttttgatatacatatgctctctctctctctctctctcagattttttaatgaacctgattaaacaaagttatacctgaaatgtttcttttcattgagatgcctcttttgaattttgaatgctcttctaaaagttccatatttacagaaggaaaacttcaactaccacccatatgtaataaaagaggtagctcatcttccaacaatatttaataaatgagagagcatgcttcttgatagatgtggaatatagcaagtcccaaaacttttgaaagttgaaccatatctttgcaactccaagacaagttgactcttgaatgtgtaaccataactttgcaactccaagacaagttgacttttgagccaaatccaaccaactccaccttggcaaaaaaaaccaacactaaaaatgcttcctccacatgtgccctaggcgctctatgtccgagagatgttgatcaagttcaagcagtgtggaaacttgatccctataaccacttttgtaagcatatttgtagggttatctacagttctgactttctgaagaatattattcccttcatcaatgatttcac

SEQ ID NO: 311655 - DNA, 4463 bp, Cannabis indica
tttaagataagtaaatgatgctatggggtttctcctaacatggatgtgtccaacattaagcttccttttgagcttgtaggagcgtcctgataactggagaaataatgcaatccctgctcaacgtgtattcgtcaaagtagcctctgctatctcaaagtttgaaccagtaactgtctgtgcaagtgcttctcaggttagaagatgtgttaaatttggaagttttcatcttacaaatggtaatttaatgaactcttaactgattataaacttattatatcatttacatgatcagtggagcaatgcacggaatcagctaccggaacacatcagggttgttgagatgagtatgaatgattcatggtttcgtgatactggaccgactgtgagatcctgtttttcactctttctttgctactctcattgaatagttgtttgtttatttgtttagtttttatttctatgtatttagctatacgagtgttttgttttctggcagtttgttgttagaaaaaacagctccagtacttctgcattggatggaaaagttgctgccattgactggaattttaatagttggggaggtaagctttagagtagctagaacctaatgtaacatttctagcattaagtagattgtgtgcgaactttttttgacagagtttagcatcataaactcaaatatattatacagatacagggaagctttgctgaacttcaaagtgttcaagcaacaactctagattttttctgccaatcattagtatgtgaccttacactctaaaattaaatcacgactatgacagaaaaggtcataaattcgagtttactgctgctataagttccttatgtctgtatttatcaattgtatagaagtactgtataatactagtatccctactcagattgcagaaccagggaaatggctttgtaattacatgatcagggatatggtagaaagtttcttaatattgtttactaataaaaatggaattaaactttgaatttctaggtattgaacatggctgttatcaagattggggccatgaccttcatgtggcacgaaaagtaagtgtgaatgatttatttttttattttcttttttcttttttaatggaaagtcacatggacgaaagttttcttattctataattttatattttagattgtctttcagaaacttctcatctgtttcactaacagttattttccattagattctcgaaattgagaagcttccaaggtttccacagtctgtaattcttgaaggtggaagcattcatgtggatggagaaggttgattttttaagttgttatagcagattattcattgctacatatgctatgcctgattatttgttcagtccatttgttgtggcagaagaaccaaaatatatgctacccattgttatcactgtcacattgcctgtatgtatttgtaaaataatttactgtatttctgtttcaacctgtgcatagtttacaactctgttcttgttcatctagtgaatgaaattggactttgagctctaagttatttgttaggacaagggctaatggggaactaatgggaattgatgactcacaggagagagtgtgtgagttagtgttggggctgtttgtaataaaagggagaaagagcagtgtgtaaggtgtgaagaatttggattagcttgtaaccgtttgggagagaacagggctcttttaagtccctgatatcaataccagcatattttcttctatttcctattcccttttcgtgctgtcctggacaatttgataggaaattcctataattatttcagacttttgattctacttggttacagtataacatacataatgatgagtctgccttaaaaactattataaactttagatgaattatcaggagttttttttgtttagaaaaattaaataaactgtccaggatttttcctatagttttcacatcttttctttcttcaggaacttgccttaccactgaggagtgccttttgaataagaacaggaatccacatttgactaaggctcaaatagatgatgtactgaaggcatatcttggaatcaaaaaggttatttggttgcctcgtggactttatggtatataactctaccatagttactctgtgaaattgctttttatgatgtacttgtgatggttctgtggactgctctgagataatgtgatttataaagcttgatttgattagtacttgacccaaatgatcatttacaatattgtttaacaggtgatgatgacacgaatggtcatattgacaatttgtgctgttttgtgaagcctggagtggtagtgctgtcatggacagacgatgaaacagatcctcagtatgatcggtcagtagaggccttttctgttctctcgaatactaccgatgcccttggcaggagtattcaaataataaaactgcacattccagggccattgtacatgactgatgaagaggctaatggagttttaatggtagagtttaacaagctttgaccttgaaattttcataatacttttccctttaatactttgcctaattgtaagcacagtaaagcctacatttctaataatattgattatgtctttatgcccaattcagtgccagaaaaaagtgcctacttactttaattaagtaaacattattgtactgtcttttccatgtttgtttcataagttttttagtgtactttattttccatgtttgtttgataagtttcttattgtactttatttccttctctggttgcacaaaaggataatgaagctaaaccaagacttgctggtacaagacttgctgcttcatatgcaaacttctacattgttaacggtggaatcattctaccacaatttggggaccagaagtgggatgaagaggcaattcgagttgtatctaaagcctttccaaaccatgaagtaagcaaatgctgcagttaatttgtttaattagatttgcaatttcagtagtttttggatcaatgcactagttaatgcacatacatgtagaaggattgaaaaaacaaaagcaaaaatatctctacgggcaataaaaaactaatgacatagaagagactacttgaaaacaaattctgatttgagaattgtccataagtcaacggtcaacagtgatttgaatcctgtagaacttagaagagcttcttgttgacagttgtctttttaatatttgtattattactacaaacaaaataatttttttgagaagcataatcatgtctcttatgcctgatgtaatccctaatactttaattctaaaacgtgtaatgtacaaacaaataatgtttatcatactaattaacaaaatccatgaagatgtcatctataaagaatttgattgtgctagctttttttgttctttcttaaatttctgcttagtactaaaaccaaaattttatatgttgactaattcaggttgtaggaattaaaggtgcaagggagattgttctagcaggtggaaatatacattgtataacacaacaacagccagcaattccaaaatgatgggcccactgctgcattttcaacccaaaactttgaaatggtgtggtttcattttatatttcatctgtaacttattgcaccaaatacttacccacataaattatttccattgtattgtttcatttacgcactaaacaatttgactagttaagtatcgtcctggccctttagttttctaaaattgatgaaaatggccccctcagcattttttagcaaaatttcttttataaaggagaaaggagaattgtagcgaaagtctatccatttaagtttcttatttatcttgaatacaagcacaattaattcataattagctataaagtagaaactttagaaaaattgaaaagtaaaaagactctaaagtagtacctacaaaatattgaaagataaagaaaaattgcggcataagtctttaaaaaatttattttgatacaaggctccaactttaaaaaattgtggtaaaaatattgaagctcgccaaactcattagttttttcatccaccctctgttagggtaagtaacagtacatgtgtacttttctaatttgattcccgactttatttttttttaatttattttgaaaactaaagcaaataactaaaataaattgaaaactaaaaaataaaaataaaattgattaaattgttttgagttaaaacaaaaacttttatctcaaatcttaaaactaatccctaaatcctaagtcgtatatctctaactcgaaggttgagaatgaagaagcttccacaattcaaattccctctctgacgaggaaggttgagaagaatagatgaggagggttttgttgggaatattgtatcagaatctagatttactaacaagtatgttgattaatatcctaaatatgaatatttctaaaacaatgaaattaaacacataagagtttaaaaaaattacattggttgcagcggaata

SEQ ID NO: 311656 - DNA, 736 bp, Cannabis indica
gatagattaaacctatcaatgtcaataaaaattaattaagtaaaaagacaccttttcttcaaactaaaataaaatgagaaaaacatgacaaactatattcagatttcttgatgttaaatatcgataaatcataaaaaaaaatagtgtcagaaagtcatgggaccaaccccgaaatcacctatgcatccaaagccagaagtgaatagagatcaaatagggctagactattgtgttaaaataaagataaaaggccaacacaaaaataacataaaacaaaatttaaagataagaaaatcataaattaagaaacgaatgagaccgcccccgtcgaccctaaccatccaccaaaccagttgtccctgacgaagcaaatacccaactagagtgccccatcaccgaaacatggcggcatcaaattgcacataccttctccactaattccatcccgacggactggagcaaacaggatttgaaaatccacacataaaaaggtcattggactaacgcgactgggatcttaccgaagccagagagaactgactgggggaaaatcgattaggagagaattgagtggatcaacgtgcactacaaaaaattttacttttagtcacaagaaaatttgtgaccaatcataaattatcattcctatgttgtgactaaaaggtatgtagctaaaagtattagtcacaaaaattacaatttattgtgactaaatgtatttttagtcacaatactt

SEQ ID NO: 311657 - DNA, 3835 bp, Cannabis indica
acctccacctcccccacctcggtttaaatatccccgccacctcctccccgttcaccttcacctccacctccaccactcggtttatcccctccacctccccctcgttcacctccacctcccccacctatttcatctcccctacgtcgtcctaattcacgttcacctccctaattcaattcatccccaccgcctcctcctcgttaacctaatctacatccaccaccttgttcatccacttaattaatcgccaactcacccacccaattaaccacctcctccgctttgtttgcacaagtaaaaaattgtccaaacgtgaacacttctcctccacatagtattaaatatatatatatatatatatttatattattatgactaattcagtactttgaataatatactgcacaaaaaatataataaaacatgtatcatgtactgtcgtatatttgtaacacaataagtttcaactatcaattctatgatagagaaatttcatatgacaatgaaattatagtgtactatatgtttaacgacatatatatgatcaatatataagataaattagtgtttggcaagtttattgcatattatgtgttacgttcattaatcacctattttataaatttattatttgatttgattactttttcttttgtaagatatatgattactaaaatttttattttaaaataaggttaaccacttatagattacattaaaaatgtaactacgatggttatatttttttatgatggctataataaattaacaacagttcattgttaaaaagaattttttatttaaaattaaattaattataattaattagctatgtattaaaataaataattttttttgacaaaatattgaatgaaatcgtttaaccattatttaggaaaatttgcatcaaacaccctttctctttttgacagcaaaatacttaattaatgctacattttcgttgcaaataattagttctttaggcagttaaatgccacaaaaatttgttaattaaatgtaagcaaggatgcacttgtcaacatttcatatttgaccaaatattaaatatttaattatttacttgaaaactatattttatataaaatttaattaattttaaaaaaattaattcttaaaaataaattcttattaattaatttcaaataaaaatgagaaaattactctaaaacatatatggtggtcaaaagcttacaaacctagtaaactctctttgaaaaaaaaaatagtaaaattcaaacatcacaacaaaaatagtaattgactggcgtgcccgcaaagtcggagtcagagtatccaatgatctcaaagtgatctgacctcctatatgtgagcatgtactctcttgttctcttcaaatatctcataatctttttggctgctttccagtgatcaattcctggattgcttaagtatctgcctaatactccaacaatgtacgctatatccgaacgcgtacaaacttgagcatacattagactcccaacagccgaagcgtagggaatcttttgcatttcttgaggtaaagcctcccttaaggccgttggtaaagcaaaatttatctcctttaacgacagaggtatcacctggtctacaatcttacatgccaaaccgtttgagtactttatcgataaagttgagtaagataccctgacttgtggagagtcactaccaaactctaggcctatatatacataatgattgtctagggtttggggaccactttctagactactttttagacctcttcctaatcactttttgacctcttgagatctctcttctttatccctttcttagattttgagtttttcatacttggatgacaccatcttcatcatccagtcaccattttaacttttcaaacactattctaccaagaataagggactactctttattcttggctcttttggttcactatttctcataacatttatcaccaccactattgttatcatgtatatgagtatttggtctctcatgcgccttttattcataagttttgatatagattttcacctagaaatctccaattgtattattttctacacactcttgagaacataactctagtgtgttggattaaattaataaaagacaaagtagacatagccttattatcatcgcgacatgggggtgaactactataaatcgtggtgtcacctttattttttgcgattttaatttgccaaaatctttcatgtagtcatttgattttttacaatcttcttaaatcagatatacctcattacaaaataatgaataataaatgtaaataaataaaaatttaggaaaatatcccacaattattgagattatcattgaacttgggtaacttcattcttttccttgaagtttgcttatgtggcataatgcctcatcattaaagaataagaaaaatagagagatgtgaccatatgcaatggcacatttcaacatttggtagtatatgaccacaaatgagtggcatagctctcccaacaatgccttgtagtcctaacttaatagaaccaacaaattcccgtgtaaagtttgccaccctatcttgtaatctaactttgaacccaataatttcataattgtgctatgaccatgagacaagcttagatcgtcttgaaaagagattaaaaatgaaagttgaatcaagtcatttggaattttggataacaattgagagagttatgtctattttactaaaggattgcaagtacattttagctccaagtctagcatgttccacgtcatcatgccaaaaagtggcagtggtcggtcgtgtatgttctcgaataatttcgggtgttttttgaatttttttatggtgaatcatattttgtgtgttgtggggtcccgaaacctcatttcgacatttgaaaccctaactatagacctctaccatcttttggtgccaaaagatggcagtattaggccagggctattgggaagcatttgatagtgtttcttgcttattttggtcatatagatgctagacaaacaatttggtcacattaattcggccaattggcggcagagatcactgcgatcttttggtacacaaagatggcagtgatcggccatgggggttacactccctttgaagactagctaacagagacaacggtggaatgagcctcgattgctgaagtgaaatctcaacctctttggttagaaattatattggaactattaatttctatatacgtgtataaatggaaataaaagaatacaaattaagaaaatgagaagcgaaatcaaaaccctaaatgtcattgtcgaaactctctgtgagtgttctgtgattttgtttctctctctgtaattcaatcttcgtcgtcgctgaagctcttggttgaggtcgagtttgaggggcaagtgcgagcgcgaatgagattcggtcgaaggaatcgaagaagcaaccactgtccttttacaatttccctatcttggtttggtttttaaaaggcgttcaaaataaggtgtttttctcatctaaaatatttggttgcttctgtaatctttttcaccagtgttacaaaataatggtgtggcattttctgtgtgacgacacttgattgggtctttaaaaaatgttttttttcaataataaattgttggcaacttattatagtaagttataaaaaatgtagtgatcgtattttctacttatgtatatctagggtatgcgtttagaagtaactgcgtaaatattagataatatataatggttattatttatgaattcttaatttcttatttagtaaaatagttagtaattatataaaaaaaataatacattttaatacataatatttaaaat

SEQ ID NO: 311658 - DNA, 2009 bp, Cannabis indica
cctttgcttttgatttcttagtcaaacctggtcggtatatacaacctatttttcattcgctgctctgaccaactatcactttcttgtctcttaccttttgtagagtagatgaaccctatgtgttttggggaggcaaacatcatatcgacagggatttgcttcaacttttatatggggatcatcctcgtctctatgctagccatcttcgtgtaatgatgatctttcaaattctagcttttaagattgggaaataagtattgaacacacaccttcccaagagcccaaggtgcaacattatttctatcccgaccaaattcgaggtgaagaatacggtcgtgtcatctgggaactcaagaaaggttagaggtgttaccttcctcctaactggacgtacatagttcattcgaacatagtcgatactctactagagggccatcaaaaccctattactaggggaaaacctgttgccaattttgctgtgaccattgtcaggcacacttctgataaaattccttccaatcgtaggataatggtgcagactaaacaggctgttaggaaatcttccttgactgatctaaatattccccgcctagccactctagctaagacagaatagacccgtcctaccactgacgaggaagatactactagggacattgaagtccaaaaagtgaaggaccaaggcgatgtccgtcctgctactccttccaatgccaaaggcgataaggaagaaggggtagctgtcgtgctgccctttggcggctacaatgatgaaggagagccagtatccaagacaggcaatgttttggaggctggccaggactacgttgtagaggagtatatcgaggctcatcctttgagaaggaaaggtctaccaggaggtcgatggatttctccaccatttgtggcaaccatgaaaaagatgactaatctgctcgagcgcgatctcttagggattgttgaatgcttccttccctccctcgtcgaactggctactaaccctagagaaagttattgtgcttggttaggagctcacaccaaaatggtgcaatactacccttgcttccgtacttcaagaagatagccaattattaccatatcagtcaggcccagtttactcccaagggccttaagtacgtatctaccctgttcatgtagtacgcctaggaccctcacagtcacaacccatgtgttacccctgtggtattggttgcactatctacatcccttttggggcacgtgtccctcatgtataatgtctagtgagctaaataccttgattttacctctaaggtgaaggagtcaaggtagcgcatcttccttgaattatttcatcctagcccatatctggggtcggctactaaagtgatgtctcctacagtcaaaatcattgacattttgccctctaattcagatgatactcaagagaacccatgcgctagatatgttaggttaatgtctgggagggccaatcacttttaacatatcattgcctgtcaagagtgtgttgagaggattcaggctaaaatcctctcagttttgagcggagagcaacatgatctggttgtcgactcttgtgtgtacctctccaggcttagagcttctcttgtagaatcccaacaccacttagggttccttgagagctctcttcctcccatgcctgatatcccttcatcttttgaagctgtggagccccccatgggtgaagaacgggtagtcacttctatcacccccactcccgagagcgcctagggtgaagacttgagcttgtaagaggcccgaaggaaatagaaagaaaggggctcatgctgaccattatttctatatatttaaaggtatgattccacccaagcactcagcggcttccactgcaccccgtgtacgtgcatcctcataccgacctaggaggcacatccctccgttaccatggaagtacccttcgtttattctaatattcaaagcactttatccactgacggtatatgttggaatttattttaccaggatct

SEQ ID NO: 311659 - DNA, 1115 bp, Cannabis indica
tattttccgaaatcatattctatcaagtttatttttcacttttcaatttttaattgataatcaaaattttaacttttagaaacaaaaaaaggtctacttttaattttttttttttaaataatttttttcctaatcaatattttggattctgactcctaccttgatcttggaacctagaccacgacctcggacccaaacccgacctcagacacggaccccgacctgaatcggagacccagaccccgaatctagactaaaccacagctccggccttgaccccgaccccaaaccctaaccctggccccaatcacgaacccaaaccctgaattcagactccggacctagaaccgacctagaaccttgacccagacccaggccccaaacgatcggaccttgacccgaacttcattctcgaaaccaggcctggccttggatcttggactcgaactcaacgtcagacccgaaccccaacccagactaggacccgaatcctaaacttggcctaagaccttcgaccctagacctagatttggcgccacacccaaacctagaccttggatctcaaaccctagacacaaaccccgacttgaaccccggacctcggacccagaccccaaacactagaccccaaaccccgaacctagactgaaccttagccccatcccagaccccgaccccaatccggactcgaactcaaaccttagccccaaacatgaacctaaactccgaacctaaaactcgaacccaagccctaaatagtcggacctcaacccggacccccatctcaaaaccagacctagccttggaccttgaacccgaacttggtgtcgaactcaaacctaaacctcaaaccagttgccgaacccgaacacgaaccaagatccaaaccccaaacttagcccaagaccttcgaccctaagcctgaattcgacgccagacccaaattcaaccttagacccgacttaaataaaatcaataaataaaaatcaaatttataaaacacacttttatttttaaaattaaaaaacaaaatagttatagaacacattttaaatttttaaaaacaaaaatttacttttattattatgattaaaaatttaaaaacaaaaatgtta

SEQ ID NO: 311660 - DNA, 1102 bp, Cannabis indica
atcaagaagaagaatacttcattaatctacccaccaaatacaaacaatatcacttcttaaaaagaagcaaccaccacaaccaacaaataacaaatcaatttgtgaattaaattcttctcctccctaaaacaattcctatctttaatcaataagagcctatacttaacttcacatttgattttatttacaatataattcacaaaattagactataaggaaaacaagcaagtgttacggttgctccacaagtgatagatcacagctggaaggattaaaactcttatcatgtccaccactttcggtcttaaactactcaaccaaatagtccaccgatcatagtccatagaccacccagctgtgcccatccaaccaaacactctgtacagcacctgaagagaaagattaaacttgaaaaatatatggttgtggctctcaatttcaaggtcacagaccacgcagttcagattagatataggaatgttcagcttgcttaattggtccctagttaacagcttgttttgagctgcttgccatagttggaaagcatgtttcagcatgtttaggccattccaaatcgcccctgctgctaggaactccctcggcttcagtatactgttatagagcttgctggttttgaatttttctccacccgctgccagaaaatcagctatgctatatgttgtttgcaacctacaaagtttcctccaataccaactagtatccatgctcatcttgtaagaccagaaatcactccctttgagataaattgagttaatccacttaacccaaagaaggtcttttttgttcatcaaatcccaaataaatctagctaaagaagctttgttacatttagttccatccttgaaaccaagaccaccaaaggatttaggaaggcaaaccttttcccaactaatcaaatgaactccagcaggattatcctttaaaccccaaaggaagtcccgaaaaagtttctcaatctcctgtatcacactttgaggcaaaaggaagactcccatccaatagttccttaatcctatcaatgtagaatggattaattgaactcggccagcataggatagatgtttatgttggaaattatttt

SEQ ID NO: 311661 - DNA, 940 bp, Cannabis indica
aagaagaagaagaagaagaagaagaagaagaaaatgaagtaagagttagagaagtttttgacagtgtgtgtggatatgattggatttggatagtggaaatacatagtatggactcactttagccacatcacctcccatcctccatccactaattaacacgtgtggtccacacgtgcataagaatgtcatcaaatttgtcttaatgttattctcaattttattttttaatatgtattaaattatattttttaaatttttttagctgttaagtttttttgttaaattattaacattgtacatatactaaatcatacttctcatacttgatatctaccaaattatgtcccgtacactttaatatatacttaattatatctcttgaatttttatttatgttagactcttcttaataaagttagacaaacgtgatcttaatagttcaaggaaaatttttaacagttttaaaagttcacgagacatatttgtatcataatttggcacactattagagtaaacttttaataaagtgaactatattttacattagagttgggttggattggtatgggggttggccatttatgtatgagaattgttctatttcaaaattcaaatagtattaatattttcaactttattttaaatgaaataacaatattatatatttaggtctgatcttaggttaggcatgtgcctagggtacacctagctcaaggaccaaaaaaaaattatctccttttaaaattaaatatatctttttactaactttaaaaattaccatattttttttaaataagagtagaaaatattttttttcctataacctactatatatatatatatatatatcttcatataaataaaaaaaaataactaaattttttagtacaaagtgattagaatcacttatgaatttacgacgcccacgtccgccaccggc

SEQ ID NO: 311662 - DNA, 653 bp, Cannabis indica
gtaaaataatttctaacaggatcttcttttcctatgtacattttccatattggcattttaaacttcgaggataggtctaaagcctcaatctcaagcaagaagggcgatccacgtacctggtcgagttcgagatttgtgaattttgggtaggtcaagcgttctttaaggttttaagtttgtctatttgtgcttgcataagcagatgcacttgttcgacctgttgactgacctatgttatgttgggatctctttgaactggatctttggtgcgattatctgcctggaaggttgatggaatgttttctccatccagttcccttttgtgattcaaattggttctaaggtcatgcacggtgcctagcgaataaaacaccaaagcactaggtggccttggcatttgacttgtttggtcgagaggttggcttgagactttggtaatactgtagttgttggaatgtgtagttcctccaaaggggcggtcatgtaggatctggttgtctatcgtttggcccatagtttggactaatggccttggattggacagctgaccactaccagtttgtgcggtatgaccaactgcatacctttctgatccacttaggggaatactaaatgtaacactctaactagcataggcgtgtttacgtgatttt

SEQ ID NO: 311663 - DNA, 1147 bp, Cannabis indica
tttttttaaataaggccgagtagatgaattggatgaatttacaattgtggaacaacatgtgtttgtaactttctatgtaactaatgatataatgaatgattattaattttattaattcataaagcatattgtatttcaaaaggtgtcgatgagaattactataaggtagatttattatatttttccagtgattaatataaggtttggttattgtatatgaaaaatactaaaaggtactagtagtgtttagtacttttgattcttacgtgtcaatattgttattggtccaactaagtattagatttcatataatttaatgtaataacttttagagagtatcgctagccaatcataaaatgatacgtctagaagatgctagagattactggtgcccaataacaatgctctattctttattgtttaataattacttcttataatttttcatctctattttataggactgtttgatgaaattggtgtttggtgtttacgatattctgaatattattaaacgatagtataccaatctcttcatgtcttccttcccaattgatgaggatggtaaaattttttattagcatatttgataaaataaacaaaaataattataaaaatagtttcgaaattgatatttttctttatagaaacagaatttcaaggatgttgatactgtgatttcagtggtccaccaatgagttgcaaatgctatgaatacatccctctttttacttttcactataaaaaatattacttttagtcacaacaaattatgtaactaatagtgaaaaaattgtaagtaattattaatcatcattcttatgttatcactaaaaggtctgtgactaaaggtattagtcaaaaaattctcagtcagctgcagggtactgggtgcgcggcatcttgtctgaacaaggggcatgacacggcttcagacagggtttgtctcctgtccgcgcgcgcacgagcaccttatccgagtactcctgtgcgtgcgattgagcctatgcatcccgaattttttaaaccaccataactttctcatttttaatcggaatcgagttccgtaaaaaataaagttgcttaatttttcacaaggaatccaaataaattatttcagaacgaaaataaaattgttttcatggaa

SEQ ID NO: 311664 - DNA, 4055 bp, Cannabis indica
ctctctctctctctcacatgcctattgctttgctcacacttgagatttgccaactctaattctcatattgtaaccttaagataactagtttagctcccatatgatctaagtagtattatctttggtatcaatacaactaaaaggggagtaggtgattatccgttaactaagggggctaaacctctacaaactcctgtgtttatttactttattgttctaattgtgtaacatgtggcaagcattagcattaaatttgactctactgtcggttagccaaatctgaggtcaatagcttcctttgagcttggctaaacatgatatatgatagagtgcttattttgaattttttttgaaacgtacgggtttgttacaaaccgttttgttgacggtgaaaactcagcaactaacttaaggttagaaagtcaaaactcaaacactagacttacaatgaagatgaagatatgaaaattcaaaaacttagagaaatgttcacataaacaatggaggaagagaaatacttgtatttcttagagtgaggtgttacaatgattttccaagcccttctcacatataagaaatgggtgtttatacgccctaattgtttaggtctccagtctagaggctgctgatggtggtcttgcatcttgtacctttgtctggtgtcaggtggtcccaagttgaatcagtagtggttgttgtgcatacttggtcgggatgtaaggccttataagtgtggtgcctccactacttgtaccttctttacatcagaacttgcaggaggtgtggttgtactcatctcgtatgcatgccttgtccttgtgattgtaccccattatctggttcttcaatacttagacaaatttcactaagtataactatggtgttgagaagagcacgtctagtaactcatggcacgagccaagtgacacttcaccatgcatggcctagtgacatttcagtaagtgcatgtcctactagccttaattctagggtttggcttactggccatgtttcttggctggaccgagtggttccaagcttaactttgccaactaacctcttgaatggtcattgctgaatgacattactatgtatatggataagtgacatctccatgtgcatggctaagtcacatgtagagaagcatggccgagtgacatttccattgcatggccgagtgacatttccatgtgcatggctgagtgacatgttgagaagcatggccgagtgacttctttaatgcatggttgagtcacttttcccttgcacaatcgagtgacatttccatgtgcatggcaaagtgacatgtcgagaagcatggccgagtgacatgttgagaagtatggtcgagggacttcatcattggatggtcgagtgacatttccatgtgcatggccaagtgacttgacgagaagcatggtcgaatgacctagttgaaaccatggccgagttaccgagtgttaaactgaaaaaattgacctcagtgatgtgaaaatcaatgtttgacatgttataagaaaaaaagcatctcagagttgagtagtcctgagtcataaaagtcaacctgggaggggtccctaaccctatgcccaggttgactttgggaactccgcaatgggtgtttggatttttccagttgtatccaactcattatcttttagtattctataccataaagacatgaagcatctgagcccaaggctcaagagttgaaaatacaagaaacaacacaacgaaaattaactcaggtgcttagggtttcacccaacgctcacattgacaactgaactagggttttagtttctgggatcgtcttagtgaaaatagggcaaactttatactggacttgagctggacatgtcacgaacatatttggggcataataattagattcatagaactttcttttttgagcacccagagcaccaagtgccctaggcacccaacgcttaggttgacaaattctcaacctgggccgctaccaagcatcaaacttcaaatccgtctcgggaattttcattgtcttcatcaaaaattaagaaaaaagtacttttaaggaagacacaaccaacatggaggccaaaatgagggaccagcacccaggttgacacttggtgctggcccagcatccaggatgatattttgttaacctcagcgaattctgaggagtttttccaaaaagtcttctttgaatattattcatttttgtcaaagattaatattcaagtattttttttggaggaaaaagaactttttaagggcctgaaactgaacccagagccaaggttgacactaggcactgggcctagcactcaggttgacatattttcaacctgggttgtttcctatcagtttcatgaaaaagtatttcgggaatttctttgtcatcaaaaataaaaaagatataggtaaactaagggagaaaatgaaaattctaggggcatcaaaactgacccagcgctcaagttgacaatcaacctagtgcactaattttgatcactcaaatgaaaaattttctctgagcattctctctgacaatccgaggtaggacacttcatcctagattttaggaaccttggaagtaacaaagagacaacccagaagctctgctaagagcacccagtgcacaggttgacatatggccaggtgcactaggttcttcttatccaattctgattccatctcaaccatttgtctagtttttaatagtgtatgagagcgatgaagttagaaaagtcaaattcacaacttcatatattcatttttttggtaaaatgacttattcagaaatcaagttgtttcgagtctcatgttttcgctaaataggaacatctatgagaactggtgacaagcttcaccataacatagaaattggctaagtgatgtcaaaatatcacttaggcttcagaaattacatcctagacactattttcccttggcccaccgtctaggttgaaatcacatgttaacctgggggttgggagcagaacgatcttagtaaaacaaccataactcactgaatattgatctgattgacggggttcaacttgaattttaaagatatttcaataatctatcatgtcatttcgtcactccaatcacaactttgaagttatcaactccaaattttatcctcaatagagttacaaatttaagctacaacttacacgaagtcggtcccatggaggcaactcaagtgatgaaattgacgaccgacctccttagtcaaaataatttaaatggatcatttaatattttttggaataatttattattattttagtaggacctccatccttattagaggaaagctccactagctcattttttaaattgaaaaaagtactcgtaaggatagagaatctctctatagtttctctctctagaaattagagctttcacagttaggcaatcttcttgtaattctcataagaaataaaactcgaaaaagatgtagcttcattactgtaacgatacatcgagtgaactactataaattccttgtgtctctcataaatataattaacttagaattcattctcgccaatctagtgagtgcgtgtggcctagatatctatgtctagattatgcattaacattttggttctttcattgagatccacaacaactagccaacagattgggggcatgcaagtcactgaagttggtgatgagactacattagcatctcaagtgccaggtggagaccttggaactagctccacaacttgtcagccaaggctacaagctgctcttggtactaacaccactaagcaaattccacatggggaaccacatgtggaattagaagatcttaaggagggcgatcctcgagttgaatagcttagccaaaaaacggcttaattgcaacaaaaattatgagattctctcaacaaactacacgaaaaatttcaaaactagttcatggagaactggcaaaatatttagaatcaacgagctgaggagaaataaggaaggtataacttgtctcaacaaattagagaagcttatcatcatgaaagaaatcatgtgaaccatgcaacatacaatgattt

SEQ ID NO: 311665 - DNA, 1376 bp, Cannabis indica
aattctaaattaaagctaagcggtctttacacaaacccatttatatgggtacggagcgacacaaactggatgcagtgtggctcatggacaattgaaagcaggggcaccataacaagacttgagtaactcttagaacaatagagggggagaagtccggggtgaggagaagctttgaagaaatcaaagaaagagtacaacccaatgtacactgagtactctagtcttgtggatactccataaaatgtgtacaaggcaacatacaacatggttcattataggaagcctccgagaatgcctcaggggggaaaatttcagagagactaaagaagcattgtgaataccacatagatgtggagcatacaaaaaatgaatgtgacttcatgaaggatgagattgaaatgttaataagagcaggtgatttgggaaaaatgggtctggattcccatcatatatcctagatggagggtcattcatggatagatgattgttttcgaataacagggtactgtaaacccttcgcatggattaggtcaccctcaagctcccaaaacatatcctttgacactccttgcttcgccagctccaactgtagtggctttcatggctccaagaccaggggacctatatcccctagggctagtaccaccaccgtttgacggacacgtagcaacgatctcgggttgaccgcacctcgtaggaagaactagaattctcaaaagagatatctaagagaattaggcaaagaagggaggacatgtgcggtggtgcaatcaccagcccaacgtccttagacattgaatctaccaatcactttcacaaaggaggatgccagacatgcacattttccctgtcatgaccccttggtcattgaagctcgaatagccaatgatagaatttctagaatcctagtggattatggaagttctatgaacatattatccaaattttcctttctagagattggactcactgaagcagacttgtcaccttttcctatctagttatatggctttaacggggatgccatgacaccaatgggaaagatctcgttacttgtcacccttagaggagaaaaccatgccagcaccttcaagccattgcacatttttagtggtggattgccccacgacaaacaatgcaatactaggacgccttgtgttagtggatttcaaagcagcaacttcaatgcgtcatttgtgtatgaaatttccctacaacaatggatgtgttgggatagttagaggtgaccaaaagaacgcaagggattgttataatgtctctggccggacattattcatggtttatgagagggcacttattgctcatgggataggaactcaggaggtagctaaaattgttggaacttattttactag

SEQ ID NO: 311666 - DNA, 625 bp, Cannabis indica
agttgaatcgtaaaggacaattaattggcttgtagtggagacaaagtattttatcattctccttttccttgcatttttttaatatatgcataaattgagattagtcccaatgaacaatttatgattgctcttctttcttggttatgatgaccaatacataatacatatgaaatgtcattaattgcacttaaaagagtactatatggacgaaccagcatctttctagttgaaggaaagttatagcatactttaaaaatgttatattgtaatgatgttataaagacatttttgtaaatcattggttaataaaaaacatgtgtactcccaatccttggttaataaaagaaaaatgtgatattgtaaatttgtaatgcaaaggatattttattaagatatataggtgctcctctaatggattacatgtgtgctctctattctctactacgaatcatctacccttccttattttgtatcaacttagctttttatattataatcccaatcacattctaaactaaagcttgattggttcgcgattaaaaatcatgaaatgaaaatttaaggtggcgtttggtaacacttttttaattagttttttatttttaaaagtggaaaagtgaaaata

SEQ ID NO: 311667 - DNA, 607 bp, Cannabis indica
ataccattgacaacagagccacaaatagcatgatcagtagtataaagagctgagaaataatcaatgattacctgatcaagccctgaattccagcctttccaaacaccatcactatcttgaagctgcacaatttgattatttcgtttacgagagcttgcggtggcatgaaaatatttgttatttttgtcccctccatttaaccaaaattgttttgaccgttgcttccattagatttcttgctgagctaaaatctcaaaataattacattgctcgctcaaaaaatcttcatgtgagtccagattgtcacttgacttgaggcttgatagttttttcttgctattagacagccacttcttgaagtgcccagtaagatcacaaccccaatcgagcaaagtttcaagacaaagcttagttttatcagcaagagagagatgagcattaacctcccaacagtttcaagacaatttgactacataaaggttcacagccccaagcattttcatagcgaaagataacaaccgctttactcataacaacaggagcaggttcaaagaaaataggagtaggatcggaaggcgaaaaaaactacaaaacttagtacaaacga

SEQ ID NO: 311668 - DNA, 1093 bp, Cannabis indica
atttggaggaagccaagaaggaggccgaacaaaagagtactcaactaagcgaggttaacaaacaactcttggccaccaaaaagcttgctgaggacttgaggaaggagatcaatgatatgtcctccactgctcaggttgaagtaaaaaatgaggctctgactaaggatgttaaatctctgaaggacgagagggaaggcctttggaaccttctttccaatttgaataaggataagaaggttttctaggagactctcgactctggacagacagaatttggtgctgagcgggagattctccagaagaaagtggaaagcttggagacggctgccttggatgtcttttctgaattttggaaggctaacctagaagcaaactttgattaactcaatgaaaacaaagaggcatatcttagtttttgttaagcccaaaaagacaaggaagaatctgaggcagccaacactaatgctccaactaaccaaggcaatgagaaccaatccactaatgacacatcttacccatataaagaaccaaggactccaggtgtttgaattttctatcttttttttttccagttcagttcaagggcccttttttaatacaatacaggtgaccaagcgacttttaaaattggaaaatattgcattttgtttcaagaaaactggctggccaggtagcttttaattctagagttatcatgctttgttaccttttgaaatgaatattttctcaagtttaaataattgcacatgtaaatatgtttgttttttcgagcttgttgttggaaatattttaccaggatctagatttactaccatgtatgtttcattaacatcctaatatgaattctaaaacaatgaaataaacacatataaagtttaggaaaccttacaatgggtgcagcggtatataatgactccttccattcagatctctagcccttgattcctttctgtagcagagcattatcaagatccgaatctggatctctttctctccttcctttgatgttgattggattctacacaatcttccacatttcactagggtatttcgaaatgaagagaagaaaagagaagagagggtggcggctatg

SEQ ID NO: 311669 - DNA, 2684 bp, Cannabis indica
aataaaaataaataataaatatgagtcggaccagtactatccgatcaaaaaaaatatgtgtttaggcactacataatacgataagttaaaaaacacgacacgtaaacataaataaattacctcaaaaacataataccttaaattattcaataatttaataacaataataaatatgtctttatcaattaaaatgacattaatatttaaattataataattataattattttttatataattatatgtaattattattgaaaacgtataaaactaattaaaattataaaatacacatatatttaagtatttggctcattaattataataaaaatataaaatatggagtacaacttctagcttgtataagaaaataggttggtctatttaagaaaaacgggtcgatcaaaataaagaaagatacaaattcgagcacgacataaaattactggacttgcgggtctagccgtgcttatcctatgaaattgttgcacggtacggcacaactcatattttttttatagcacgatacgacatatcatatatatttttatggcacggtactacatgtcttatatttttttatggtctgtattgcacgacccgtattttgaaaagcacaaaaaaatatagaccgaactagcacgacacgcacatatttagagttatgcttgtactcataattttgagactcccttcaattttttaaatgttgaattgaattagttttgttttgttagtcatttttttgaaggtttttttttttacaatgaaactaagaaagagtaatttgatttagtatgcttaaatgtaaaacataatttttaatataccactcatttttaatatattttctttcaaaaaatatccttacatttctaaaagcctctctctctctctcttactttaaactctctcatctaagtcttgtcatctctacctcgaagtcttagaatttatgagctcaaccaccctgaaatcctgaaattctcacccatcatcgaaagtaaacattattacttctttgaaaattaaaaaaataaataataacataattgtaaacaataacataaacttatataaaataaaaactataaactctcatatatatagaaaaaattatataaaaacacacggaaaacaaaaatattacctataaaacagtgtcaccttcattaacgaagtcaccatctcttattgtcacccgggatagatcctgcattttgttttggtcttctggtttatgttctggtcttttgctttggtcgtgtgtttttttcttattgtttgttgtagctcttgtgtcttaaggttgttgtttgctttttctggttctgggacttgtttcgctagcctttggttggtttgatttgctgtattttcttttcttgttttaatgaatctggtgctttcgcaccgtccttttcaaccaaaaaaaaaaaaaagtcaccatctctaacatcttgtaaaccgtcaccctaatgaataaaatggataataaatagaatgtaaataaaaataatgcaacataataaacactaaattatattaactcttttaaataaaaataagataaatataatattacgaaaaaaaagtaaccaaactgtaaacaacataacacatataaagtaaacatgaatagaacctctacaactgtagtgtctccttcattcaccaacacaccaccttcagaaccttttaaaatagggtcatgttacacacaaataattacaaatgagtaaactggaaacacacaaagaaataaaactactaaaaattgcaataacaataaaagttataaaggaacaaacgtattcacaacatacagttggacaatatttcacattttcattatccggacctacaacatcaacatcgatctttgataaattgaccctgaaaatacaaacaatcacaaaaattaaaaaatttaaaacttgcaattatataaaaaaaaaaaaactaaaattaaataaaaataaaaatcacattgacatccttctctgccaaatcaacattaacaccatatttcaaaccagatttctgcaaaaaaaaataaaaaaaaatgaataataataagactactaaaatatcaaaaaaatgattaaacactcacatcatcactattgccaccactatcatcacgaatatccaccacactttgagacgcttttaaatcatcaaacatttctttcaaatcattaattttcaagtccaagtaaaattgcaaactttcatcgatcttagaatcaatgtgtgaaatcatattcagttccaactctttggatctacacctaatatctgatgtaatatcctcaaaagaaccatcacactgtaattgcttttgaattactttttttatgtctctccttaactcacttaaaacagaaaattgtaaaccaatcgcaccacctcgatcaacatcagtatcagaatcttccttctcaataaacccaaaaccagagagattaagcattgttctctcttaatctgtagcaaatatatattcacctttcagctaccaaaaaacaacaaaaattgtaaacacaattagtaatcaataaaataaaaaaaataaactaaaatataaacaacaatatataaaaaaactaataaaaattgtaccttaggagataaaaaaaaaaaaaaactttcctctcaacaacactattattgggaagacc

SEQ ID NO: 311670 - DNA, 812 bp, Cannabis indica
aaaccaaaccatgtctgcctcttgcataaggctatctatggactaaaacaagctcctcgtgcttgtatgacacactgaaggactgcctacttcagtggggttttcatgtctctaaatctgatacatcattgtctgtgtatggaagtggaccaacactgataattttacttgtatatgtcgatgacatattagtaactggtccaaacaaagctctaatctctcagctaatcaaagatttaaacaaatccttctcattgaaggatcttggagaagtgcattattttttgggagtagaggttaatagagactccacgtgtatgtatttaactcaaactaaatacatcacggatctattggtaaaattacacatggaaagggccaagtcatgttccaatccaatcaatgcttccacaaaactttcccttcatgaaggagagttgtttgaggatcctacactctatagaagcacaattggtgctcggcaatacttacaactcactcgacctaagattgcctttgttataaacaagttaagtcaatttctcaaagctcctattgtgcttcattgggaggcttgcaaacaacttctttgatatctcaaaggcaccattggagaaggactagtactcaaacctgctgctgaattcacctaaaacagttattctgatgcagattgggcatcatgtgttgatgacagacgatccatgagtggctatgtcatattccttggcagcaatcttatctcatggtctgtaaaaaaaaacaacaggtggttgcttgctcaagtactgaaagtgagtttcgctcacttg

SEQ ID NO: 311671 - DNA, 1186 bp, Cannabis indica
tgccaaaaaaggactttacatggaccaaatttgattgtatgtaattaaaagaataattacatttgagtgttatggagttatgtaggggttataaaataatgtggatgagttaaaaacttattaaataaatatttatttcacataacaacgttggttatagggttatcttgtagaggagattcaaagttttaaattggagctgaaaaaacagttcaagcaacatgtatgtcattcttactgagtgacatgttgcctattgactacatgagaaactatctcgagtgtttaatgatattgctccagccacatgtcgcttggtgtctcttttgagataaacattgtgaaacgttaggtattcaatgggtgacgtttttccaggtttcttgacaatgttttttttacctcgattaatccctcttacacacctagtaatagtcatggagagtaggatttgaatttcaaagtttgattcacgctcactataaatagagacctagggattcatttgagaatgctagagagtttctataaaagagaacacattgctagaaactatatacacatgataaatctagaaagttatttccatatttcttcatccctaagtgtttatggtagggagaaataagttttggacaaaggtgtaaaatcttgttcaagttttggtaattttcatacttgtcacttggtgcttgtgttggaaattattttaccaggatctagatttactaacaagtatgttggattaacaccctaatatgaattctaaaacaatgaaaataaacacatataaagcttagaaaatcttaccgtgggtgtagcggaatattatgactccttccatttagatctctagcccttgattcctttctgtagtagagcataatcaagatctgaatctggatcttcttttctccttctttgatgctgaatttccatagtcttacatactatgattgagataccacttgatgtgtgtgggcactacttatcactcaaggaatttcgaaaacagagaagaaagaaagagagagagtggcggcttcatagtgtttgagaaaataaacagtaaagtgtctctcaaacctgaagcctttaccttctatttatagaataccacatagggttaaagttgaattatttggcatttaaaaatgaaaaataaaatgagaaatagaagcttagg

SEQ ID NO: 311672 - DNA, 570 bp, Cannabis indica
caaactttaaccaaaacctaaaaccattccccaaaatataacttatcaatacaaagggtttaaaacataaatccatgcattaaaattccataatataactctcaaagttcagcttaaacatcacctaagctaagctccaaacaagagcaggattcaccaagaatctaacatcaagagctcaaattttttatcaataattcacagcttcaaacaatagcaaaatcacaattgtaaactcaactagaaacacaatagaaatccacaaatcacttcaagaatactagataagcatcctacaccaaattcctaattcaaacaagcatgagaaattaagattaaaccaataataacatccatgcattcaagaacacataaagcttaaaatcaccataaccatcttcaatttcagcaataataactaagattaaacctgtaaaaacatacctcaaattcaatctaaagccaagctcaaagatcctcaaataccaagcttcaatccaagcaaattctcaagcaatttttcaatttaggactaggttagagagagagagagagagagagaggtagggt

SEQ ID NO: 311673 - DNA, 1447 bp, Cannabis indica
aactaagcggtctttacatacactgtcccaaagacccgaacacttcatgtttaactgtcttgatatgtacaatcttcatccaaccctagactcattttggttcagttctggctcctatctacacatgcacgtaataactgtgagtcaacagactcattaagaaaagcataaacataaacatataaccagatcataaccaggcgcccatacacctatttataatcctcttccgcgtctaacacgtactaagtctataacattcgtatgataaagcctaacatatattcatcaatatccaatacaattctatgtacattgataccgctcttactgatatgttgaactaatggctttagaattttcctaacatatagccgtcgatattcagtgcagctctaggtacactaataccgctcttactaatatgttatctaacatgcaactataaaacatgtacgctaaatatgtaaacatgcatatcattatactaatattacctcgattatgaatgcaagtaagtcggtaatatcctgagtgaaaactgttgctcgacgatttaagatcctaagtcacaatttatgtaaaactagtaagtgacccgaaaaatcactttcggggacttaaactcgaaactaaaagttttcttatcgatgaataacatggcaataccctaaatgtcaagaaaacacaaaaaaatgagacttcgaaaaaataccctaaataaacagcagactgtttttataaaagcagtaaaccatttttctgggcctatacttgtaaaaacggtaaactgttgatgtaaaaacggtttgccagttttgttgcaagttttccaaaaaacctcattttgaacccaaactttaaccaaactcctccaaactgtccagaacttcataattagctaaaacaaacaaaattcaacgtttattagctactgtaaacccaagaatgcaattttaccatagaagccaaagtttgagcttaaaaccttgaaataactatacaaaccaaccaataacaacataaatgaccatataattactccaaaaacaaaacataatcattcccatatcatgcagaattgaaatctcaaaaattgcatgagaaacctaactttaaccttagaattcaaaaagggagatgcttgacttgaattactttaactatacacttgaaatccttactaactcttcttatttttgctctaaaaaggatggaaatttatgttttccttggataaatctaacttaattaattatgggataattgcggcaaaagtctccaaaaacttgaggttgatgccgattagtcctcaacctcaaaaattggcggtaaaaatccctaaggtcgccatatttgtaagtccgttgatacccaatttaacagacctgttaaatactgacaataatgccacgtgtttaaagattattggtccaactcataattt

SEQ ID NO: 311674 - DNA, 1130 bp, Cannabis indica
ctcctgtggaggagagaccattctcctccacaggggtataaaagttgtttgctcaaggaagaactgaaaagagagacttcaagaaatccaagatgggacacaagtcaaattccaaaaacaaaattccaactaggaagaaatacttttactataagaaagatggacattttagaaatgaatgttacctattaaagaacaagcttaagagagataagagtaaaaaaaggtgaagcagatgttgcatctagtggctatgattcaatagatgttctagttgtctcaattaaagattcaagaggagaatggatccttgattttggctattcatttcacatgactccaaataaggatctgttcaccagctatgaagaaaactcagttggtacagttcttctaggaaacaataagacatgcaagattcttggaattggcataattgacatgaagattcatgatggcataacttgaatagtacaaaatgtgaggtatgtgcttgatctaaaaaaaaaacttgttgtcaattggtatgtttgataatcatggctatactgtaaaaatagacaatgacactctcaatatcttacaaggttctctagtggttgttagaggtaaactcaaaaatagcatgtactacatgattggaactgcagttataggaacaacatcacctactgtcaatagtgtcaacaatgacagtatagacctatggcatttgaggcttggtcatgttagtgagagaggttgttggaaatattttaccaggatctagatttactaccatgtatgtttcattaacaacctaatatgaattctaaaacaatgaaataaacacatataaagtttaggaaaccttacattcggtgcagcggaatataatgactttccgttcagatctctagccctttcgattcctttctgtagcagagcatcaccaagatttgaacctggatctctttctctccttcctttaatgctgattctccttcttgttgattggatttttcacaatcttccacactatgactactctatcactcaaggattttgaaattgaagagaggaaagaaacaatgtgcaagtcatgagtttcctaaagccaacactttctatttatagaatgccatctaggt

SEQ ID NO: 311675 - DNA, 813 bp, Cannabis indica
actatatgatgtcaatgctaaattttggcctttggcttaaacacattggctccttgggagttggacttttattaatagtttttttttttttttttttacttattatattgttcagtgagaatttacaactttgttactggtttagttatagaatctgcaattgaatgtaaattggtcggtcgagtttagagatcctaagataatgttgttagaactgtactacactataggtaagttttgtttatctttattttattgctataattattttattcttattttttttggttatttgaaattcttatatccgtctcctcaaaatagaaattaaaaagaaaaatctgagaaattccaattttatatacaaatattttgtacccaacaaaggccaattgacatttttactaccaactaccaagcatgtcattgtcaccaccaacaaaactccaaattataatatagaaaccaagtgtgtcaagttggagaaataattttacacttgtggagtttccataatcataaaatatatatcttattttctcttggatataaaataaatgacaactatttctgcttgtagggaatcacctgataatgtcattttccaaataaaaaactttctaatttcttttaattagaattaattgatgtaccatttaattataagattttcaaattgaagagttcgatacctcgtcagattttaaatttaatttagaatttttcctcattattatagcattattaagtcctgctaaatactggactgagtggtgtaaggacccatttttttttctctattattattatttt

SEQ ID NO: 311676 - DNA, 861 bp, Cannabis indica
taacttgggaggaagatgaattagatcctaagagttgggatagaaaaaatgattggcatggagccatgtagacatgatcggaatcaacccaaacatcatatgccatgccttaaatattgataaaaattcaaacccattctgccagagaagactgttgtatctgattcgagcaaaagccgtaaaggtgtaagtcaagaaattaacctcttttgagttcctctaggaagctctatatcctgtttggctagaaaatatagtgatggtcccaaaaaagccaaagagaacttggagaacttgcattgactttggagaaatattgtatatgcagttcaaagatcatttaaatgaacttagaattataatcgaacttaccaccttagaattttttagttgcatattgataaaatgattaggtttatgattagttactagcaattgacaaagttcttctagggatatgactttaagatagtaaacgatattttaaatgtcatcccgtctaagtctgatcttggtaaaaccttagaatgagataatggttaagtacttagtgtataccattattaaatctagggatgccctgatcatatctttaagaaaagatagaattacattcatttaaagcgatatgtaattaaaccccatgatttcagggggtaatcgttgtaaaaatatcaatcaaccctgtaattaactgcctactatgtgattataaatagaggcaaaatagactgcaaaagggacgaaaaaatataaggaaaaggccctgaaaaaccaccagaaatctaataagattgactcttggactatacagaattttaactgaaaaaccacgtaaaaaatcctttgtgttcatacttt

SEQ ID NO: 311677 - DNA, 892 bp, Cannabis indica
tactttcaaaaaagaaaaagaattaaaaattgtcaaatggttacttcaaatagtgtctaaactttcttgcattcttcccttatttggtatgtgagcactaaatgataactttcgttttgaaagagtagcctaactattagtttgaccatttataggagaatatatacattgtatcatacacttatacacatgcatatatataattatataaaagaagaaaaggtctacacgtatagcactattgaggctaaataagaagaattttgtgtttttgagaaacataagcagcatttgtactcatcgtgaaaatttctgtgtgaacccacagttttaatttacttgtttaatctttataggtttttgaacaagtttatactttatagttgcttcaatagaaaaagtacaccctttattttttttttttcttcattaagattgaactatataatataaccaaaatatacaactaccatagaaatgacaaaatgagaattgttattggggattatttgtgtttttgatataacactactagtacattatgttataattagtctaatttaatatttgatctaaattattttcaaaaaaaatatttgatctaaatttaatgtattttatgttgaattaaaatatgtgaaatttaaaattaaattacaatctgtattaagaaaatgatttcactgttgaccataatggtagaaatgcttatgaaaacatatcagtatttaaattttgcaatttaccaacaacatgtaagaataatgtaggaagaacaaaaaacaatcactactacaaaaacaccctttagaggcggtttttaagccctttaggcgtcggttttcgcgaaattcgctaccgacgcctatcagggcgacgctaaagggtttat

SEQ ID NO: 311678 - DNA, 1474 bp, Cannabis indica
attgtaaaaataatatcattacgctacactcaaaaaaatactgtccttacttgtcttaatcagggtactgatttttctgctgttaataccacactcatttttctgattcctaagaagcagcatgctcacaccttcaaggactttaagcccataagcctttgtacaactttctataaggtcatttctaaagtcttggctaatcgtttaaaacttattttcgataaaattatttctccttttcaaagtgccttagtatctggtagagtcatctttgacaatattctcactgcccaagaaattgtgcatgccatcaattctaggaaaagtggtaagactagttgggctgctctcaaacttgacatggccaaaacttttgatcatgtcgattggcattatttagagagtgttatgttccatttcaatttttcccctaaatttgttactcttttaatgaagtgcattactactactacactctcatttttgataaatggctctgttagtggttctcttaaatcttctaggggtcttaggcaaggggatcctctatctccctatctttttatcctttgtgcggaaggattgtcctctcttctcagggtcaaacaggatgtaggtttgcttaatggaattgttgtttctaggtttgctccttctatttcccatttattttttgcggatgacagtcttatcttttgtgctgccaatcgaaattcctgttctgctctttaggaagtctttaatatttactctagggcctcgggtcaggttattaacttctcaaagtcctctattcttttctctcctaacactcagccagatattcacactctttttttcaatactttcaatcttggagataaaccctttatctgtaaatatttgagtcttcctcaatgtctatctagatctaagtatcattattttgttttcttaaaagataaagttaattttgtgcttaggagttggtttgctaagtgtttttctcgggctgacaaggaggtcttgctgaaggcaatcattcaggccattcctacctatgctatggcctgcttctgtttgtcggttaaattgtgtaagggtattgaagctgtgatggccagattttggtggggatccaccgggaactctaaaaaaatccattagaaatcttagaaatttttgtgtcagtccaaattttttggggggatgggttttcgttctttaattcattttaaccaagccatgcttgctaaataagcttggaggatttttaagaaccccacttctcttcttgctttagttctcaaggtcagatatttttcccgtacctcttttcttgaagctaaacctggccataacccctctttcacttggagaagcattttatgggggaaggacttgttaagttcgggtctgatatggaagtgttgtgtaccgaaagtggtacgttttacatttatcaactcgcaagcgcacgaatctttattgtagt

SEQ ID NO: 311679 - DNA, 1223 bp, Cannabis indica
aaggactcgtagagtatgtagattttaactacaaaattacgtaaaatcgcactctttgacaataaaattatatttatagaatactttctagtagttcttgatataatcaatataagcagtttgcccttaaattattagttcataattagtgttggtcaaaatatcgttttactcttctaattatttcttgattcattatgtaccattaatttaatgtgaacaattaatctataatttattatagatttggatccaattgttagcactcccagaattaacactataagaaaactaatattcgatccgttaagaaaacttggattctactattgtataacatgtttccaaccactcatgttattaagctcccaaaataaaaagttgtaagaatcatcttcttagagaaattttaacgagtaaatcaaagaactcaatgatcatgagttcatgtatactccggattcaagttgatctactaatgatcatcattatgatatgataaactcttttcatggtaaaaaacatattaatgaaagatgtttataacatattggcacagtcatgcataatcgaattatacacacctttactacatgtctatccacatatgtgacccgaattaaaaccatacacgctagaagtatagtgtatggtaaaccgtatttagcagtttcatattaaagattcttattactttaatacaccaaattagcttaccaaactggatatagggctttccgaaggaactctacagaggtaaatttttcaacttctgccttcactgtttcagcccaaaccaaatctattggtctttgcttctgacggattggatatgcattttcgtcaatgttcagagcatggcagataacgtggggactaatcccgatcatgttagaatggcaccatgccaggacgtcatgattttcctttactgtggatacaattttttctttgatggccggaggcagattttgtcctaccttgatgactttggtagaatcttctttatcaatacatacttcttctatctcctccattgactcaattattctttctacccccactcggggttctaattcatctttctccctgattatccccaatgttggatggacaagtgctccaggagcttcttcttgattcttttcatggatgataaatattgaggggttccaattacactctccaattctcatggcccctcatgagaattgaatgtaatt

SEQ ID NO: 311680 - DNA, 1301 bp, Cannabis indica
gtgacatttcttgtagtggatattctgcgatatgagtgatcataggagtcacttagtccaagtaatgataattttagtgacacttatgtgataattaggcgatgtacattagatattgtttgcaatttttatgcataaacttgccactatgcttaagcgagtttaagcgacgtttgtgcgatttgtgtgcgatatatacatgctattaagtgacacttatgcactttgtgtgcaatatatacatcttgtttacgacataattaaagtaataatcatctttttttaaaatgttgatgactcccgaactcattctctcattgtcagataatttttcagggtgtatcacttacaaagggaatgggtactttaattcaataaaggctaagttcaaagctttaagttgaccgacaaggtcaaggagactcgctttggagttttttcgtaatgccagtaattttaaattttctggggtgattgtgcatcaactgttattgaagaaaaagatctattagctatgtgcaatttcagttatctgagtcgaagatctattagctgacttgggaagcaaattcagttatctgagtcgaagatctattagctatgtgcaatttttaaaaaaatcttcttaaatctgtgtaatttgttggaccttgaagcactcatcaaaatttgttgtattttatacaaaattcatcttttttaaatttttatttcactttctattaaactttgtaatggattcaattttgtttcatttttttttttgaagtattgtgtaatttaattatgtacacatgtcattgctagttaaaacttctttttagaagtatgaacttttttttatttactgttttctatttgtttcaattttttagagtttgggtaagatttgttattggtttgtattgaattgatttattcataacaaaaaatagaacaatttcttttttttttcaataatattatcaaactaacaagagatgtaacacaaaaaaaaaaaatacaagatatattattgtataaaaaaatagagaatactcctaattgaattaatagagaagtagtcactactacaaaattggactttggaggcggtttttaaggcctttcagcgtcagttttggcgaaattcactaccgacgctgattcgggagacgctaaaggggtatgaaataaccgtcgccatagggaccctatggcgtcggttatttcatagggaccctatggagtcgggttttataaaataaccgactccataggggtttcctaaaaaaaaaatcagctttaattaatataatttt

SEQ ID NO: 311681 - DNA, 797 bp, Cannabis indica
aaagaaaagaaaaagggtataagaaaaatatacagtaagaaaaggtatttaaggaaaaaaaaaattaaataaaataataaacgcgaaataaataattaaaaacaaatgaagaaaaaagttttgtggaaggtaagaaaaaaaaaatgaagtaatgtgatgtgattgaaaataatatgatttttaaaatactgtttattattaaacatactataaattcaatttgtatgaaaaagtagaggtcttatttatgtttaatataatgcaaaacacacctttcaattaaaaataaaaagagccaacaacctctaaccacgtttatatattaaaaaagaaaaataaaagacaatgaccgatgctgagtagaaacgtttaagaaaatgaccaaatctcatattgataatcataattatcgagtataaaggtcaaaattaagactgtttcaaaaaaaaaaggtcaaaattaagaaaaaagatgaaccaattcgtaagtagctctgtaacaaaagtataacacaagcaagaatacaacacctaaagatagctagcaagaaagttaatctaaagcttaaacacacacataaaatgttgaaaatgtctcaattgcattgcatttatattcgttggtaagctgacatgaataataacataatttacatatctgttttagcaggattttggtaaattaaatactactagataatatcgttaagtgaaaagtgccattccctcaagtggcagttgccagttaggccaaggaaaaagaaaaaaggtttattaagaaaattcaagttgagaaaa

SEQ ID NO: 311682 - DNA, 2058 bp, Cannabis indica
tttcattgtacatgtttcattctgttatgggcatccattaatttataatactcatatgtctattctgcgatcaagtaaattagaaaaatttctctaaatgaatcttgaagaagaaatattcaagtcttccttttagattttaagcaaaaaaaaaagtgtcttctatcaagattagttatacacatcagttagttaatggttagtagactagctgacttgtttagagttgccttttgtaactaatttgtaactgtttgtagttacttgtttgagcttaaacttgagctatatatatagctcactcattgtattcatttcaatctaattcaatactgatttgtgtcacacttttcttctttttctgttacggtattagagccacgatcatagtgtgctcatctctttcttctcttcttctttcatctccttcagttgttcttctctgcttttgtccatggctcaaggagatgctcaaactcgaagcacatcgaaccaaggagatggttttgatgattctaacagggatgaattaaatagatcctctattcttgaactcggtggcagatcgtttattgatgatgctcgaaagtcatacttcatctttaatggagataacccacgagcaagtttagtccccaagattctgactgctgtgagaattacagtgcttggagacgttacggtggacctcattgctagttacaagatcaaattcatggagggaagattgccaaaacatgatgctaatgatgaagagtatgatctatgctacagatgcaacaatctagtaatttcatggatatttcatgctatgtcaactgaaattgctgacgacataatgtatctagacagtgcggtaaagatctagccttacgaatccgctaaccaagcaacacgcttcggcgagtcctccgtgatatcaccaagaatgacaacacggacgatccctttaatttcttgatggcctgtccgtaagtcaaagacacagtatgaacctctgggggaaggttgtaagctcacgatactttcaagttccgagagtttgagggtaaatgttatccttttcctagatgggttttacttgaaagctgcggaagggtgccacgtcaaatcatatacgatatcatggacccttttttttagaggatcacggaagatattgaagtattcagaagaatgttttccttgcaaaggacaaaatgattctcgaagttctaatctggtgcttccgctatttgaatgcaaatgggaagcacgagcactccgggatgatcaggaatcgactatcctaagaagcccttggctggacttcctagaagctccctatgacctaattcgaaactacacccgactgttacgccttgtctgacaccaagttagatcctgcccctacgtcagattgtggttgtgagcgtacgtacctttgtagtgcttgttgtccaacgacttgtctaggcaattacttttaaaggagatacctttgaaagacacatgttcatatctttacgtggtatcctacaccatacgatggaagagctgcctaccaaaccagcggttagatggtcttgtgatgctttcaacctttcttgcgtgtggagtaagaaaccctagctacgtaaagggtgtccttacccacttatgtacctataaatacctctattttttatgtacagaaggtgaataatttttacttacaaaacctctgctaaaattcctagagagctttcttctcaaagacaaacaaaaggaatatagagattaccattgtaaacatttgtaatactcaaatacttgccaaagaaggctaatacaactaactcgtggactaagaatcattaacgcctggaccacgtaaaaatttgtttgtctattatttaatactttgcatttccttaagttcttattaatccgttttcaaaaatctcagtaaacagttagaaataataaattgaagtatagtaaattggagtttttgtattttcacactttaaaaaagttttttttttttttttactagaattatacataacaacctacataacaactaatggagcaact

SEQ ID NO: 311683 - DNA, 1984 bp, Cannabis indica
agtgtaatctgttagcttttccatctctattacttccaaaacccaattcattgacttttctttcattttctcaattagattcagtcctgctcttctagctgaaatctgaagctggtgataatcctcaacatgactcattaacactgagatcaaaacctcttctatatacttccatagtttttcaacaaaagctataggaatggttgaaattccgttgacttttgactgaagaagtgacaaaaaagctgttcttggaagaaaattaggcaaagagatctctttagcttcttctaaacactcaaattcctccattaaaaactttctcttgggatcactctcaggacattcattaagctcatcagagaaagtattcaacatctcaaccaacctagctgtacaatgcatgttcttctcaccagggtactcatgaaactcacctctgagaaggattttccttagtgattccttaactgaaccagttattctcatgaaagttgttaaggcttcagcagttgaagaaatcgacttgggaagctttcgaaactcggaaagactcttgtttaacttgtcattgattttcttatcaatgtcaggtaagtttctgtcaatactcttggcttgaatcctcataagtttctgagccaaaacaggaattcccacaatagatttatccattttcgaaagcaaaggatgagtttcgaaaagcttagtttcttcatctctagcttccatataagattcatcaccaattctgttcctaacacagacataaccaagtccaatattaacatcatcagcagttaccttctccaaaggcccttctggagatttatcagatttggtcacaacagccagagtcctctcccctgttttgtcaacgatctgagacattctaattgactcacaagtaggaaagtcaacagttgcagacaacacattcaatataatacttgcttcaggctcaatatactccattataatatctttaatctcatcataaatattctcaggctgaccttgaactggaactctagtaatcccaggaaggtcaaccatggtcaaatcaggaacccctttctttttcacaacgagagtcaaaggggttttagatattcccttaccatttccggctatgacgtcagtagcggcggttatagctccggcgaggtgctgttcgtcggtgtgaaccactctgtttttgtactccaaataaagctctgcctctggctctgtgtggttctgtaatctgaccacgagtgggactctggtgcagattccttgtccacgtggcaggctgatacgtgctaaggactcaagcactgatgacttgccggaagactggtcgccgacgaccacgatggtcggaagctgtactccttcttccataacagcgagtgttctgagcttgtccactgcgtcgagaagaggacgaatgtggtcgttgtaagaagaaacgatcggagccatgagaggaggaggaggaggaggagggacttggttgtgattctgaacaacttcgtctgaggtggtctgatcatggtcgatatcagtggaagatgattttgtgtctgagtagtaagtagtctgtttttcaaagcttcccattttgttttttgggtctgagattaaaatgatgaaatatgatatatcggatgaagaaaatgagtaaagttgcagagatggtattgttggtgatgattagggttttaatggaattataaaggaagaaggtgtagactgtaattttaagttggatacttcgacgaaagtgaaaaagagtttcagtgagattccatttacgttgtacggatagggacccgcacatgtatgcattgacgtgaagcattgaccataattgtactaaaaattaagatgattgttagagcatcactattacaaatttagaggatgattatgatgagagttagggcaactaaatgatattattttaacagtattttttttttaattccaaccacaacac

SEQ ID NO: 311684 - DNA, 2026 bp, Cannabis indica
atttgtatgcttttttcactttttctttgttgttcttttgagtaccaagtagagtttcttatttttcatggccttgcatgctatcatctttatttttgtcatttctttaatataattttttttcattaaatgcaatgccattcgaccttttggaggaatataatagtctatttatatataaattacatttaatcttcttgtgtttttattctagcttcagttgcatatagaaaccctaaaatttgttatcttcatcatcggagggaagaaagccagcagaaaatgctccatccgttccccatctccaattatcaatgggcctgagtctttttctcgatcatctaaaaaggcaatgactgctgggaattatgccctaaaagcaagtaattaatagataatatattagagaatacatgaaatacaattataagataaataatatattaattataagagtataatgattaaatatctgaaaattcattattcatatggagagggtataatcttgtaaggatgtacaagagaattaagagtatacgatatgaataaaacaagtcggtagtgtattaaagttctgtgaatctttaatatggaattgctaagtacggtttactatgcactatagtacttctagtgtgtgtgattttgattcgaatgacatatgtagatagacatgtagtaaatgtactacgtataatcagattatgcataactaaaccaatatgtaataaacatctttcattaacttatcgtttacaatgaaaagagttattcatatcacaatgatgatcattagtaaatcagcctaagtcggttgtgtattgaagttctgggaatctttaagatgaaactgctaagtacagctcactatgcactatagtacttctagtgtgtgtgattttaattcgaatcacatatgtggatagatatgtagtaaatgtactgtgtataatcagattatgcatgactagaccgatatataataaacatctttcattaacttatcgtaaattcactataaaaagagttattcatatcacaaggatgatcactagtatatcagcctgaatcttgagtatacataaactcttatttgtgttcattgagttctttgatttactcgttaaattttatcagagaagatgattattaccaattttgttttgagagcttaataacatgagtggctagaaaaatattatacaaaagttaaatctaagctttcctagcatatcgaatattagttatttgatagtgttaattctgtgagtgctaacagttggatccaaatctataatgagttatagatagctgttcacattgaatttatggtacctaaagaatgaagagataattggaagggtaaaatgatattttgaccaactctaattatgaactaataattgaagtgcaaactacttatatccatcaatggattacgtaagaattctgtaaatataattttatattgtcaaagagtacaattttatatttatagtagagtaataatggaatcaataaaccagattattctattgatgagattggtaataatcttgagtttattggagctttgaaatataggtccatggtccccgagtcacctatatacaacaccatataggggaaggctttatttgatgaatgaatttcgagtgagaattaatttctatgagaaataaattcttaagggcaaaatagtaatttttgaaattattgttttgattaattatgataattattaattgtataatatattaacagtagttaactatttagtgatgtaagggtaggggcaaagaaaagacaaggatccattaatggccattgctttgagggcttgacggagaagtaggggcaaaaagtgattacaactaaaacttgaactttcccaatcaaaactaaaacttgaacttaattgaaataagacaaagaaacttaattcaataatggatggataatggatctttatttaataggagtagtcagtagtacacaatagaatgagcccaagattacaact

SEQ ID NO: 311685 - DNA, 765 bp, Cannabis indica
ttttttattaatatataaaaaaaaaagtatttatcaagtacttatccctaattataattagtctccattaattaaggttaacgtaatattcttatattctttaaatattaataccaacaataaaaatggttagatagccacattcaatatattaaagatatatataatattatttataaataatataacaaaccctggcgacactagctagattaaatattatctatttagtacgtaataatttttgtaatatttattaaattaatcaaaaatattatattaaaattttagattaggaaaacaatatattaattttgagaatatataagagcttatgacctcaatttattaaaaacctgaggaacaattacaaaacaaattaataacaataagagtagaagaatgggaaaggaataataacagaaaaccaaataaaaacatagtttccaaagtgttttggtaactagaaacatttattacaaataataaaaacattactttagtaattaagtaatgtagatgtgataatttcatggtggggtaagtttaccatattattttatataaagcctatatatagaacttgatgaagtactggttgagacttgagagcagtacataaagcttagaatttgatttgttgaacgtaagattttccatgcataataagcttacgtgaattaaatatacccttgacgtagtattctttactggtgagtgttttgtatagggcaggattttgttgagtgatcaagctgtgtgctg

SEQ ID NO: 311686 - DNA, 784 bp, Cannabis indica
ttttttaagcattaaaaatgaaatttcccttaacatatcatgtgaataatttttgttttcaccatgtagtacctataactattaccacattttaaacctcctaattaattataactctcgggtcttataagtttataacttatcatttttcaccttaaatatatataatatatagttttttaatacaataataatatttattataattacaatttcatctataataatttattatattagaaaaaagtttcataaacccaatgtatcatacaccttaactagccaaactatgaatatttttattttttacttaataaaaaatgtttttaatttttttattttaggctttcaaaaagtgtaagtcctaagtatgaatttaacccgcttacctaaggccgatcctgaatataatagttgtatcatggtacgtgccaaaaaaaacatcttcacatgcatgcatgcatgcagaaactaataaaaatttgtacgtatatatatatagtacaattacatatatagcttcgagaattgtgtatatatagtattgaccacgagccttaatatgacatgtatgtcggtttgatttatttgccgaccatatgcaacaccctcaaattataattaatagttatattcttatatttatataacaaaatctgtaaattctacattatattatatatagtttattgaggatttttatttacaccatataataataataataataataataataataataataataataatatttatttttatatacatttattttttt

SEQ ID NO: 311687 - DNA, 553 bp, Cannabis indica
ctgatcaagtttacagtacggtaatgatatctcctcagttggccttagatatggttaattcaaatatcgagttcgtggttggaaagctacataatctgacacttcagtcagatctattagaaagaattagaatggcgtagttggaggatcctgagttaatcaagactcaagaggaagtactagcaggtaaagctaaggaattcatgatctcagatagtgggatgttgttatttaagactcgattatgtgttttaaataatgtcgagcatagaaaagagataatggatgaggcacacactacgccttatctgttgcatccaagtaccgccaagatgtatcatgatcttaagcttcattattggtggtacgggctcaagaaagatgtgcttgagtatgtgactagatgcttgacctgtcaacaaattaaagccgagcatcagagacctgcagggttgcttcaacctctaacacttcctgaatggaagtcggaggatattgcgatggatttcgtggttgggtgcctaaaaccacgggaatgtatgactcagtatgg

SEQ ID NO: 311688 - DNA, 523 bp, Cannabis indica
tttttttgaatttttctcgtacaataatatttttgagaaaaaaaattatatttttaccaacttatacttcaaaaatcataaatataataattaaagtaattatacagtttgatgtgtttgtctagtcacgtaattacactaattatgtaatttgaggtaattacgagaccttaattattctttctaattctcatactctaataattacactacacagtaattacacagttacttccaaacacactcttaaaattcacttttatgaatatagactaaaaaaatacatatacaccacatttataactacttataacactcgagatgttctaatttgtaaaaccactaagactagctcagtgttgagggagagatgaaaaaatggagaagttatagcttcgaactcaaaacctttaactattaaactattaattaattataaaatactattacgctacactaaaaaaagatgttactatttgcaagtaaaaaaaaaagactaattaagatttttgtcttctgaact

SEQ ID NO: 311689 - DNA, 1254 bp, Cannabis indica
actgagccgacaataggtataatcaagccagccttaatatcatccttttcatctgtaaccaccactcccagactatgcttcctagcagtactactaacacccgcatccgtattaactctccatccttcatgctgtgatgattgaacctgctcattatatctgaaattgacactgtctggcttaaaacctggaaggttagcatgctcatactccaatagataactcacaacctgatcataaagatgccagggtggcagcaacttcttattatggaaaagattatttctatgattccaaagtaaccagataaaacaaacaaatatgtcaactaattttataaattactaaaaattatttgtaaattcatattaaagctaccatatggtatgtacgtactttatataagcttattttatagagttattttcaataaatatctaaaaacaatcaatttgtgaagaaactaaatcatatcttaaatattatacaataattatactacagaaaaaaaaaattatactcatatatttcttatactaattaattatttggtagttttttttttatattttattgtaactccttaattatattggaaggtaacgtgaaagttgctataaagaaattaaaaaataaataacgtaaatgtatcttgatcaataacgtaaatgtatcttgatcaataacattatataactttaaaatgaaactatagtttaaaaattaattaaataggtaacaaaaacacatatgggataatataaccttaaaatggagcttattaaaaatttaaaacaaaaccaaactaatgtcttagtgttttttttttaattatataactaaattaaaatattttattttggttaattaaatataaaataaactaaaagattacttttaatttggaatgacttatttgataatggtaaaaaaaacatatacttcccacatactaaaatataggtcaagatagtacttttcttaaattgaaaccattaatgatgtagttggttataattcttttttaaaagcatgataaaaatggattttagaaaaaaaaaattaagttttttatgatacaaactaagagagaaaagaatgtactcaaagaaaaaaaaaatggtgctgaaaaaaaaaataaaagtgactaagaatgtgggagaagcttaagaatcgtagatctctatctactattttggaagtgaaaaactgtgtttttgcaaatgtcagttgtatataagaaaatataaaaac

SEQ ID NO: 311690 - DNA, 1627 bp, Cannabis indica
ctctttctctgtagcctagccaactaattgttttttttttttaaagtagccttcttttggctactgtttacgcttaaatgataggaaattcctaccaaatagtattagagcatgatcatgtggcctccgtcatggcgtcgagattcccactctccccgtatggtggggttcttcgcacagaagaatatttttagatttatcaaaccccagagagtaataaggtagttgtggctcaagcgtgtttggaggatgttgcctggagatggtttcaagcagtggaagaacaagattcaatcgaaaattggttggaattccacataatgttattcaactgctgcccgaaaattgttgacgatcctttcgatgaattaatggctcttcgatatgataattcagtgctggagttctgcattcagttcattccggttgcagagaaatttttggatatccctgaaaccttcctttgtgatatatttattaggaatcttccagcggaggtgaattgatggttctccgatatgataattcagtgctggagttctgcatttggtttattccgattgcagcaaaattgtcgaatatccccgaaaccttcctttgtgatatatttattaggaatcttccagcggaggtgaagacgaatgtgcgtggatataagctgaggacacttcccgatgtcatcagcaaggcattctcagttgaaatacaattgaggtttcaacatcaaactagcacacaggaggaagagttgcagaatgatagggaacgacttgttgatcttcttgtttctccaacaaaaatggtgaaaatcaagggattgagtaatggcttccaatcaaaaatgctctctgaaaaagaagcagcgaacatatcaagcaattgatccaatcaaacgatgaagcttgcattgtcacagacgaagatcggtctcccagtgttggacacgatgccggggatgaccggtgttgtacaaagagaagtcgagctagattgttccacttgaaattcctcaagctcagcaaggggatgctatgtggccagaaagcaacccaccgctgctgtcaaaggtggctcacaagctctttgatcatggaaagcacgaccagcaagttgtgaacgccgttactaatggtacaacacgatttctgatcccgatttggggtcgagtacgctaccgacttatgggatccaggtatgaaggaaggcccattaaacattactcagattccaataattcatttaggtcaaatgtctatggtttgggatcctagaagtagtacgacttcaccctctgggtatcgcaagaaggaggtgcaattggcttactgcacctctgcaccggcaacagaaaagaaggtaagggtggccggaggacaactttcgcgttcagatatggtgttcatcgacaaaggaaatacaccactgttcgttggacttttgatagaggagaaaagttacttttcaaaagtatccttcatggccaagtttgcacaacaccatttgggtaaggtatttcaaatggcttaaggctagatctccaattgctttcatgttttcaatttggcgtgggaatttttttttttttttgacaaagtgatctaaatcactcatgaatttacgacgccca

SEQ ID NO: 311691 - DNA, 929 bp, Cannabis indica
ttttttagcgacggtccccgaaaaaaactacgtttttaggtaccgtcgcaaattctgatatttgtagtagtgattttaagtttattcagatctaatttaattataaaaaaaagtaaacgttagtgaatttgctatcattatactaagtgatgatcaattatctttgaagatctaagaaatcctgaaattaaataaagtgaaagtagttaaacaataaaaaatgaatttctcttttttttcaattgacttaatcgattaataattgattgagaaatttacagttcatgattttaagccaaatcacaatattggaacatacataaggaaaagccatatgcatctcaatattattaatttgaactagtttattgttcctgcaaaagaaaaacaaaataaatattcttataaattaattatttgaactagtttatatatactatttattaatttcaactatttattaattgtgatccatttttcaaaatattcgcttccaaattattattattattattattattaataactactagccattaacaaaataaataaataaaatatttaaattaactaaaatgtatcatataatctatttttcctttatagggaatcatagatctctattaggatattactatttagatacaatagctcaaattcaattaatctaagtcaatttgcacgatctaatctagtgaatatctgcatttttacggaaattgaattggaaaatccgtacttgtgcggattaaatgttgattgatatgtaaaagtaaccaattcaattcaatccacatatttataaaaataaataaaaaaattatatatacaaataatattttaatgtaaaaatttaaaagtttaatacatataattatataattatatttcaaaacttaatagatcacatgtatatttcattcttatat

SEQ ID NO: 311692 - DNA, 1256 bp, Cannabis indica
ttttataaatatgtgtagattagattagattggttacttttatatgtcaatcaacatttaatctgcacaagtgcggattttgaattttttaatccaatctaatcgcacaagtacggatatccacactttgcggattcgattggattggatcgtgcgaattagattggatcaactattttatggacacccctatgttatactaccacaataaagtgtcttagtataattagttaacaatattgagtttattaaagtaaaatcattagatttattaaagtaaaataagtaagacttgatattgagttgtaccaatagtaatattacactttataaaagtattaaacaccataaataccctttaacatttctcaaaattaaaagggcaaaccaattaatttaggtctcattgatatgtgattcaaaaattatattttcaaaaaagatttttggaaacataaatttaatttttttatattaaaaattgtttctaagaatgtggttggtaataaattattgaatttatttttaataaattttttaaaattgtgattgggtgataatatcaaaataaaaaaagtacgagaatatttgaaaaaaatttgaattcaatgatttgaaaacatagaaaacataaaattattcttttcatttgtttaagggttaatatcatgttagaccatgtgttttacaaaaattactgatagattctctattttgataaatgataaattagaccctatattttttaaaatagtactctgaactgattttatgtcaaaataaaacttaataataacccgatctagatatattatgacaaaaatacttacgtttactgtatttgttcgtgttaagaattgtcttcaagttggttatattaaaaaaaattatcaaaaattgaacttagagtactatttatactattttagaaaatatagagtctattttatcatttaataaaatataaggttcaatcaataacttttacaaaataaaaggttcataatagtattaactatttttttaacctaaaacttaagaatataatcatattcagatttagagtgcgtttggaaatctaataagaaattgtatttgagtgtaattggaggtaattatttgtgggtttttttcattaaatgtacaacaaaacaaaataattacaaaaaatagtgcaaaaaaaaataatttgaaaaatttatacatttgaaacttattacataaaccatacatttaattcattaataatataaatc

SEQ ID NO: 311693 - DNA, 1014 bp, Cannabis indica
tgcatcatgtatattatatatattgaacaattaattaataacccacttgagctagcatataaagggttgatgatttgtctttaattatcagagtgatggctatagaagcacaggttgtaaaattttgattgtcccggtttgtacaagtaagcagaatggctgctataggttctgtattggagcctatttccaattatgacgggaagcaaatctttataaatgttacaatagaccaggtatttacatatatatatatatatatagataatttctacgatactcttcttttttaaaaaaaaaaatatcaaaatgagtaacaacatatgcgtatatattgtataaattttggatattgggtaatgcatgcatgcagcataaggagagtggagaatggtggctgacatttcaaaatgaggcaataggttattggccaaattccatattcacgaggcttggtaatggtgccaacagcctgtgttggggtggagaaattgttaacgacgagcccaatggtcatcactcggaaactcagatggggagtggtcattttcctgacgaaggctacactaaatcaagttgttttactaatgtaattgtaggaattttgagataggattttactatcttgccccctacaccaacaaacaaaaccaatcaagtataaggtcaatttcgacctttccctgttcaatgacttttcaaagtcagagaacccaaaacgacagcgttttgtgtttgaacaaaacccaaggctcgagaatcttctcagccactttctctctttctctgtcttcacttcgaaaccctagcagagagtttctctctgagaaactcgaagctaggtttcaatctacccagaaaatcaagccccaaacactatacacagatcagatctacaatgatctgatctgtacacacccacacacacaaatagaaaagaattagggatagaaaacaccagaaatttcccgaagttcaccaataaaattggctacgtctccgtttgagctgctc

SEQ ID NO: 311694 - DNA, 940 bp, Cannabis indica
ctaaagatgatattccataaacaattattacattagatcatgatagacactcgatacttaattgcacaaatataatacattagatagttctaagcaccactgctactaagtatcttttcacatttttccattttcctacatgtgcatgagtaacaagttatttatattgataaaacttttcataaacctcatacgtacctactcatagtgaattgcagcaattttctcaatagtaatggttctcaatggctcagagatcatggaagctcgagtcctagtagacaattcttgcgccactaaatgcatggtaggtcgtgactctggtctacttctggtacatgataatgccaagctcactactaacaccacaaccattgataatctcccggtaggaggtaacaaccgttggtctagtacatctttcaataacatattatctgataaagtttttgtctgagaagataataaagattccaacagttctcttgggtgttttcccatcataatttccaaagctactactccaaaactgtacacgtcacacttttcagtgacacgcatagtcaaagccaactctgcacaataaaacaagtcttttaaaaatgttcatacatgcagaaataataagagaaatgttaaaaggcatcaaattgcctaacaccgtcaatgaggtgtgaaactgttattgttgtaattcagtatcaagtcgaaaatattttaattaataatgagtaaaataataatacctggggccatgtagccgtaggatccagctacatttgtccaaacgggcgagtcagggatcaacaatcgtgctgtaccaaagtctgacagtatcggaacaaaatctgagctgagtagtacattgttcaaggacacatcgcgatggacaattggtggagaacaatcgtggtgcaagtatgagattgcatgagccaat

SEQ ID NO: 311695 - DNA, 3773 bp, Cannabis indica
taaaataattccaacaatacttagttagtataatgtatattgtacgcttagtgttctaatttccaacgcatgtcgtcaacacctttttatacgtagcgactttgatgcctcgcttacgcattatcgatgtcatcctgtcgatcatgtcttctgacgcgaaatggtttctcatcaatacgtgaattaatagcttgtacatccttgtctcccgtatgactatacagtcagcgagttatagatatgttctatcaactctgcatttaatgagttatgcctttagcatcttttaatataattaccattatatttgttgattcgtattctccaaggttgacgcgtgtcatcctctgaagtgctagccgaatttcagtataacaatttccccttaaaaattccttttcagtgaaaagttctttttaaatgattacgaagggtttttttttttttatcaaaatccattttgaaagaacacatgtcctttgattttggcgattttgtggtttcaaggcacatcatgagcattaattaaccatcttttccactttttccttatttctacccgttggatcaattatctccttaaactgacagagattaaccaaatggtataaaacgagaaaagaaaccacctttcatcatctttgccatttcaaaaactttggaaatttttctgcaaaaaacttcacccagatttctttgaagccttgcatgccatctttgtctttgacattcttcttgcgagtttcattcaatttgatttttgacctctagcattcagagagattagcatgttgttcgttccatcgttgtttgtggaaccgttcattgcgccaaaactcgacttcaaacagtaagtgattcatctctctctgttttcttatatgcttttatttcacatttttgggtttggtaactagtttcttagtttgcacctttatcattttatctggttttagagatttagggttgaatcatttctgggtaaattttaggctttaggcataccgtagaattttgggtttctcaaatttaccagcttctggtatgataaatttcctccaagaattgggattgctttctttttgtaacaatgtcccaatcttgttaagaagtttatcgtttagaaattttataaacagtgcctcagtgaacttgccatcctgtataaacccagtatttcaaaacctaaatccaaattagagataaatgatgcaaaaattaaggaccactttgtaaaaacccaccgagacgatattgctagtcgccacagacgcttcttgcaagaaattatagaaggcaaatgtcgtttcttgcgagatgctgcttggcctgaaccccccagtttgtcatctattcctttggctaggcctttaattttacccagagtcacgattgcttttgaaccaggtgacctgtattttgaaatcatgacttccaagccacgtaaatcaaagactccccaagaccctaatgtcacctttgaggctgaactaatcgagtcgaaggttcgagccattggagactacgtaggtaccatctcaaggacttgcgacattgaatacaaacgagactgtcaggttagatcagtggttgctggcgagtttagttgttgcccaccagaatgacttactcacgaagcatctgaggggactagtggcaaggccaatacgagtggctcgacaaggacaggcgcttggagcctcgaacacatcagggccggagcaactatccccctgcgaaactactttaaggacttcctcaaccaccttggaatttctccattccagttcgttcctatttcctacagaatccttgcaagtcttaaggttctgtacaaaattttaaactgggagtgccccactcccctggaaatagagtacctttactcagtgaaggcggttcctatgaggaagaatgctacaggggtttttattatctcgggactcacacaagtgatcataagatcattgttgggttgccaaacaagacccccttcatagatgactttttctggacaattggtctttccccaatcggcacaaccaccttccacatattacgtaagtgattacttgcctaagacttcgttaaattattccatgtctttaattctggctttgctaactttaattttgcttttgttttcgactgctgtctcaaaaagaccagttcctactctcgagatgcctgagcgacgtaggctcctactgggtcttccatatagtctccgatcggctgagttccgcttgaacgaggtcgacttgaggttcatggatctcctcactattaaggagtttaattgtgattacaaatatcccaagtactcttcttggcaacaggttcctgtcccagtcaatgaggaaactcatgactatgtggctcgggcgcactacctccagaacgtccctcgggaaaccaaagaaggatcatccagaggtaatcaatgtggttggtcacccacagtacttagggctgagcgaacaacgttagtgtcttttcgggatagtcgttataatttttacaccttgaatcccctcctcatagttcccattgcacataggtttgatagttggtacccagagttcttcgtctaaattagttgtaccgactcgtactaagggatagccaagcagtatggaaccatgctagacaggcaggtcacatagactcgagctgggatttagaaccaattaactccaatgacatattcaagatcacatgatgtagagattttagtggatattatagtccttcctcttcgtcttcttatgattatggtaaatcccttaggtgggaaataacctcccaatttccccttttacttggttttaaataagtgctaacacattgttttgtctcacagaaatgaatctcgaggacctccttcaatcttcaggcaagaatggaaagaaaaggttaactgcctcatagacttaatctgatgtcaacgtggagcctctcaaaaggcccaggaagacaactaccagtaagaagcgagcctcccaggctgttgatctcgaggtccctgaaactgagactcaggtttagacccctcctccggcccccacacatactaaagagcccattcccaaggcaaatcaggctgctgcctctttgagccaagcacttgagactcttcccatcgatgctggaagggccaacttcgagtacacaggggagtttggtgcagcctattggtgtcatttcaaggccttccttcccaatgagtgggacttaattaaaaatggcctcgtagacaagatgcttgacaggagtgtcgcccatggcctcacaataatttcccacgtccttatcgtttcacttttccttctaacaatcctcagacttatttatacattcttcgtttatttgtttttagcaaaccttcatatcctttatcgcccaacaccggggactgaaaaggatgaagtatctggaggaaaagatgcagaaggtgattggccaaggtgaggctgtgaccaaggaatggaatgactccaaggtggaggtcactcgcctaaacaaagaagctgaggaaatgaagagagcccacaaggccgagcttgaagctgctaagaaggaagcgaaggataagaccgagttatgccaaaaactttaggaagaaagcgagaaacttaagaggaacttaatgcagccaatgtaacacttgaggggaaagaagttgaaaccattgagcgatgcaatgccgttacacaacattccatctactgagcctggatggcaaatccagggatggatttgagtttcctagg

SEQ ID NO: 311696 - DNA, 696 bp, Cannabis indica
gagagagagagagagaggagtttaatttggtgtgtttttttggagagattagattgaatttgaagagaggataatgtgaatatatattgtaattagggttgggccttggaaaatactcacgtaaataccttgaatcatctgactctcatgaaatctatgtatgtatatatatatatatgttaataagatgaatcaaaagccgtacatacagaatctaaacccttcaaacacgttattataacataaatatatatatatataaattgagattagtaagaatagagactaatgagattacatataacgatttgctgacacggtcatatataattagtaataacaaataaatataaatatatatatatataaagcaatgggaaaatctatatatatggtttgtactatggtcgtgtgtttccattattactaaaagtgacataaaaaaaagtactaatactaaatgtgttcttttttatatgtatagacatatagggcccataatatccatgagtaatattattatttaattattataattagtttcattaattaattatgcgacaaaatatatatttgaaaatgaaaaagactttgttcgatcgatccaataataccaacgtcaacacttaaattgtaaagcccgcttagttaatttggaaattagcagttatttatgttaatcaggaaattatttat

SEQ ID NO: 311697 - DNA, 1360 bp, Cannabis indica
catacaacgtactatgcagtacaatatactttttttacctttaatccaggttcatacatgtcggccaacccaagtgcagaactatccccgatgatctcggtcctatgtcacaacaacagtaagccaataagtgtttatcccaaaacactgcttaatattcacataagacaatctaggattttgtaccaaatcctgcggtataaatacattatcataaaaattatattttggctctaaaacatacaccatattgtagggctcattgaaagcttcaaaacagtatataaaatgtccaaaacggacacccaagtgaaaagttatgacaaaaaatacaatttctgatctcttaggaatttctaaaatcggtgaaactcaaaaattccaaatttcactgtcatagggttcgtggaaattctagttatgattggaacaccgacaccaagatctaccatcatagggtcttgaaggagacctgatgaggcagaggttgtagttggaattcttctcgtgttaactatagagtttgatcatattacttgagtttgactcgctctcaatgaaagtaccatattattgacctcagatttgaccaaccaacagcagagtcgaatgtaatgccaatgcttgccacatgttacataattagaataataaaagtaaatgaacacatgattttatagagtcgaactttagttgtattaataacgagagataatacgatttagattactatagtaatgggatctgaagtagctctctaaaggttacaatgtacgaattggagttggtaattcccaagtatgcaactcctaaatccgttgtttcagacaaggatccaaagtttacacctaaattctgggtaagtcttcagagaactatgggcacaaagctgaagttcagtacaacttttcaccctcagactgatgggcaatcaaaaagaaccattcaaatattagcatattttctgcgagcctgtgtcatggactttgagggttcatggagtaaatacttacctttaatagaattctcctataacattaacaatagctaccagagtacgataggaatggatccctatgagatgttatatggtaggaagtgtcgttccccaatccattgggatgaaactatagaaaggaagtatttgggtcctaagttagttcaaaggaccaatgaagctatagataagatcaaggcacggatgcttgcatcgcaaagcaatcataaaagttttgctgatccgaaacgcagagacaatacatttcaggcagaggaacatgttttcttgagagtttctctggtaaagggcattaagcgctttggaaaaaggggcaagttaagccctaggttcattgggcca

SEQ ID NO: 311698 - DNA, 3311 bp, Cannabis indica
aaatttattaattcaaatagtaataataaaaggtaagtatgaaacagttatattttctttttgaatcaaagatgattttatttaaaacttttagcaattacaatagtctttacatcgaatggagcatcatgctcactgaaagtacaatctgacttcaaacaagaccctcgcgcaacacagtgagcagccttgttagcaaatcgtttaacataaattttaaaaacattatttaagaatgataacaatccttgacaatcacgaacaagcaatccaaactgggatggcattgcaattgaacttttaatagcttgaatagccatcaaggaatcagtttcaagcaccacattcagccattgctttctcttaatccagcttaaggcttctttgataccaactatctctgctatttcaggtcgtaccacaccaacacgacttcccgaaatagcttcgataagtttaccatttgaatcttgggccacacaaccaaaaccaaacttgttattcgattgaaagatagcgccatcaacgttgaccttaactgtatgtgtcattggtttcttccaatgcccattaacattgttaatatcatttactaacaatgcccccattttttgtgattgagcactactccattggttaagagttattttagctgaccgcaccacttctaatgtagagcaagttttattattccacacaacatcattcctcacggcccatattttccagcaaaccattgcagcttctcggatgacatcaatcggctgtaaatcaagcaaactaaagaaccatgatctaaattcattattctgtgttgcagcagtactaacagatgataagttccagcaagctttactaaatctacatccaagaagaatatgaaatattgtttcctcacctgagttgcacaaagggcatagagtctcgacattcacatgcttcgtgtttaattgaatctttgttggaagacacccagatatagcacgccaaaggaaatgctgcaccttaggaggaatatcaatctgccacaaccgtttataaccatctctgtcctgttcaatacgaaggttgctgttattctgctgcaatgctttgtatgcagacttaacagtataaaaacctgatgaagatttattccaataccatgaatccatgtccacagaatcgctcagttgtacagaaagaataagatctttatccctatcattaaacaggtcattcagcacttcaacatcccattgtttctgccccaccgaaaacaaacttgacaccagatgcccctccaacgcaaggtggctgaactaacataggggttctgctcatcaggaaaccatggatcggccagaatattgactaaattccctccaccaatagacctcctagcaccagaccgaaccaaatctttggcttcaaataaactcctccaaataaagcttggattttggcccaaagtagcagtaagaaaactaccattagggaaataccttgccttgtaaatcctacttaccaaagaattttcattcgttaagagtcgccatccttgtttaccaacgaaagccaagttgtaatcccaaagatctcgaaatccaatacccccttcacttttatgtctgcaaagtcgcttccaactcatccaactcacacctttagatgagttcgattgagacttccaccaaaatttagacatcattccttcaaggcttgaacaaatttcctttgtaaggagaaaaatgctcatagcataacttggaagcgcttgggcaaccgactttatcaaaatttcttttcctgctttagaccagaagcgactttcccaaattttttttttctgcattttatccttgaggaagccaagaatagcattcttgttccttcccattgtacatggaaaccccaaataaaagttgttctccaaagctttctccattcccaacacctcacacatcctatgccgagtatcatcagtagtattgttgctaaaaaaaattgatgacttcacattgttaacctattgacctgacgctctttgatacacctgtaagagttgtaacactcttgcagcttcattctcatttgccttacagtacacataactatcgtcagcaaatagcatgtgtgaaacacgaggggcacctcttgtaacttgacatcccgtcaaccattttttactctcataatgccgcaacaaagatgaaagtccctcagcacaaactagaaaaagatatggggagagcggatctccctgccttattcctctaccaggatgaataggcctcataaattttcccccataggtcacattataagtaactgtagtcacacaactcatgatgagagaaacaaagtgactactaaaccccatacggatcagcataacctctaagaacaaccaaccaactcgatcataagttttactcatgtcgagtttgagagccataaatccttcctttcccatccttttcctcttcaaataatgcataatctcataagagaccatgatgttatcagatatcaactgaccagacataaaagcactctgattattggatataacatccggcaaagcacttttcaatttatttgcaatgacttttgaaataactttataaagaacattgcacagagaaataggacgaaggtcactcatatgctcaggcgactttttctttggaatcaagacaatattagtttcattaagactagtagggaacgatccagatatgaagaaatttcttaccaaactaacaatgtcattgcccacaatgtgccagaatttttggtagaaaccgagggtcatgccatcgggtcctggtgacttttctggatgcatctggaataaagcatgttttatctcctcaactgttacaaattcgatcaattttccattttgctcctcagaaatccgagaatggacacattcaagaacatctccataatcaacattttcattactaaaatgctgcttgaagtaattcgggaatgattcaattatatttttaaaaatatataaaaattaattctgactcgaatttaaataaccttgtataaaaataactaacctatattttccttttgaaaaagttaattattttaaacaattatattatacaagatatatatggaacatttcttaatgggtattacccgttgatggttactaaacaatttaactataaatattagttttaaaaatattaaactattaaattttgatccaacgacgaataataaaaagaaaaatttgaatttctatgcttaatttaactacttaattaaaaaaatataaaaaaatattactttttacactatat

SEQ ID NO: 311699 - DNA, 1496 bp, Cannabis indica
tagttagaccgtaaggtcattacgaatcaggttcaaagggatgtcattagcatccagacaaccataacgattttgtgtaaaagcccacttcactacattatggggagctacattagagaaattacaacctgcaagtaaggaagaaatgcttaaacattgccgagtgtaattctcgatatcccacctagactccactcccaaaagagagttaatcaccactcgagagtcactatcaacaataacaaaattacatctcttctacgtcgccatgtaaagccaagcaacaggcagcagcctcaccacaaagagggtttgaaaaatcaagtctggcagtggcggcccaacaaaacatcccatggtgatctctagcaacaacaacaatacacataaactctaaccccactctagcatcgcagttcaatttgatccagtccattgtgaactttatcatttcaagcccgccagatagtatcaaccaaaatagaggcatacaggaacacctcattaacatcaatacccctatccttaaggctccaaataaacttaatctagtcccacatacgaatagcagaatcaacaataggaaatatgccccaaggggaagaccgccataagtgataggccaagttacactggaggaaccggtgcttcatagtttcattctcaattccgcaaatagggcagagaggagtttcgatatgacatctttcatttagaattgacctgataggcagtgcgttagaaagggtactccaccacagaaccttgtgacgctcaagaattttactgttccaaagtttattccagagagagtgagaccacacagtgaggcgcccgctcaagggcttgggttaagtaagcagatttactagagattaattttccactcttttcttttgtccaaatccaagaatcacttcccctaccagaaggcttcccccctttcaaagttgttgtaaccgtttcaggtacaaacaagtagtgaagcttatggtggtcccagtccccttcctcagtcaaaagatcagctacccacttatagccaaaggaaggattgccattggatttgggaaaaaattcgttcacgtgagcaacccaagggtcatcccatatacttgtggtcttcccatcaacaatcagcttacaggctcctttccgaatcgtggatctagccttaaccacattctttcaaaaccaagaatctaaatctttgtaactacattgaaagaagttgttaccccgcaagtacttagctttcaagatcttacaacagagcgagttacctccagtcagtagattccaaccccatttgggcagaaaggcctgattcatctcctttgttttccggaagcccaaaccaccacaagactttgggaggcacagtttatcccaagccttgagatggatcccaagattacctttttcaaaacccaacctgaaaaccctcaccatactatcaattttagtcaccattcgactagagagttttgtggttt

SEQ ID NO: 311700 - DNA, 2914 bp, Cannabis indica
aagtaacgtagcaggaagaaatactagatactctcaaagaagtaatggagaactgatagttcaagattttaaaatccagtgagtatgggttgatcggcattgacatgccaaagattcatcattgaccattcaaacattcaaacattcagatatatatatacatatgcttattagactacaaacatacgttcattcactgacatgtagtgtaatatcccggaaaataatatggtatttagttggacgtattttattaaatatgtaattattctggtaatgaagtaagattatgatcttacttaggttaattagtgtgaatttattaaataattaaataaaacgtaatttattaattacaaaaattttattggaatacgtgggtatcgtggatactatttttgaagtaaaatattttcgggcctgacgactgtgagaacttgacggtgtggtcagaaatgtcacgacaataaaggatggattattttggagtattctggactagtttacaattttgggttgtcggttttgcggattagctagaattactaaactacccctaggtgtgctttaggtttaggattacttgaggaggggtaaaagggtcattttgaggattaatacttgattttttttgtccttttgtgacttatggcttattgttttaatgttactagaaaaaaaataagataattaaaataataaaggcttatttagaagacattagaagaaatagcacccaagatcatttctcttcctccctctctttcgtgacctagaagctagccaaaaaccaagggaattcttcacaatttatccttgattttgagtagatttggtaccgatgatcaacctagaagctttggaggtaagtcattttctatgaggattgtaaattttcaatttttaagttatggctgtaggattagactgagttgaggttgtgtctttagacctattttagagtgtgttggagtttgaattaagtaatttcaatggttgtttggattggttttagttagatgaagttaaatgagttttttcttcactttattatgtaattttgacttaatggttgaattgttgtaatttggagcttggattatgttgtatttatgttattacactgttctggaaagtttgattaggtttggaagaggtttgggtcgaaattgaggaagaaaacccaaggttttctagtctaccagaactggtcgaccggttggttctggtgcaccaaaaccggtcgactggttgccctgcagggagaattcccgggttttcttcaggttttgttgtggccaggggtgatgcgtagtatctattttaggttgtttatgtgttgtatgatctaatttggagtggttggaagttaggttcttgtctggttttggattagggttttattctggagttatgattcaaggtatttattgagttttgattatcgtgacacaggatcgggatcgcccagctttatttccacttaggtcggcccacacatttgagttttggactgagttaggaaaagtgttatacatcacttagggttaagtgattaacaattgtatcattatagtctcgattatgatcgagaacctgaataatgtgtgctaagcctcgattataatcaagggttggaaacgatcactaccgtattgagtaattactccgaaaaccaggtataggtttcttacttatcatttgttgtatcgggcaacgatagtgacatatacaactcgtggttaacgagtggcaagggtactttatgaagtaccaagattgtgtgattacaataatgtgtaaatgtctaagtatgttaatatgtgattatttaaatgaatgttatattgatttattcacttttcttgctgagcctctgtgacttacgggtgcttaatggtgcaggtaaagggaaggctaaggttgagcagccatgagtctgaggtcggagcagcaatgtacatatcagtcgcggtgccataccagtggacagggtgttccattttgattgtattttgaaatataaacctatgttataaaagtactgttattccagtttgtaaatattttgaatataggggaaccccgtaaatattaatacttattttttataatagaaattttgtgtgtttgatttgaattatcaaaatttattttaatcacactttttggtataattatacttattagtaaatgagaattttataaaagcacacacgtggcgcccgtgttggacaaggacattacatgtagtattttgatttagtgcgtatgaagggataatttgatgtagtgcatgctatgctcatatttcgagcaataaatatggccaggcatgtgtatagaaaataataggctcgcatatcaaaggaatttatatgacaatgatgcaccttgggaaatattgtttatagtttacaatataagtcttaccttaattgaaaaactgagtttttgctaatgccattagttatacgaaattttagtataaacactgctgtaacaatctacagcagtagaatgtaattctgtcactgcagaacacagttttgtagaaagaaaccaaaaataaatagtgcaaaatttaaaaacttgacacaagagaattgtacgtagtatcaatgttctttcaaacactactagtccacagggccacgtccatagaatgaaatcaattactaaagtatcaaagattacaaaagcaattaacttaaacaaatttagactccctctagtgatttgctgcaatcctttgtaatctaccttgctaatctgatctctgaaacacaccaagtagtgaactcccttccactattgatgtgtgcttacttcctcctgaagtaaggcttaaaaaaatcttctcctgaagatatatgctcacttcctcccgaaatgagacttggaaaagtcttct

SEQ ID NO: 311701 - DNA, 1271 bp, Cannabis indica
aaagtgatatgatcctgttgaatcaaagaagagaacaaagagagagaagtgaattctgttattattgaatgaatgagcattgtacagctttatatacagttaagaacaaatagcgaaaaaaccaactaacactgaagagttagttacaaacagttaacccctaaccatctttattatcagtacccttgacagctcccttcaatgtagtttgagaaacaacattatgtttgttcctaagttgaggaaatttggaactggatatatgtttggttaaataatcagctatttgatcattggcaggcacatgattgatacgaatttgttgttgaataaccttgtcacaaacaaaatacgaatttgatcattggcatgcatgaagaacagggttggctgcaagaagaactgtactttaattgtcacaccaaatagaaggaattcttggtaatctgctgctcatttagcagggattgaattcaggaatttctgaagttttttacctttaatcgagacaagaacttgatgtttccatggcaagaagttgtgttcattgagtttgattgataaatgtaaacaacacaagataggatcttggaagaatagcttgagcttgattttgaccttaagcctggttcaatcttgagactccaccattgccggcgatggtgctccatggttgtgaaccatattgaatcaaagaagaacacacacagagagagagaagtgaattctattataattgaatgaatgaggattttacaactttatatataattaagaacaaataacagaaaaaacaactaacactgaaaagttagttacaaacagttgacccctaaccacctttattattaatacccttcacatatctttacttaaaaatataaatagttaatatttaatacacatcattgtgtgtaataggtgtgcaatttgagagtgtatgtagcattactcatatgcaatatatatactagtgacaactccgcgtacaatgcacatgaaacacatattatatgcaatcaaacttatggtataactgaaaaaggaatttcactatattagtttcgaaataagtaaaacccaagttaggaaagaaaaaataattataaaactcaaacatgccacttataaatctaacaaaacataatcatatctcatagtgattattaattttactaattaagttatataattggtgtataggcacatattagtgctggaaatattttaccaggatctagatttactaacaagtatgtttcattaacatc

SEQ ID NO: 311702 - DNA, 914 bp, Cannabis indica
aaaataacttcctacaatcaagtttattgtattacagtaaagctcaaaatcactacttcataatatgttaaaagaaattccttatacaataggtaaaaacaagccgccccacgctagataatcccatatactattctcttatgtaaactataaaaagcttctctatttaactccattagataaacagtttcttttcaaaaagatgaacaatttagtacatgttacatgattttagaattgtaccattccaaataacctcctcatatagccctaaagatatagaggccttaatactatgactgatatccaaaagagaagagtaatcactgcatgaaagtgttgatttcttaactaccccttctaaatcaatttccacctgcttaatatgaatcttaaccgttacacactaggttggtgagagttttaatgccaaagcttcaatagtaactgaatctacaaatcttggtattgggataacacaatcagcaataactcttactttgtcatttatagccacaacttcagcaccaatcttatctaggagtgtttgttggtcgattatgctatattttttcaacccaatgtagagagtgggtcacaaaaatttaagtgtgacccgcctaattaaagaaaaaatgatttgcctaataggttagtctgtttggttagaccgcccaaaccgaccactaatacattatttttcaaattcaatttctatattttaattaattgtgataatgagacaaatatatatagtataaattcaaagtcaaattaactactgttgcccctgatttcgcccaaaatacgtggaccaatcaaacagggacacgtggatcagattacttgtaaatatttgttaagtctttgtatgccacaaggaagcaccctgggcataggtcccggaggaggca

SEQ ID NO: 311703 - DNA, 698 bp, Cannabis indica
gcaaccggggaccaccccttgcaaccggggaccacctgacaccagacaagggtacgaggtgcaatgccaccttctacacatgcgagatgcagcatgagaggggtgttttgtcattctgttgggaccactttgtacctcaggccattagagcctataaatatccctttttcagatgtgtggaggggttagaaaatcatacttgtaacaccatattgagagcaatagatatttctccattattctctctatttcaagatagcgatttgagtttacatttcatctttttcttcatctcatttgtgatcttcaagcataatttaattttttggctacaagttggttgatgagttctcaccgtcaacactaacgagtctgcaaaataaatagatgtgactaaaaaaagaattattagtgataacctatgaaattagtaactataaataataattagtcacagattttagccataaaattatataattgtgactaaatatatttttagtcacaacatttaattgtgacgttttataaattataaaatataaaaatttaaaattatcataaataatttattgtaacttaaatattacttgtcgtaaattgttacagaaatacatattaagttataaattatttttgttgtgactaaaaaattgtaactaaaaatctatggtgtcgtttggtaacacttttatttt

SEQ ID NO: 311704 - DNA, 1312 bp, Cannabis indica
aaaaaaattaaaattgcccaagaaaagtttgaaaaaagctcacttaaactttttaataaaggcccactggaactctttaaaaaaagcccaatgaaactttttaaaaaaggcccaaagctactcaattaattgaggcataagcctcacacgcctcagagacttaagtctcaaggcgtacacctcagaaacttaagcctcaaggcgtacacctcacaaggtcgaggcgtaagcctcatggacagtgactgaggctaagcctcagaggcattttttgaacgcctcgtttcgaggcgcgcctcgagttgaacacctcaaatgccttttaaaacattagttatatgtttaatgttagttaattgtttattgttattaaatgtttaactaagagaaaaaaatgaatgcatatgtacttatatgtttaatttttataggtacatattttaatactgtttgtgggttattttcaagtgctttataatttttgaatgatgttatagtaagcaaatatcaagttaatttttatttatatatatattttaactgattattattttaagtgtaatttttcatagatatactttaagttaattatgtctaaattatatatatattaatgtttgatattgttgcctacttgatttctaattgagcatatttttattaatcactttatttttttttttaaatattgttttggtgtaattttatatatattttttactttatgtgttttaaatttttttattaattgcaaagaatttgtaaatatttttatatgttcattagtggttttatacggtgttgttgtgttatttattaattttatttgtgttaatgcaatatgttaatatttaataaatttgttctgaagtttgattggttgttaagttgtttttgtgttgctaattggttaattttgcataactattgcattgagaaaaaatagccccacgcccaagctctcttcgtccacattgccacgtggtaggcgcagagtccctgctgcattctgacgctgcagttctgcgcgcgtcagtaaatgactttaccctctcctctcgcgtgtgaatctcactcgcctgtcttattgtatttcactctctctttttgcacccgaaattcatctctccatgtatttttgtaataaaaaatctttacaaaaattatttttgcaattaataaatagtataaatgtatattttttcttgggatgatataaatgtttattttgggtaattttaacctaaaatagaaaaaacttcaatttagttttttttagtttaagtcataataagtattgtgattaaaaata

SEQ ID NO: 311705 - DNA, 1191 bp, Cannabis indica
gaattggattagatcgtgcggatcgaattagattgagtattttactatcacctctgtatactagttgggggtgaagggcatcgccatccttgataggttgtggctatgctccttcaatcagttgtttaaaagtttcaaccatctttcaagtttttcggctatcaaggtgtaaatatttcaactgaaaattttaactaagtagaatgttagagatcattttacaaaaaattgtccaaattaaactaaaatatataaaataaataaaagatatgaacttttttttatgatgttaattccaaattttttatacatacaattaggtacttcaacattgtcttcctaaagtacaaatcccaaattcattttttttttacaaatatatattttttttttacttataggctcatagtacatttttttaaggccaaaatgtttcaatttttaaatattcactccctcatcacaattttagaaacataattaaaatacttacatttatactcgctcaataattttcttaatactattttgaaaacataattgtgcatcataatttcttttagttttattatttgaatattatatattttttatacatcttaaatatgaaaagatgaaaataaaaaagtgagaaattatcagaaaaaaaaaatgtaagagatgaataatattctttaaatatttacacagaatatggtagacaaattataaaatgaaaaattggactgaatgttgtaaataaattttacaaattttataacctttctttttaataaaattcacatatatcattatagaatgatatataagacaggtattaggattgttcacaaaatttgtaattttgaactcaattaatccatactaaattattgagactgaaccaaatcaatttagtgttaatagtttgttcaatatttgaactgtttataatcctctagtctaatcactattttagaattctcctagtggttcaaaccaaaataataagccatataattctttgtatatacttgatatgtttttttattgttattatttgaaaacaatcctatatagaatataccatattcatttaaaattattttgagaatattttttattgttaatgtattataaaagcaaaaataatttagtaaaaaagagaataattatgtaaatatatatataataaatactaaattcaactat

SEQ ID NO: 311706 - DNA, 545 bp, Cannabis indica
aaatgggttgaaagttccacaagatataccttttcttccatgtataatatcaaacttatacaagcttatttcataataggttcacaatttcgtcaatcaatttacaggatattactatttatgtgatgctagatatcccaatggtgaggcttcttagtaccgtatagaggacaacaatatcatttaaatgattaggatgtcccacctaataatcttattgagttttttaatatgaaacattcttttgctcaaaatgtagtggagagagcatttaaactactgaagggacgatgggcgattcttagaggtcgatcatattatcttgtcaaaatttagtgcccaattatttttgcatgttgccttcttcataacctaattaaaagagaaatgcatgtagttcatctagaataagcagtagaggaaagtgagaatgattcttctgacgcagatgaaagtttaggcaatgatcattatacacatattaaaatatctagcgcttggacttcttggagggacaacatagctagagagatgtttgacctatg

SEQ ID NO: 311707 - DNA, 698 bp, Cannabis indica
taataatttgcatattttaaaaaataaagaacatttgcaatgatacggggagggggggagtggtgggaaagggagaggactgaggaggaacggaagggagagagagatatgtgctatatgaaaaaaatatgaaaataccctttttgtttttcaagaggtatatttttctaattagggagagagatgtgtgctacacgattaagaggatactttaattttgtttttcaggtgtatttttctgaaactcgtagattagatttaatgtttgtaaatgcattaagatcttggagcttatggttagattaataaaaactatttttttttttttaacaaaatccgctttcacttctactttaatttggactaacaatgatgatttaatttaataattttatacatggatatgatgcaatgattccagtagaattagaatcatcctcccactcgaaggatgacttacaacaaagtaaccaccagttattggtcgaatcctttgatctactagatgaaagacgagacatgtctaccatccgcttggcttcctaccaacaaaaggtagacatatactttaattcaaaggtcaaggaaaggaagttcaatgtgggagatctagttattcgtaggggtattcgcggtgcggatggtatggtttttgattattttttcaaaccaaccagcacatgcggttttttcaattt

SEQ ID NO: 311708 - DNA, 3222 bp, Cannabis indica
aactattgagattgttgtaattaataacttttttatccaattataataaaggaagtctaaaacagatgaaagtttagggggcacgatttgatacatgtcaaagttcaagaatcataatttagtacaacaatcatcacgttagtaaaattaaactgaattagacagaattccccaacaatctcaatagttcaggaaaatggcctgaaaagttcgaagggcatgattttgtatatgtcaaagttcagggagcacaatttagtacatgtcaaagtctatgagccacgatttagtgcataaacaattaccacattagtaaaattaaacaaaattagatataatttgcgaacaatctcaatagttcagagaatttttaatagcctgaaaagttcagagaacatgatttgctatatatcaaagttgagaaatcacgatttggtacatgtcaaagttcaggaaccacgatttagtacataaacacctgaaaactttagaggacatgatttagtatatgtcaaagtttaggaagtacagtttggtacatgtcaaagttcaagagccacgatttagtacataaataatcatcacgttagtaaaattaaacggaattagacaaaagtaacaatctcaatagttcagtaaaattttaatggtctgaaaagttcaggaaaaataaaaaatacctaattatcctcttctcaaaaactatctataattttttttttgggaattatgttaaatattaattaaaagaataagggtaatgcttaaagcgagattacttcttattgatgagaggaaaatatctaaaaaagatcaacaaatctttgagtaatatgtaagtgagtttgcttgttgttgaattggggatactgatttgctctgttttgattaataaaagggaaacttacaaaagtactgaaattttggttaacttttacaaaaaaacaatagtggaatacaaaacaaaacaactaaaaataacagtggaacaactaaaaaacaacagtgaaaacttaacacagtacgcaatatattttgaaaaaaacacagtatttttgaaaaaaattccgtcccacagtataaaagtaaaaaagttagaaatttcagtatgtggtgtaattatcccccttaatagggaaaatctctcatttaatcaaaaaaaagaaaattaaatggtattttcacaaaattggtccaataagagaagcccaataagagaagcccataggagaagcccagttataaaccaaaggtgggtttcttcggttctgtcactagctcattcactaactgatcggagatcggagatcggagatcggcgatcggagaggagaggaggaatttggtttcactcattcaccggcggataaataatttcttcactcacaacaggtactgtgtacttaagctgtctggttgtttacttaagtgattatctctgttttgttgtatagaattgttcttcattggcattctacagggatatgaattgattcagctagctattatccaattctcttttgaatttttagtaatagttaggtttttttttggttcataagatctagaaattgtgttaataatcataattttctgattttagtattgatgaagttttgggtaacattgagaaattcctctccaaattaaatctattttttggtgttttttaaggcaatttgagatataatttgtagttgtttcaaatttataggtaaatcttcatcgaatagttaccaattagagaagttttgaacaattatggttttattcatttgcatctcttcaccattgtttgttgaaagttaaaccatcaaacacaatataataacatctaatgatcaaacacaatataaacacagaatcataaaaccagaattaaaagaagaagaagaagaagacaccaaaatttatcctggttccggtcctagagatcaaatcgatccctggctatactccagctgagaaacatcatcaagaatccaatacgaaagtgttgaacttgtacaatcaccaatggcagagatcaagaactctgcattagttggttaagtttgttattctatttttggaggattaacttccacaaatattctgttaatccacaagaaattttgtaagacaggcattaattgtacaaggtaccactgaatgtagttcatatttcacccaatgactttatatatctatgttgttacacttctttggtagctataaattgtttaattgcttttgtttttttccatttgtttaggatttttgtactgtgttgctttgttttgtttctgctacatgaatttactgtgcctaatgcttaatggtattggtattgttatgtcatttgaagagattttctaaaccaatggaggggacagaagctcaaacaaagaaggaattcttgaaattgcagcaattagcgattcagtctgcgaaagctgcacatctgatatcgtcgttgaaaagctcccccacttgttaccgccgccttaactttcagaacaaggtacattgtcgactttaaactcacttgatcgaaaaatgtacttatgtttttgttttgagcaggatgaggcagtttttgaggaagagatactgaataaggagaaggagattgaggatttgaagatgaaattggcaatggagcgtcggaagaataagagaattaagctcttcggcttaatgcagcttcttcttccccttgttctggtgctgatctctctcttattatctgtttttcattttcaatcgagtgacacttgcccctaattctggtatgcttttcaataccccattgactccatatccatgaatttgagtgagaattatattctttttttggggggtttgttctgttggtctatttgtttgtttcaattaaatctaaacttgtaaaaatttagaagcccttaaccttcatcatatgtgtaaatatgggattttagctaattgagacatgagtatctctctcaactactttgctagtctatcaagtttttttaagtttggcttataaattagtgatgatttttgtgtcatttatttttgaaatattatataatacttcttttgtcctttatatttggtttagttcttaaagaatatgaagaagaaatgagcatttttggtcctattagcacaatttcacggaattttatttacagaaaataggatttttttatggtgtactcttgttattttttgttgttgtttcgatattatttt

SEQ ID NO: 311709 - DNA, 827 bp, Cannabis indica
tttaatgtacttttatatatattatattcttattgatttattgttgattttttattatttgtattttattttctgttaatattgtttggatgttattttcttgttacgttcatgtagtttttgtattgtattataaaaaatcataaaaaatatataaaaaaaaattaaacttaaaaatataaaaaattacaaaaaaatagtaaatcttaaattatttctaatattttaccaaattcaatacacaattaatgtatctttttacttatatcattactatttagtattaacgacttacttaaataccacttttttattataaaattgctgttatttttaaaaaatatatttaatttattaataataattttttttgtcaatttatatcttaatttacttttatgtattaaaatacaattgcaaaaagagtacaaaatatagcacttactaatttttttttgtgtcaaatataacatttattaatttttgtgtcatatttaacacaatttgtattctatgcattggagatggttagcgatgtggcgcattgtaagtggttaacaatttcctatattatttaaaagaaaaatactaaagggcaccccatgatatctaacactgttataaggtgtaatattgttactgatgtaatttaatatcaagtctaggagtgtgcataagtcgatcaaattcaatgaaaaccgacttatccaattacaacggactgccaaacattgaatatccaattgtaatcggatcgaattggatgttatttttaaatatccattagatcggactagatggtgaatagaatgtctaaaaaatccaat

SEQ ID NO: 311710 - DNA, 1164 bp, Cannabis indica
atatgatctggatttaactgattttgtgtgaaaaagtaataaacatattaaaccattagcatgtaaaattcatgcaaacataaatcacttcaaatttcttatattgataactaatcagattgtaaagagttttatttaggacataaaacccaacatagccttagtgacaaacctcaagagaggcatggaaaagctccatccgtacattatcccgtctagtatcaagtacctagcaacttttcttcttagtttattttcttcatgcttgtcatctcgcaaggcttctatttggaggtaaactgcgataggttccatccttgttggagtgtcatccaacatgtttacttcttctaggatgataatgttgggttcctctaagaactgtataggcaccaatttttctttgtcagaaatggtgttgctcgccagacgagcaagtgcatatgttgtagcattctactatttggggacctacttgattgtgtagcctttgagctaactttgtatgtctttgattttgctcaagtaggccaccgtgttttcacctcgagttgtgtattcacctaggacttaatttacaactagttgagaatcactgaatatgtcaaggtgatcagctcgtacttcatgtgccaacttgaggctggatattaaggcttcgtattcagcctcattgtttgaggctttgaagccaaatttgaattcttcgtgcagttgctgcccccagctattgtaagggcaattcttgcaccagaaaattggtcagtgtagcttccgtcaacatggagtttccaagttagttcggattttgttgctgctcttgctctcacttcttctctagctcttgcttttctcttgagtcttgacgaatctcaatagttgatttggtgcacttaggcatgaagtctaaaaggacgtgaccctttattgtgtcagaaattattttaccaggttcttagatgtactcacaagtatgttgtttaacaccctaaatatgaactttctaaaatgatgaaataaacacatataaagtttaagaaaccttacattgggtgcagaggaatataatgactccttcagttcagatatctagcccttgattcctttctgtagcagagcattatcaatatctgaaccgggatctctttctctgattctttagtg

SEQ ID NO: 311711 - DNA, 1376 bp, Cannabis indica
aaaaaaataataaaaaagattttttttcggacaaaaaaagatacaaaaagttgagtttgacttaaatattttttatataaacatatttttgatatagtgtaaaaagaagtatttttttatattttatttaattaagtagctaaattaaacataaaaatttaaatttctcttttattattcgctattagaccaaaatctattggtttaatatttttaaaattaatatttatagttaaatttatttagtacccatcaatgggtaatatccattaagaaatgtttcatatatatatatatatgttttatttaatctatttttactttgtctattaggtgcaatgttatgggtaataatttactacggagaaaaatagacaacatcaaaaaatgcaagtattcaaaataaacaagaatactcttttgcagaattgtgattattcacctatagtggtgaatactcgtacgagtatgcaaataaaaacaatataaatgagatagtgaattatagaggttcagtctgagcttggtctgtttagtccattttagaaagaatatttttcggtcccttattcaaattggttcaccccttatatagaaaacatgtgtctttttggattacataactagttagataggaccgttattacattaattacattcaattaagaaagaaaacgtttaaagaataaatgaaagagcagttttaattattcttgattaattgtctgaacgtatgtgactagggaagttgcatatcggtcgttcatcttccaaacataccagctcacaagctctttggtgtttatttgtttataaggtttttggatcaaagataatttcggggctatcttgtaggtagaacacctgcgattaccttggtcgtgtagttgcgtattcatgtactgacaacagaacttacgagttcttgatgaattgttgtgtatttgtctttcggacaagatatatataaagatgctgctttatatataattgcaggagagatgcacttagttatcacatataattgacatatgcgcgactagtgctaacttcttttgatcctacttttttccttgactatgttgggctttgtgccctaaataaaactctatttcaatgtaatctttatcatttaattatcaataaagagacagaagtattttcatcacttatttagtgtgtcatttggttcatgttatcatatttatatgtttatttgatttataaattcatccaaacccttatcacattgatattcttatttattgtgtcgtcagcacagtggaaagtaatcaagattgtgtgattaattatatattcctagatttatcagtacacagggtttaactgatataataatctacaacatagtttac

SEQ ID NO: 311712 - DNA, 822 bp, Cannabis indica
ataattataatttagtagtaattaatccaattccctgtggttcgacctcacttgcgtgagtatactacttgattgcgtgcacttgcgtagtatttaataatttttcgtaacggtgcctatcaaagtagccaaaggactaagacaaatcttctcacccatttagattcaagagttgattgagcaacgaaaagtactgtgagagtaacaggaaaaacaccatcatgtggaaagaagatgaaccaacacaagtacaactcataaccattgatcctgaacaaacttagagaacaaatgaattaaaacagtgtatcacgagagaagaagaagtagaaattagttaacaaattccttaaagaatggtcattttttttcctttcctttttaatgttaacagtactataaatctgagctttagaggcagtttttaagacattttagcgtcaattttggtaaaattctctaccgacgctgatccaggcgatactgtaggattgaaaacaactgatgccaaatattaccctatggactcattcattaataaagaactaacgctatatgtacactattgtgtcgattatatacaaataactaacgctatatgcatatataactgacgttaggcctaaaaatatacgccaaatcattaataactattatgttattcagttaaaaaccaattataaatcaagaaattaatttatttaaattatatatttagaaatttgtattaaatactattttatttaaatttaaattaaatatttattttttaaaaagctaaattaaatattatttaaattaattttatgattagccaatata

SEQ ID NO: 311713 - DNA, 796 bp, Cannabis indica
tggtgagccatcttccttcttgaaagctttgttgttgtctgatggagttgatacaatcttgcatccctccattttgaatttattcaataatgtgtctatatacttcttttgtaagataaagattctatcttctttttgagttatttcgatcccaagaaaatagtgcattaatcctaaatcggtcatttcgaaactcttcatcatattttctttaaacttctttatcgtcttctcattattgctgtgtagatgagatcatcaatgtataaagagataattagtgtctcattcgtatcttgtgtcttgatgtataatattgactcacttttgctcctcctaaatccttgttcgttaaaataactgtcaattctgttataccaggctcgtagaatttgctttaagccatatgaagtttttttcaatataaggactttatcttcttatccttgtactacgaactcttgaggttgctccacataaattttttcttcaagataactatttaaaaatatcgacttcacattgagttaaaaaatctttcacttcttctgtgtagttagagctattaaagccctaatatagtatctctttatacatttttgagtacaaataaatctcataacatttgaaactatttatgctcatttatcattttgggattatattttgaccatgattttagtaattatgttcgattaatgagaattttcataaatataagaattgagggtataatttacttttttaaagcataaataaataacacgactataagcttataggttttttttttatt

SEQ ID NO: 311714 - DNA, 1014 bp, Cannabis indica
gcgtatacaatttttcacaacatatatgtatatatatattgtatgcatatgtagtgtatgtattaaaacattaaaattgcatatttcaaattaagagttttgttaaatattaattgtgatttcgaatgagatagaagagtattaaaataaaaaatctagaaattgaattttaaaaaatattttaaactcatatttttttttactagctagtatctaattactaatttactaactagctagtcactaatttttattcctattcatgtgttttattactaattagttactaattttactaagtactagttactcattagtagctagttagttataaactagggtaaatactattttggacctatattttgtaaaaattattaattagactatctgttttgttaaatgacaaaatagacattgtattttctaaaattgtacaaataagaatctgaactgattttttgttaaaataaaacttaataataatctgatttagagatattatgacaaaactggttatatttctatatctgttcgtattagttattgtcttaaagttgattatattaaaaaaataaaattattgaaaaattgagctgagggtcctataaatttgtacaattttgaaaaatacagggtccattttgtcatttaacaaaacagagaattcaattagtaacttttacaaaacacaggtccaaaatggtacttataactctataaactattaacttaactagtcaatattatattagctttaatgcattaaaagtaaaattaacttcattttttgataaaaatgtgtaaaaaatcaacaaaaatattaaattttaattgagaatgtataaaaatattagtaaatatataaataaaatataaaaaattattaattacattaatgagtgacaaaataatagtaaataaaaaagtagatatttatcatggtataaaattttgggtttattatataaaacactatttttgtaaaaaaataaaattatatttttacattta

SEQ ID NO: 311715 - DNA, 1127 bp, Cannabis indica
actattgttatggtagtagggttctgttatttcatggtaggagattttagtcttgtttttttgagacattgggagaatctcaattggctcagagcatatttgtattagtagcacgattatttttgtccatgttcagatctgggagattctcacatttttttattggccccatagtttatgatacaattgtttgttacgattgttatcgctatggttcgtcatttggttattttcttttattttagattgaataatatggttgttattacctaatttttattggaagatctttgactaatagtcgttgataggtttgattagtcatatcctcatttggattggagatctagcattcttcgcagttctttgatgcttcaacaccagcgacttattggtcttttagttgaatgcgctattagaatttttatttttattttttataaacaacacgatttgcctatcttgttgattatgctatttgagcgatatatcagcatgtaatagaatattatctacctattaatagaaattgttatcctgaaatctgcacaagtgatgtaatgcttactcaggtgacatgtaggttgtccttgggtctgggcggatgaaattctcatcaacattctgtttaaagagttatcatcaggaagttatttaaagagtaggatgaatgtgtcatgcagggtaaactgtatcatccgtctagggtcaatttctagatcactccgggtaggccgcttaggatgaacgcgacggtgaaatctagagaactttcctcttttatttatcaattaaattcctattttgatagaatttccacacgtaaatgatgtaatttagggaagtaaatagtttttctttttattctttaattatattgggaaatcttattgatgtaattattccctataatagtggggtcatttcactatccaagggaagaattattcattcgagagagtacttacgctgctaaaatttttgtaaaaacttttgaggaagatcaagaacttttggcttcttttttcacaagttaatacaaatgaaaaagaaaatagactattaccactatcacggggccgaatctctataacaaatttatgatcttattgcgtaattattattat

SEQ ID NO: 311716 - DNA, 913 bp, Cannabis indica
attgaaaaagcactgtagcgtgccttagcattagggtgttacacaagtttactttactaatgtcttggaaaagacattctacatatataagtgtaaataaaccacattgttaattatcatatcattgtaaatcgataaatcatgagactaactagtttaatcacataattatgattattttctactgtgtagataacacaataatcatgaataatagtgtgatagaaatttaataaaatttgtatatcaaacatatgatcatgaataataacatgtaaaacaagcaaagtactaaaataaataatgaaataaattctattctttattgataaatgaaattaagattatattgaaattgagttttaggcacaaaaacccaacacgggcgccttcgccccacgagctagaattctatcagtgagcctaaagtcatgtatttacctcaatagtaggtctaacttatacaaaaaaaccctaatgggtcatgggtatgctcaaatccaacttctagcttataaatattacttcacaccttcatacaaattacaaagggttggaatctataaggttagaaaacttgtaagtaagaaaacactataacaagaatctaaggttcttgagcttgtaaaccttattgtaatacatcaagatcatttggctaaatacaagtgactcgtgaatcacataaaaatttatatctccatcttgtactaatttatttaatttcttaactctcattttaaatagtttcttcgtaaataacatgtatgtataagaatattttatttaaggaaatatatttctatttaaagaaataaatttctatttaaggaaataaataaataaatgattttttgataaatgaatattttatattcattgaatttggacaaaatcaattatgtaatattct

SEQ ID NO: 311717 - DNA, 996 bp, Cannabis indica
tttttgtagtagtgtgatctccatatgaagaagttcaaatggaaggaactcaaaaatagactaacgatgtcaagatcaatgccaaggatcttttaagggaaatgtaatgattttctaaattattgtcttagtttgtcctactcttttttatatctatttattgtgtttggtatctttgattttaagtttgtaatatatttcttactaaagaaaagtcttttataatataatttcttgcaaaggatcaaacctaggttgatttatctcagtacgataataatagaaaaatagaaaaatatagtgattgatcaaagaattcaaatattctttggtttaagctaatattgtcatggatttttcggttgtttgcttatgaaacctaaattcttgtagatataatgaaagtgttatagtgtgatttttgtctctaaatatgagtacagtctcgtagaaagttaacatgtagacttaatttatgatgaaaaaggatgacatgccaatagatggctccaataaatctaacctcatatgacataaacttgcgagaaagtgtgaccgagacaatgtctaatcacacactatactgcatagttgataaaaagcatgatcgagagaagttaatattagtcgcacatatactgattatatgcgattagtaagtatatatctcctgtgacacgtaaataccgcatctttacatatgcttagtccgagactaatgtattaaacaacccattaggaactcgcaagttctaagctgtcaacgtctgaatgcctaaatacgtgatcagggtaatcacatctattaattatctaactgcaattataggcccgaaggcccaatatgcgagaaaaacaccaaagaacctacgagctcgtgtgtttggaattgttggaaaaacgataagcttcaagcgcaacgaaataaaaaaacaaaggaaaacaatttactcagtttggtaaaattaccaaacccacaaagagagatatatttca

SEQ ID NO: 311718 - DNA, 1357 bp, Cannabis indica
ttttttaacactcaaccacataatctgatttttgggaggcagaaatcctctaaactaaacttttgttgggctttttactattcagttcactactacaaatctaggctttagaggcagtttttaaggctttttagcatcagtttttgcaaaatttatagtcggcgctgatccaggcaacgctaaagggtcaatcataaccaagactaaatctatttatgtcccatctgcagactcgtctccaaaacattcttcaaaaggttccaaaaagaaaattcctccaaaagcccctatctcaaatgtcgacccatcgactattcaatattttgttgatgcctccaaagtgtctatttaccaatgttggtttggaagtcgtgagttatggtttgaaaaactagttgttttggatgactttcctgaacttcatgcatttttaaaaattaggaaatgggttcacactgtctttaagttgcctgcacctcttctcattttaattcgtgaattttatgcaaatctagataggactgttattcatgagggtcatccagggtgtgtaagtgcattttttaggggtactcgtattccttttggatcttctactattgcatgcatcttaaaagttgagtcggtcaaaaatccaacctatgggaaacagtttaatccagatcaaactatgatgggtagagtgctaactggcagggatgactatctttaggaaaagtaggaaattttagctactcatttaaccccattctatagggttcttcatcaggttactttgtacaattggtttcctaactcccttttgtcctcagtcactcttgatatcgaaaagtttttgtatgctgtgggaactcaagtatccattgatctgccctctctaatttttgaaaggattctcgaagcctcagaaaccactggcactcgaaacaaactcctatttccaagtctcatccaacaagtgctgatggctgctcatcctcctcttacaacccatgattatcaagttcccaatcatgttctcagtaagagttttttattaggttttcacagatagcccacttcgactactccttatgcttcagatgaacaaaggcaagtcccctctgttcaaatggttatcaaacatacctcgagctggcaggttcaaatgttttcagaattcaaattatttgtcaaaagatataaaaaggatcaaaagcatcaccttgtatttcaggcctctatgtacaaaatggatcgcatcatcaagtccactattctacaaaatcactatggagaacctttaactcaatccattgatatatctcttccacattttcataagattcgtttggtgcatcctcagatgggtcttgta

SEQ ID NO: 311719 - DNA, 2637 bp, Cannabis indica
aaatgcgacaatgtctagagtttttgcatggatccaagggcggcctaggatggcgttgtaggttgagggtgagtcaattaccaagaatctagtctggaggttgactccttctgcatatacgtgtaatgttacctcaccaacagaatgcttctgttcaccactgaaccccacaagcaccattgacttacagatgatggtggattcatcaatccccatccctctaagagcgtgcaaaaacaatatgttagcagaacttccattatctatcaatatacgttttgttaaacaatttgaaataagcaaagaaatgactaaagcatcatgatgaggattgagcaaatctaaggcttcatcgtctacgaagtttatgatttgtcaaatgtaacttattgctagcctccatggccttccgtctgttcctacaacttctcttgcatgcctcttagtgattgaatatgtcacctcactaacttcggaccctctagatattacactgcaagttctagtgtgttgtggaagttctggtggtgtaacaggcctggtgtcccctccagctatgatactcttccccttgttagataagaattctttaagatgtccccatcggaggagcccaacgacttcaaaatgaaaagcaatgcattctgccgttgtgtgaccatgattgtcgtggaattcacaccatttggttttgtctctctgatctgctggcttcttggtctttttgggccacttgactttgttctctatttctttcatgatagccacgatctctgttagttctacatttaggttgtattgtgggttgtgtgccttctcttattctcttggtcttggtgaaggaaacctacgcacaggtccctttccttgtctgttgcttctggaagttgggtatggctcatgatgcgtactgtacttgcgttccactctccttgtgctcctattttctcttatatatgagtaggatgcgggggtatgcctgttggactcgtcttcttcccatttaatttgggcccaagctttggctagtacgtcttccatatcctgcaaggatattttgttaattctttataaaggtcagaatgtaccattaggtattttcataaggatgagattgtcgtgtccacgttgcatgaggttatggatactttctctgtgttgaacctagcaacataatatcgcaacaattcacccatcctttgtttgatcctgtaaagatcgtcagacaatttctccagtttcctgttattagaaaattgctccacaaatatgtcagttaattgagcaaatgaagaaataaaattgttaggtaggtttgtgtaccactggagggctggccctaccagactagaaccaaaccccttacacatacaagcctctcgtaattgtaactcgctatgtgatcgttagggcccgttgttctgtcgtacatcttcattgatgggaagatgaacttttttggcatctccacgagagttatagcatccatgaatggggagtctgtgaagctacttggtaagctctttttgataggtgcaaggactcttgggattctgtgaatcatagtctccatgccttcaagcttccttgttaccatttgttcgatcatatcctcaggtgtcattgcgacgatttgacctgcagatggatgataggaacattagatatcaaaatacttggagggattgggccagagcacctgagttgtccttcatgagcgcttggcgtgggaattcttccgtctggaattgatgtgacctaggcctcggtcatagcttcgtcacctaccaaagagggtccatgtgttagagttgatccccctgatactgacccatctgctccagtagtcgttgtagttgactactggtgtgttgtttggtttggtggcgttcttgtgatcgctggacgttggcctaagtttgtcatcagagtgtaatcaagggattgcatggatggaattggaacacgaaaccttgattgagactctgtcgtactacgttgaacagacttcagtatctccacctttgatttcagcagagcattttcttcccagaatgatttattctcttcttgtaccattttgaggctttcattggtttccctcatctaagacataagagtagctatctgggcttgaacgttgatctctccttcttccagatttgccatggtattggatatatgtcccttgctcctgattcagtttgtcagggccccacgatgggcgccaaattgtagaggacaaaatctacaatgatcgaaatggaaggatcacgagcactgacaacctgtagaacaaaggaaaaaagaccgttgagaccttgggacactgagatggtgccagccgaagggacttcgacgatcaagtcattaaataatttgaataaagaatagcctaatgtaaataaagaagataaaaaataaatatttccaccgtagagtgatggagaaggattggtgataataatagtaacgtattgcgtgaatgcttgagtgagtgttcagtgagtgaagatgatctgatctttcaagatccatgggttctccttttatagagcttttgattgtccaattcatccattttgaagaacgaacgtgagaagtagtcttccccttttccaggaggaaggatcgatt

SEQ ID NO: 311720 - DNA, 1060 bp, Cannabis indica
tatagagtaaattattgttggagtatacagagaataatgatgcagaattgggcatccttggctgtcaaatatctattaataaattcaacaagagagatggaaacaaaacctcaaagagcaagtgttctgacaaagtaagaaatgactcattacaacagaaggaactctaatatctatctatgcatactgctttgttctgttgttgactttgattgactcatttcataggttttgattgtacacaagagaaatggtggagagatgaattgcagaaagatgatcagacccaaaaagatggagacatatgtggagttatctgtggaaaagaactaatactttcaaagtctcattctttcatttcaacacattcaagattcagttgatgagaagattggcgttgtcaagaatttcagggaatggttggagtcaatatgtttttgtattcaggaaatggatcatcatgcaaatttgaatccatggtgggcaaactgaaggcgatggatttgtgcacacaatcgagctacataccttgatcattcttttctgtttgaaagagttaaactcgaatgtagctcaaaggcattagaagataggttgaaaatgatgaggtgaaggaacattcagagggtgttaaataacaaataattgttgatgaattattcatgccaaaattattttacaaagaacctctaaaactgtatctatacttgtgttgataacttgaaatgtaaagagtttagaaatatttatagatgaaggaaggagaagacgcttgccgagttggagatgcagtcaactgcattaaccaactcttttgctgagttattgtttaaatgcacagggattaagtgggtttaattccaataattccaccttattatatgacagaatgagaacattcactgccctgaaacaaagtgggccatacggaaaaaatttttttttgggcccttatattagaaaaaatgtggtatttttcaaaatcggtaaaaaaatgtataattttaaaagaggaaaaaaaattttgggaccctggtctgagtgggccctaggcacaggc

SEQ ID NO: 311721 - DNA, 1308 bp, Cannabis indica
attgggttctcggtgttcgcgatcagcacctagagtttctcacttattattcgtagatgatagcttgatatttgggagagcaaatgggagggatgctactaaaattcgtggagttcttgggtgttatgagttagcttcgggacaataagttaatttagagaaatttgctatatcattcagttcgaatgtttaaaaagagaatcgtgctaatgtattggttgttttagggcttgacttctgtggaaactcatgacaagtatctcaaacttctgatgattattggtaggaataaaatgcactctttagatagtgtttgtaaaaaagtccaaaaaagtgtttgtggttggaaaagaagcttctttttggcgggtggcagggaaattcttatcaagtcaattcttcaagctattttgaattatttgatgagtattttctagctcccagttgctacgtgtgataagttgtggtcaagtttgttgcaatttttgtggggtacaaagaatgagaagaaaaaggtagcttgggtgaagtgggataaggtgtgtcaacctaagtcgaggggggttttaggttttagagatttagaattgtttgatcaagctatggtcgctagacaggtgtggaggttcatgcaaaatcctgagtcgctgtcgggacgagtgttgaaatcaaatactttccaaactcatccattttggatcctaaggatcagaatgggtcatctcatttatggtctagtttgatatggggccttcaactcttgaggaagggattaagagtggtggttagagatgggaataggattgaagcttttagagatccttggattcctaaaccaaggtcattttgacccatcatgtgttggccaggagaaaaactaatggttaaccactttattgatgataatggaccttggaatttacaaagattagagcaacacttcttacctttagatgtggaggctattctttgtgttccattagctattgggccttcagtggattcgtggtgttgggactatgattctcatggctgctattcgattaaaagtgggtacaatttggctattgaccttgtgtgtgatgataagactgcgtctaggaatggcaaattggagctcattcccggatcgggtcggggccccaacccgatgggtcagtcccgccccggaacaatcgggtatataattgggtttttgccctgccccgccccggttcgatttttttcaagtcggggctgacccagttcggtattacataattaacttaaaaaaaatttaccaaacagtatactcagcttaccgcttcc

SEQ ID NO: 311722 - DNA, 1127 bp, Cannabis indica
tatattactatatataattcaatatatgagaatttatttgatttttactatgttaagatcccgttggtgagccaggggcattttagtaattatgacccaggaagggtaaaatgacgaaattaatttaattacgtgcttaatagaactatattattatatagtatgcctgtgttttcttttcaggtgtgttctgacaggttggcgcggtatagttacaaccaagtatttcgggtcgaactgggttcgggcctgaaatgcaatttgaattgcaatatttggtatttttatttattggtgataatctgaattttatttggaaataaatgagtgtgaattggaaattatgcccttgtatgtttgaatatgtgagaattggctctaggggcattttggtcttttgaccttatttgatttattttggtaaaagctgaattttgaggaaatgaattagaaaattctaggttctcttttcctcttggccgaccctctctccctctctaaccctcttgagttttttcaagttaaatttgaagaaattggtgaggaattgcttgaattgagcttggaatcttggtgtatttgtgcttaattctagcttgagacttaaggtaaattttacaactttgattttagcttggttgctgaattttagtgaaagaaaaacatgaaatttatggtgttgatcttaggttgcatgttggtgaaattgaaggtgattttgatgtttgttgtgagttttgagctattaagattgtgtatattgcatctagatggttttgattgattttagggttggtttatgttgttcaaattctggtgtaaggcttagaagttctgggttttgtcttgaagctttgaacttcaagcttgagtatatgtatgcaaccttggtgtttgatgtatgcttgattttgtttgtagttttgattttcttgagcttagtgtgatgctcaaatgaacaccaatgttagattggtttggtttaagttaaaagaattagattttgtatggttttggttgacttttaagtatggtttcgttgaggtttgaatatatggttaagtgggcatttttagaccttaaaatctggttttcagttttttcgaacccaatggccgcggccagat

SEQ ID NO: 311723 - DNA, 1498 bp, Cannabis indica
acgtaaaaattcttatactattttatatgtattacagtttagagactttaaaaattatttagtttttttttttgttttcagtaatgcaatttagaattctagtttgaagaaattttataaaaagataaatatactacttttttttctttttaatctttaaaatgattttattaaaaaatagtttgttagtttttttagtgtgttttatttttaaataacaattccatttataaattttttatttctattaatagttttatctattttaggaatatagagaataacaaaataggaaatattaattttttaatatttaattaatgattataaatatcaaccattagatatttgatccaatggtcaagaataaaatacccatacatgggtaatacccattaagagcatacccatatatatatatatagtatttatagaatcaaatattcaaatccctttaatacaaaataaacaagattccattaaaataattacactccgtcaagctggactatatatattgctgagtccaagcttgtttactactaggaaatcaaacagttgctacaaataattcttaatttcttatgtgaaaatatcagctacgtgttgatccgtacatgttgagtgctaataatttctttatcaatcttatcgttaatgaagtgacgatcatgatggaatggattatgcgcaatattgatggtagattgattataacagtaaatctaaatggggtgttcatattcaatcttcaatttctctaataggcgtttaatccatattgcttctcacaccaccaaactctttctttattgattgattctctgttaagtctgcacaaagtgtttcaactctcacactttacacttaagaattttcttcatctatagaagattcttcttacaaaactcaaaaccaatctctttcttttctctacctctctttctacctctcaatctttttctctcaaacgctcaatctcatctctaaggttctgaatctcttgttttttcaaataagaaagttaaggtgatatttaaagacttaggatcaagatcctaaagtcggtggcggcaagaaatgaagttgttaagtaagttagttagaaataactaacttaataaactcttctttgagcgaagtctccacgtcaacttatggccttcgggaacatgagcgagcttctggactcacgggccaagagtacttgctgaagatgcttttggatagggtaaagactgcggaagtcgactattcggaactaccattccaagagggataactagccagctggaactcctttctagggaggaactagctatcttgagaacttgacaaagagtggagatgacagtcatccgggaacccccttctggatctgactatcattccacacgactccttccgggatcgataacagcgagtgaacatcttcctagaaatgacgtttgtggagacttttcatttggatgaactatatcacaaattccacctagtt

SEQ ID NO: 311724 - DNA, 980 bp, Cannabis indica
aaggctattttattttagttaacaaaaataaaggttattattgaatagcgtattcttaaatagaggttctactgtaactattttttgtcccaattgatgtgtctcacacctttaaagtgaggtattaaataagtccccatagtatattactccaaatttacacaacacaaatttatttatgtattttgatatacaaatgaatttaattttgattttggatctaatttagattactaagatttttttttttttttaggaaaagttgtcttttgggggcgtgatttgtgaaaggaaggggcgcgtaattagcttattgggaaaagtgattccattaggattcgtgaggattgtttgatacctaaggatcacgtggatcgtgctttctcatttagtggaggtgttgaggtgcaaatggtcagtgatttaaagttggagtctgggggtgggtggaatattccttacatttcagatcattttgactcttcagaggaaaagtctattttatctattcttactcctactgttgataaagaggatagacttttttggaacttctccacttttggtcgttatacggtgaagaaagggtattggagcactgtttcttgattgagttaggggcatgaggcgtcttccactagttcctcccagtggtggaagtatttttgggctctcaatcttcctcctaaggtgaagaatttttttttggaaggcctctcttaattttatccctacttatgctaacttggttcgacatggtatgagtacccctaatgtgtgtccaatttgcatgaaatttaatgaaacgactcttcatgctctttggttgtgcccctttcaaaggaattcggaaagggtggggagtttgagatttggataaggttggagtggctgcttctttctatgatcttgttgttggttgtatgacatttcttcgtaaacaggaagtaaaagaattacttataatttgttggaggata

SEQ ID NO: 311725 - DNA, 836 bp, Cannabis indica
aaaaaataataataattatatatctttttattttttcaatttttttaacaattaataaaaataaataaattatgttatttatcatttaaataatgagtatcgtctcctatatagttaacatggaaatacgtttttacgaagaaaaagaatgacatgtacgtatatactataaacctcgataatttatgaatcctatgatagaagtatgcgagaagattagcgaccgagatatcatctagtcgcatgttatacatcacataatattaagataaaagcgagacgaaaagagaagtatgcatagttgagacgtataccaaatataggcgatgactaaatattttctctctcgcgctatgtgtgaaggtcgctcctttcacttcgatttagtccgaaaataattaattatacacggcaacccaaatgaacttgtgagttcttagttgtcagtatacaaacaatcaatatgcggttaaagtagtcgttggcgttctatacattaataagaacgatcaaactaattatgatcatttatattaatcaaaacatttgttttacgggtgcaatctttgattaaggctaatgtcgatggtgcaatctttgcaagtgatggacggtttggagcggctggggtggctcgatcgggatcatcagggccggttcatttgaaggcttcacagttttacgggtggggtgtgtggattcggctatggccgaattggtaggggttaaggaggctttcagctggataaagaggaagcaatggggaccggttgaggttgaaaccgattctttggtcgttgtccaggcagtccaaagcacggtggatattccttctc

SEQ ID NO: 311726 - DNA, 868 bp, Cannabis indica
cttacatgtttcatcctattccatctcattcaagtatatatatatatatattttttttttatgcattttgggtacttttggcaatatttgggcctagatttggttgccacttggccatcaagtgctcatggagcaaccccaattggatatgggtttccaagtttaggagcaataacaggtcttgccactaggggattttgtacccttagagagacctatatatctagagcttgtatttcaggagcttgtggaagacctactccctaaggaggatttacggctctgggctgtcttggaatagagagcaacccatgtgctactccctgaccaggatagataactagtatcatcgcctaattggttaggtggtcattctagactaatccttcaatttcatctcttaagtaatcacattcatttgttgtgtgcccaatatcacggtggtatttgcacattttacttgggtccattgtgtcttccacctttgtacattaacggaggctttttgtagtggaccatattgcaagtagctttatacagattatcacgagtattaaccaggttgatgtacccaaaatacctagattcttaagtcttccctttcttcaaggattcatttttgctcaaagctttggatcctcacttgcttcgacaatgatttacatttgattctaagactctcgctttttgatttgcctatctgagagcagcactgtatccagtttatgccactccaaagttagagaaactagtttgtggagctgactgtctgaaagcacctagtgttgggatttaatgccctaaataaaacccattacaatctaatctgatttgttatcaataagagaattagaagtgatttgtgtta

SEQ ID NO: 311727 - DNA, 1739 bp, Cannabis indica
tcttggaaaagaaaaattacaagaagtggaaatgcgagaaacaatatcagcggctggatgacccaagcgagagtgccataagtcaatggaattcttggaagtgtataggagttgtggggaggcagcaaggttgaaggcaggggcggagtgaactcggtaaatgccttgatcaagaaggcctttgagaatgacttcatgattggcctgatttttgacaagaaagtaagtggggtgaaactcaacataggcattattatccaaacaaagttgggagacactaagcagatttttagacaatgaaggagaatgataaatacgatttagtttaataaaaggaaatgatgatgatggtagatatgcagtacccacatgagaaattgaagaaaacttaccattgcccatagtaatgtggtcattaccatgatacggagtggcggattcaagaagattcaaatcgggggtgaagtggtgagaagccctggagtccatataccaagcgggatccatgagagtacttatggatgaaggagtgggaagtaatggtggatttgtggctggtgaagtaggcagaggtggggaaggggtttgtagttgttgttgagtgaaataggcattaaaagggcgttgtggtggaggctgaaaactgagattagttctgtggtaacacatgaatgccgtgtgcccggttttgaagcagatttggcatcgtggtggtctagaagggggacgggtagaaccagatgggaaccagggtgtgggagatcgagggggtgttggatagttgtgtcggggttgatgaaatgaagggatattgggtggacgatttgactgagggtgtgaggataatctgggttgagaagtggctgggagagaagggtttttaggtccctgtttgggaaaagaaaggttggcaaagttggcttgaagggagctcaatgaggcagcagctatttggcggtctaaacgggcttcatagctgagaagaagggcgtgtatacctcttcgatggtgggtttgactggtcgggctaagatcggagtgacaaaggcattgtactccggtccaaggccatttaagaggtaagtcaaatgttcttgtgaggagatgggttctccaacggaagcaagagtgttgcagagagttttgagcttttggaggtaagccgatgcactgagttcgtctttcttcaagttttgcaacgccgtgcgaaagtcggagctccgagcaaaggaggcggcggagtacgtgcgttcaagagaaacccatatttcagcagcagtagtgaaccccacgatctggccgagcatggagtcggagagagaggcgtataaccaactcattaacagtcggttgtacctgtgccacgccgtgaaggaagggtcgacttggctcgacgtttcatcgggaaactgaggagggcagaccacggttccatcgatatagccttcaagaccattggctatgattagattctgcatttgcattctccaaacaaggtagttggtatcatctaacttgactgaaattgtttggttgaaggaggggaaatttgggggtaaggttggggaagaagatgaagctgaaagaggagaggcggttgtggtgttagggttttgtgtgttagtgatagtagggttttgaagggggttttgggtattttcattttccatttgtggtgttgagcttgtacactctattgaagccatggagagccttttggctctgataccatgtcagaa

SEQ ID NO: 311728 - DNA, 1265 bp, Cannabis indica
aagaatttaaatgaaaaaattattatacataagatttcaaaatttaaaataaaattaattaaacaatatttacttaaattgattataaaagaaacaataagataataaaattatatattctttttaaattactagtgtttattgagatttttagaaaccgattaattagagcttaagaaaaatgtaaaatgataaataatagacaagttattttctacgtggttcggacgttaataatccacgagtttgttgtattagccttgtcgacgagtgtttaagtattacaagtatttactgtgtaaatattaattttgtatcccttttgtttctcttggcaaagaataaagcttataggaatttttgatagaggttcaaaaatgttcaccttttgcacatgaaaaataggggtatttataggcacatgtgtgggtgagggcatacctttcacccacctaggatttcgtactcagcatgttacaatcgctggtgttacaacatggcgatctgattgttggtaggtaaagaaccttcttatcttgtggtgtttggctgctacaatccaatttgtgggactaaggacacgtgtcgttcaaaggtttcaccttgtaaagttggtatctagacaagtcgttggacaaaaaggagctacagagcacgtacgcgtactaataaggtctgactcaggggacaagatctgatttggtgtcaaagggtatgcaactgtccacttagctctggataagacacacccaagtaggtttcaagaacatctgactaaggctttctcggaccaaactagcctgttaccatcctgaagcacttatgacttctgatccttctttatagtagttttattaataagaatctcaaagtcccatctgcctttgctgacagggagagcctccggataacttctgatttataacaccatctgtgatgccgaggggcggagggtatatactaaccgtgcacaatctgatgtggcatccttccgtgattaccacgtacacttcatctgggaatacagataacatttacccccaagtttccaagactcatgagtgttgggagcttgtagctttcttctggatgcttgacttatcattttgacttgttttccaagtattaggatgtagaagaggtcttctgtgttacttaaaacttttaactacaatacacttgtaagaatagtatatttatgaagtattaaacttaaataaaaagtgatacttagttttttacgtaattttctttatatttttaag

SEQ ID NO: 311729 - DNA, 2319 bp, Cannabis indica
aaatgcaagaagcatcatcttggtgactgtcgagccaaggcatgtttccaatgtggcatgccactttatcagggattgtcctcaggccaagaagtaggcatgagggttgtattattgaatcatacatcgttgaagggacgattgaattctgctcagactacttgtcagaggttaccactgttggctctcgctctactcgggtcgatagggaaataagtagggggtaggggtttttctgtttgtggtgtgagtcgagctgattgtgaagaagcgcaccggcttgtgttgcaaaatactgatgttgtccaaccgtacattgagtaagtttaagttaatttttcattgttaaaacatattaataatatcaattcaaactaaaacaaatccattgaacacttgaagggaacattttaattggatcaagactactaatccgactaaggcacgaaatcaaaaatgggtacaagatgaacattatcgaaatttcagtacatggttaaaaaacaaggtactattaacattaatgttttgttacgcatcatatgttgatttaccttgactcactaatcaacttgtatgttcataggtatatgcagaaatgtgtgaatctccgtgtagtgtgtccaacacactactttgcatatcacgaggtccttcgtgtgatgtactcaagttcccatcgtactatataaatagtactcaattttgcacccaagcccgtgataaatctagaaaaactcaaaatagcggtgtatgattgttgctaaggctttccaaatatctagttcaaaagacaaaaaccctattgaatgtgacatgtctttttacggtgtaattcaagaaatttgggaattagattacagtagttttcgaatccctgtttttctttgtgattgggttaggagtgataatggggtcaaagacgatgaatttggattcaagttggtggacttgaatcgaatcggatacaagtttgataggtttataatggtgtcccaagccagtcaagtgatgagcaatccattagatacacgctggtcagttgtcttgacgacgcaacaaaaagattatgataatcaagagtctaatggcgatgatcttatgcttggtgaccaaattcatcaaatcaccccaccacctgttgatgtcaccgttgggaacgatatcatatcatctcgtgatggtggtgaaggactacggttgaacgaatctatcaacacatgagtcatatatcaaacacgtacttgtatttagtctttttgatatatttacatttagctattaatttgtatatttttgtatattctaatgtatgattttaaatttgtgtaggattttatatcatggaacgaggtggggataatgagtggactgcgtggttagattatggtggtgatgatggtccatctgtgccagaaggatctagtgttgatcctgaacaaccatccatggaagaaggtagtggtgatcctgaacaaccaacacagaaaaatgttcgcgggagaagcaaacaaaatgatataacaaaaatggttagcgaggtaaaaaaagttagaggttgagtacaacaactacggaagaaattggggaaagggagcgacagcaaaagttactcgaattggagcatgggtgggaactaatattccactttgagacattttgtggcctagagtgagtgaggaccttaaaaactaattatgggaacacataaaggtaaaattaattctattattcgagttctttactattgattataatttgtacttataattactattgtcaatgtggcaggccgtgttcgatgaaccggacacagataagaaattaacaatttctaaaggtgaagattggtggaaagattggaaaataccctaacagaaggtatagggcactgtcgcctatagtatagggcatagtttacaaccgttgcctataccctattataggcgacatttttaaacggtcgggaagttcacattagagacagtttttaatagttgcctattttgcccgttttgcaatgatcgtataagcgacacttatagaaaccgacaggaatactttaaatgactgtttaaaatatcacgaaaaactatttttgtagtagtatttaataaccataacgtatacatatatataaatagattttttttttctaaatactcaaatagatagagagtgcatcaatagatcaatacattgtagaatcactcttaattataatacaatatatattttcaacttttttatcactctctcgcccgcatttatttccttttagttgcagaagagaaacaattacagagaaacaaagagaat

SEQ ID NO: 311730 - DNA, 2990 bp, Cannabis indica
caatcaaaagatattcaaaatagctcctatgatattcaattttaagtttgctctaaaaaaaatgtgtagcagatcattaactgctcgcgtataacaaggcagattagaactgctcgtgtataacaacgcagattaaaactacttgcgtataaacatggcagattgaaaactgctcgtgaaagacatagtagattatttactacttgtatatctcaaagaaaatgacattggagatgcattcaactcaaagtatcttaagctaaatcgagaaataaatatttaaattgtgaaataaaatgcaataaataaacatgtttaactcaagaagtaagatatgaggcatgaaagaaaatatataaataagctatgttggccatccaacatagcaaaagtttttacaaaataccacaaggggcaactactgtctcggcctgatggccattttactgaatatagaaaaaaaaacaacataaagataaatgactaagtctacatggttggagacttagttggatcttcttcttcttcatcatcaacttcatcttctgcattgcctacttcctcttttttggtctgctcgcagtaagctagcatctcaccagccttgttatccagaaaacttaaatccatcccaggattagcaaaccaggctcgatagatagatcgcctggcgattgtgttgaccctagtcttgacatcagccttggcctcctcaaggttttagttggcctcggctttgacttcttcaagctttttatcagcttcgacctgggtagccttatttgctttctcgagctctttgattttcttttgggcattttcaaggtcggtcttgagggtcttctgctactcatcgacttcctttttaactctagagacctcagactgtgagttagtccattgcttggccaagacctcacgatgttctctagtctagcgaagctttatttcaagcatctcaactctttggaggcctctttgttgggcaacaaaagacaaaagagatgccttcaaggaatgaaactaaaaagaatataagaaaaagtataaaagaggaatgatgaaaaggaaataaggaaagtaaaaagtaatctactgcataagattgtagctcctcttcaccaaactctcaaaactcccttcgttgattaaatcctagccgcaaggttcaaaagttttgtagtgtcgccagttattggtagcatgcagcgagcaaagctacaagccttccataacagcatggacatgcaaggggcaagaaggttctagcaatgccatctttgggggagagccaaaaaattttacttggtgaatagacccaagggcctgttcactagcactcgcagcagttcgcacaaccttctctggagactttgcagattcgatagtaagttatttgaagatcactttttatttgcgatagttttggcttttttgaggtctccttggtagatcctgaggcctcatttgttgaagtcactcgcttcttggacttcttggttgtgagagtgggattgttgatcatgtcttcaagatcgaggtccatatctgcgagaaaagaaataagccaacacttgttcaaaataaacaataaaaaattgtggggaataaactcccacttagagaaaattaacatagttatcagacaaggatgaggaagaactacaatatttactaaattttctagaaccagtgatcatatatatgtcataagtatttattggagacatatcctaggctggatggcccactctatcaaaattggtactatattgtttggcaatcccaaaatatgaactgttgtagcttaactggacatggtattcagagtaccaactgtcaaacctatgagcaatgcaatctatacaaaaactatcccaagtataaaagttatacttgctatccttaaacttaactagcgaggtatgttcagccttaagcacagtaaggagccatccacaattattacctcaggatacttcttcttcagcttcccgaggggttactttcttcaagaagtgaatgcgagccatatagttcctatctttctcatcagaagggacgagaacctactgctacttagaatgttttggaactttgaagtcacaagtggattgtttggtaccgagaatattataggtcttcagattaatctcattcagaagaaattcaactgaatgtaacccaaacggaagacctaagagattcttgtgtcgtttctccatctcgggagttggaataggcctttttgagaccgctgtcaatacaataagcaaaataattaaaatgcctacaattaataaattgaaaactcaaaaccaagtttttgagaaaaggtaatacttacgtattaggcgagatgcagttgtgttgatgggggagagaccggatgtccagaagaaatcatccttgagttcagtttttttgggtagcctcacaataatcgttcgatcatttgtaagggtcccgaggtaataaagccacctaatcctcacttccttgtgggacatgcctttacggagtaaaggtatagaatttcaagaggagttggacactcccactccataatttggtataagacctttaagcatgccaaaattatgtaagaactcaaaattaactgaaaacgagcaattttgagataattacataattccttgtaataatctctcaaagggagtactgctccaactctgatgtgctcaaggatccaagtgcctatcctagacaagccactagtactacaaccctcttctcgaattattctttcaggagggaagcaggtaaattcccctggagcaataaacctaacacgacatcctttctcgtatttaatgtcgaaaggccttaatgctcctatggacctaacctttgattcaatcagttcagcctcaaatgtgattgtgggatcctgaggggtcttggattttgagattgtgtagtcataatttcaaaatctaagtctgattgaaatattttaccaggatctt

SEQ ID NO: 311731 - DNA, 1651 bp, Cannabis indica
aaattgctccacatatccttagcactcaattgataatcgacttgctccatctcatctgcccagttctgcgataatgggttgatcactggtttctccattactggtatttccggttcaagctcttcgtaggggtcgagaaaaacctctacctggttctgatcttccactccatcttcgcttaaaggcagctcttgttcttcaggtacattggctatggctggtttagcaggcttcaaaacgtttctcttcttcttcgccattggaagagagagaacgcaccctacgccctttttagttacatgtagttatggtttgaaccattaaaaaaacttataagtttcatatttttgtaattttcttatcaaatcttatatcatatgtaatattaatttcaaccctgactcctgaccttagccctgacctcgaccccagccctagccttggcctcagcaccagacttgatccttaccccagagcctggcccagaactattggatattcaagactcaatctcacacaccagggattcacaacataaaaaagaacaatcctcaaagcacaaaacaaactacaatgcttattgaacacacttaagaacttaaaattgaaatgaatgaacactttgtttatttgcttttttttttgaattacaaagttagagagtagaaaaattattacaagtataggggtatttatagctaataacctcgagtatgctacatgaattaccctactctaactaactagatttactaacttttagagttagttaaaactggttgcttaggtgtcattttactaaagcatgctattctaacaaatctccaccttgactagtaatatgcaaagaaactaagcaaccacttgagtgattgaacactgcctaaacctccattacattaagtaggttcaaacagtgtcagaactttgaagtaggtagagctttggtaaggatgtctgctgcattgtcttcagttcccactttgactagctttacttttccaccaatcagtatatctcgaataaaatgtagcctcacatcaatatatttggttctctcatagaaaacttggtttttgctcaagtgcaaggaactttgactatcacaatggatagttatacacctctggtctataccaagttccatggagattcccttaagccatagggcttctttcacagctttagtacatgcaatgtactctgcttcaattgtaatcagggcaacaatggtttgcagattttgatttccagcatatagagcatccacttgactgataaacatacccagattgtgatcttctagtgtttaggtttcctgtataatcagagtctacaaaacctgctatgttgacagtttctgagcttaatccataaaccagtccaagttgttttatgccttgtagatatctcatgatccattttactacattccaatgtttcttgcctagttgtcccataaaccttctcaccatgcttacactatagttgatatcaggcttggtgcaaatcatgagatacataagactccctaccacactaaagtaaggaaccctgtccatgtagttggcttcttcatcatctgcatttggacaatttgaatagagtgtaaggagtttttgttgggttttatgttggatatattttacca

SEQ ID NO: 311732 - DNA, 568 bp, Cannabis indica
aaagcctatttttgtagtagtgattctagatagtcatggagttatgcttgcttcaatcatttggcatatatagctgactattttcttcttaaagtagttgaagctcttgccctttgtaatgtgggtgtttgatgctagtagcttcgtttcaagatgttcactttgagaatgactaccttagtgtggttctcaaatttaataatcaaacatcgttggactcttctttagtattagttttttgtgatttctgtcgtaattttgtttgtctcattattctagaacagataatgttgttgcccatacctttgctaagtatgctttattagttgttattaacttagcactgtttggtggccaaattattctaattgtatccataactttattttggctaaagtcattgatcaatgaatgatctttgctctccttccttccctttagggttatttgctgtggttgggggtactgtgtgtttcttctcaaataataataataaaatttaggctaattaggattttttcccccgaattttgatatgtaccaaatcatgccccttgaacttttttgg

SEQ ID NO: 311733 - DNA, 1178 bp, Cannabis indica
atttttatgtaaaactatatgtggtattaatttttatggacacttaaatatataatattttagtataaattaaagtttaacatagtattatataaaaatatgatatataatccaattcaatataatacaatacaatacagtacgacttaatacggcgttccaaacgagcccttaaatgttaaacatgttttctaagggtatcatttactaatttatgagttgcaatattaaaattgtgactgacacaataaataattgtgattgcgaaataaatagaaaataaaactttttcttctgtataaaagaattaaataacttcaattcattatggtacattatactatatggctctcaaagacaaagattaaaaagaacgattctaagaagatctccatgatagacagtcccacatccaacgctcattttaatcccaccgaaaaggttaacgcttctacatccatggagttgtcaataaaccatataagatacctctaaatattaatataatagcatctctaatgaatgaagtgctaaaaacatgatgtgtatacatattttagtattttttttataaaaataaactccaatagtggttgataattcaaagagttatttgatgttctttgagtgtaatttatttgtcttttgtgtttaatttttaatcattttatctcttcatttatgattttcggtgttttgttcttaattgagtacagaaaaaaaaaagggctataggcatgactaaattagtgccaacaaattcaatttttagcgccaatagatatgtaagcacgtcaagtcgtactctttttatcctgcctaaaaagctcaacgggcacaataaataacattgtgccaagtgactgatcaaatgacacgacacatatggtgcccaattggaataaaaaattctttcattcatacgtttaggcacgacaaaatcgtacacaatggatttaatataactatccaaaaccaataaaaattaatttataaaagtgtcctaccatataaattagaaattacaataaaaacatttaaataactaaatgcaacaactaaaaataagttttcaaatagacaatatttataatcacattcatacaattacaaataacaaatagtactattattataatctcaattgtgtggactcctcctgtaaagaccgcttagtt

SEQ ID NO: 311734 - DNA, 466 bp, Cannabis indica
taatcaaactttactgccacctttcttgagtttaaaggtgttaaatctaccgttacctacaaaaatgtaaatgaaaatttacaggaaaaaatatttttaagggtattaagcatggcggaaaatgttaattacgagttgggtgaaaaatttcactttggagttttgcaatagcatgtgtggtaacatgggtttcccaaggttacgatagatttccttacattttcaataagatagtattttgagactgaatcctcttgagtaaagcaattaatatccaatgttaatgacgtacaatacaatatgccgtatcaaacgcaccctaaaagtaaaagtcgagctaagaataaaccattatgatttaattccactaaaggcatgaactttctcagcttagctcttatttggacttgtaatcaacagaggattccaaacattttaaacaagttctaattaggatttttgcccc

SEQ ID NO: 311735 - DNA, 2448 bp, Cannabis indica
gctgatgggctaagatacccaccaaaacaatgttacaagaaacaaggcataattaagatgaaaaatacaaaaaaaaaaaaaaagtattcacaaactgctcaaagatgagcaaacaagggtgagaaatgaaaaatctatgtagtcaattatcaaaatgaagaaaagaattgtcatctaagattcttcccctgcagggtaaggggcaatgcatcaggagattgccgtggtagtattctttccagctttggatggaggccaatagcggaagacggatctgccaacaatgttttctacaggcagtggacccctgaaaacaagttaatcgcatcaagaggacagatataacattttttaagtaatgtcaagtttcaataatttcacagttccgatttgattagaatcttacaaaaaggagaataagcattatacaaaaacaattttcaacaagattaaagagttcgatgattaccagttgtgagagtcaaaactgttattcctattgtctcccattacgaagacataaccttctggcacaaactgagaaacaaataaccaggacaaggcgttagatattgtaatacattaacactagtaaaatagaagaacgagaatgcacagtgcatacccatggaggcatttcatattcaagaggctctaaaataaattcttcatcacgagcaaccccgttaatcagtaatttcccatcacgaacctattcaaatgatcgattaaacaaattagactaacataacaaaagtttatattaggttgattgcaatgataactgacagaggagacaaataactagatcaaaagaaactgaagaagccaatctccacagtgtaatggactacaaatcttacctcaacatagtctccagccttggccacaattctctttatgaacacatcggctgaactaaatccaaatttctacaaaatggagacaaaacaccatacatgagtcacgaaatctcttacaagaaacaactgagtaagttcaaatgcctacctgtaagattgaaggtgccttgaaaatgacaatatctgaaacttcaggctttctgaagagatatgaaacctgatatatcaaagaaaaaagatcaatgcttttttggtcttacaagcaattcttgaaccaattcattcatgtctaaaatattcctcataaagagcagtatcatatatcacaatgataataatatctttcactaaatattatcagcaaagatgaacataagacttaccttctcagctaaaattcggtcacccacttcaagagtagggtacatagatgtagaaggaattgatctgggctcggccaggctcgaccggaacaataaactaacagtaacagcagtaaaaacagctttagcgtcctcagaacaagaattcatcaaacgcgttacccagccagttttctccaaggactttccaaccaagtcactctgagtagccataaccccagcagcagcagcattacaacaagttccacctttgtctacctcgttgacagatgaaactggaaccgattcgttgcagggtagccacttcgatccctgtaaaaagggtagaatcgaagtggctttaaccggtgaaatcccaaaaacgcccatactcgtcgccgacgaacctgttacacaggccgttgacttcatgatcgagatcaaacccaacaaaattggacttttacaattatcccccaaaaattctccggctagggtgctataaaaggaagcagaattcctaccccaggaagaggccttcggctgggaaaaatcgcatcggtaattgcgaacagagccagaaggatcgaattcggccttctggttaggaccaaaaatccgattccgaacccaacactcatgcaaagctctgcaatttccgacgcgaatcccagccgaggaagctaggttttgggcgacgtaaccagaaaaagagacggtaacccgaagagccataattgctaattggattagtctgatgaagataaagtaaatagtgtcttctgaaagtaaaaaggggttcgatctagaaaaccctacaatccaatgaaagccattttcgctgaaaaaatcagtgaatcgaagacggtaacgacgaattgagctctagtgatcaatctggggaaaataaattgaagacctttgtgagaattaaggcttaaaaattgaaaaattaggagagaaaataaactataaaagtgtcagaaagcaaaaacgaaagctcggagctacccgagcttcggctgagaaagagaaagggtttcagtttcagaggcgaagaaaaaaaaataatgaaaacggcaagaattgaagagaatttgggtttaaatatttggtttggtggcccttcctaaacttttccttcttactaatttgtacttgtttctttccatatttaccataatactctttttttttcttaacttttttcttctttttttttt

SEQ ID NO: 311736 - DNA, 3308 bp, Cannabis indica
agcggagaagccttctgagcacaaataaataaatatcggggataacggatctccctgcgtaaccccacggcctggaacaataggacccaactcacgtccttcgtgaactatagagtaggaaaccaagcacacacactggatgatcaaattcacccatcttccatcaaagcccatacgcagtagaacagcccgcagatacccccactcaagtctatcataagctttactcatatccaatttaagagccatgaagtcatttttaccctttgtctttcgtttaagataatgcataatctcaaacgaaacaaggatattatctgagatcaatcttccaggaagaaacgcgctttgagtatccgagatgacaatagggagaaccactttaagacgattagccaaaaccttcgaaaccaccttataaataacattacacagcgagataggacggaggtcacccatggcagctggttgtttcttcttagggatgagagcccgtaaggaaaaaatcttacacttgtctgacaatatcattcttaacaacattccaacatttttgaaagaagcctggagtcatcccgtcagaaccgggagacttatcggggtgcatttggaagagagcaaacttcacttcctcctctgtaactggtcgtagcaactaaatattctgaagagcagtaatactaggttggatacagttgataacctcaatagaagcagtgccagaggcagtaaacaaatcattgaagtactcaaccataacctgatccaaaccatcatcccaactcgtccaaacaccattggaatcctgaagcttaataatcaagttgctccgtcttttagctgatgcagacgcatgaaaaaacttgctattgttatccccagcctggagctataactgtttcgatctttgcctccaaaaaacttcatgttgagtgaggatttctataaagttttggctgcccaaaaattgttagtagaaatagtatctctaccatgcttccagaggttaattttagctttgcactccttcaatcttttcttgaagtcaccggagtaagcttcaccccaaataagcaagaactcaccataatatttaatcttttgttgaacatcaaagtcagaactgaaattccagcaatctttaataacttgatgacaaagaggttctcttagccaacaattctcaaagcgaaatttctttttcataacaaaagtgttgttaaccactaaatgaagaaaaatgggacaatgatcggaagtggaaaactctaaattatacagtttagcaagaggaaaaagatctaaccaacttttagtacatagagcccgatccaatctaacctcaatccactgatcagtacctcaccctttttcccaagtaaaaggatgcccaataagctcaagatcctgaagctcacagtcactaactgcttgttgaaaaccccgtaataaccagtccagataattgttgccgcctctcttatcctcttgagacaaaacattgttcatgtcacccatgatacatcaagggaagtaccgaatccaaagccaaacttctcatttgatcccaagtacgtcgacgatgaccacggtttggttcaccataaagaccacaaaagcgccacttctccttcccttccacggtgattttcatatcaatatgggactaagaaaaccccaacagacgagtttcatcttcatttttccaaagaaaagccaatcccccactcttaccttgaggttcaatagtaatgacaccataaaagcccaacaacaatctcactcactttttctaatttatcttttttgctaatagtctcacacaaaaaaacaaagctgggtctcttttggataacaatatcctttaagaattgtaaggcccatgggttcccaagcccatggcaattccaacttataaaactcataatcctcggtgggcttggaaaccagcacccaccttgttcaagttttttggcccattaacaccattagcattactagtgtctttggtagaaacttcatcaacatcaccaaccacttccccacttgggcctaattcatgagaggtaaaagaattagtatccaagcccatttgaccatcacgtggagcaccaattccattcacttcaatttcaattctttttcttttagtatcagtaataactatagcatcatgagccaactcatcattctgactatcagtatctaatcccccaatatactcattaccattaaacccaatatttgttccaccattatggacaatagaaggttgacccacgatcccctccactaacataagaacgtgatgatcgttaccatccaccttcgtcgctcctgcactagcatcaccgcccaacttctcatcggaaaaatcttgaaatgaccgcaaccactttgagcccatagtaacattcttcctccttggtatcgccttcatccataagccatatggtttcactatactatccttcggaatatcaaatagacgagggcagaatccttcggaatgtcacatgattccgcatatgaaacaaaacgtaggcacatgttcatatttgaaattaacccaaaactccattccagctactgtgcgaattttctttcgacgtttgagaggtttagaaacatccaaagtaacccggatacgaaggtaatctctccataaacccaaaaagttcttttggtctgcctctacaaaactactaataaaattccccaaatccttgcacacttgagcagttttgaatctcgattgtatgtcatgaagttgaatccacatatcaacatgggataggggaatgagcttaggatcttcacccttctttaatcgtcgaaaaaccaggagaaaattgttaaacgtccaaggactcttttcaataactctttgaatatcaacctcgtgataaaattgaaacaagaaccggtttgaatcaagccctttaacatacatacctttacccggtttccataacgaagccatgagatggcgcattgcatcaaaatctatattacgttcagtcaagaagcgacccactaaacaccatcgatcgtctatggctaaatccacaatctgatcttcaccgtacgccaacgcatcatcttcctcctccgccagaatcggatcagccatgttgttagctccactagatgacgccataaacaacccaacatgagacaaatcacttgaaaagacaaaacagaggaaaaacctcagacaaaacaaagcatgtcaaaagacaagacaactatatttcatattgttttttaatgactagtattttaatacattgattattaaaattaag

SEQ ID NO: 311737 - DNA, 1057 bp, Cannabis indica
aaagagttttatttagggcataaaacccaacaccccaccattctaccaggcctcttttggtgctcttaatatgtgctggccgacctaccttttgtttggggctggcaggtacatagccatttttggctggcgagggtgtggtccggccagactctcctggttggtaattttctcgtatcttgacttgcccgagtgtttgggtcctttggcaattaatatgttgcgcatagtgactttgtttacctattgacacgttgtattctacctggctctggtcttgcctacgtgaacatgccacgtcatgtgaacaaaatttagaataataataatatatataatatttcaatattattttaataatacctattgtaatactaactcttctcaatatcaatcaaaaagagaagacaaatctaatattagtgggacaaataattactttaggtactatttagtactagtagtaattaaacttaagcatgcatgagtagatactaattagtattttttttatatattatttttatttggataacaataactagtttacctaaatatttagatactagtacacaatatgataccattaaatgtataattacatattattattttgaatactaattagcatcaaattacacatgatattaatatcataatataataacaaacaagtagataaataaagaaaagatttagataatagttaatcaaaaaaataaaattaaaaaagaagataaagtaaatgctttgaaaaaaaaagtaaaagttattgatttaagtagttaatggtatgataaaatagttattaaagtttaaaagttggttaattaggttatttaatattaacatatgagtataataaaatttgtcttatataattatttgtattttaaagtgtctacaagtaaatttctttttgaaagtttaatacatgtgatataaatatattttaaaatttaataaattaaataaaattttatttttatttataagaaaaatataatttaaaataaaatttatatttttttacatactaatttttttttcttccttt

SEQ ID NO: 311738 - DNA, 1413 bp, Cannabis indica
aaaactaattggcaatgagtgaagtagcccatgttcttatatatggctcaattctctaccatttattccatgtggaacaatgtccacaatagtaacagtcgatatttagcataattgactgtttataactgacaaaaaaaagaggggaaggaataggcgactattctaaatagtcactaacaatttagccatcagttttaaacgacatatccaaaaaccaaaaaaaagaattatagatctaaaatatatctcagatccaccaccaactataaccaaaaaaatgttcgaacaacatattcaaacacagaactaaaacaaacgaaactccaattaatcaatatacaaaatacattatcaataaaatatcaactagtaaaaattactctttcaataacaacaacaacaataataataaaaatcccagatctggctgcctccgcctccatccacctaaaaaaagaaaaaaaaataaagagagagaaagatgaacaactcacctactgtggagacgattagagcgagtgacgccagagagagagagagagaactatcatgctggtgtgatggtgcaatggagggattacatgagggttcgaccaccctacatgcatgaaggttctctaagctaagcatttttaaacttaaaactataactcaaagaaattcgtgtttcaacagcgggaactatgacaataggagtatgatcacttgaggaaacttcaatattatacaacttagcctcacgaaaaatctcaaccgagaataagagactaatatatgctttatccaatcttacttcaacccaacaatgagcagtccctcttcccttttctcgtgtaattaatggataccccgtaagctcaagatccactagctcgcaatcacgcattgcacattgaagattactgtaatccctccatttactagtaaattatttggatttgtctgaatgaaatccccccacaaaactccctaccatcttcaccaccacaaatgacatacttctcggttgcaaatcatgtttgaacccacatatccagtttattcaaaggtactaccttagggatgtctccctatttcattcgagtaatgatcactgactgttttataagttcacaggttaccttttatcactcgaatatcaacttcgtgatagagtagaaataaattatactccaatttcttaatatacattcccatgcttaattttcataagaaccatttgattttagaatatattgaaaccagagacctttccaaatagaagctttcctaccaatcaataactcatcaccatcacattcattatcctcaataattttttttcatcagcttcatcttcaatggaataagggtttccattgattctccaactcaccaatcgcattgctacaaataacaaaccacaaatta

SEQ ID NO: 311739 - DNA, 1532 bp, Cannabis indica
ttacttattatttgacaggaacttcaatccataaagaaataattcaactatctcctaacatgcctagcataaacacagaaaaatttccatggactattgatggttcaacaaaacagaagagattgtttcaagtttacttcaaagcatgtcaagcctcagaaatagctgaatggtgtctctgtaatacaacttatgatatcgaatcttctgcgctttctttaaatccaaagtttctttcaataggcccattaatggcgaaccaagctaataactcatcagatattccagggtcacaattttgggctgaagacacatcttgtttaaattggcttgatcaacaaaagccctgctcagtcatatacattgcatttggtagcttgacaatccatgataatactcaaattcttgagctagctcgagggttagaactcattggtaagccttttctttgggttgttcgtccgggtttcgtgtcccgtgatctaggacatgagtttgaccctcttagaattttgggcaacaataattttggaaaattggtaagttgggcacctcaacaaaaggttttgagtcacccttctattgcttgttttgtaagtcattgtggttggaactcaactatagaaggtttaagcaatggagtaccttttttgtgttggccttattttggtgatcaatttttggataaagcatatatatgtgatgtttggaaggttggaatagagcttgaaccgagcgaaagtggaatcatccttagtcaagaaatagaaattaaagtgaataaacttttaggtgatgaggaaataaggaaaaagtctatccaattaaaggaaatgatactcaagaatatagctaaagatggtcaatcttcaaagaatttggacaaatttatcaaatggttagaggagacataatatattgatcatatccttctagttttgtttggagttggctacaataaagacgttaagatttgactcaaattatttatttctttacttctttatctatatttgtaaagttgcaatttatttttgagtgttaaaatgaaactcttggtgatcaaattttgaagagtcttctagaagaagctttgaaatgtcttggtgcttaaattttgtaactttataaatgtgtattttgtgtgttaaaggagaaaaatataatgagttgtgaaaaaagaattgtgaatttattgtgtgatgagagtgaagaaacaaattaatatatagtgtattgggatttaagtagagagattgagatagaacatttatgtaattttaaagtgataagtgaactatatcttttttgtgggtttgctagttttaccaaagagtgtaaattactttacttcgtttttttattattttattgcgcttgaagtttattattttttttcaataattataaatattttctctaaatttattaagggaaataatattaattacaatttccttatctatttatatatctatatatattataaaggaaagcataaacatgtttaggtggcatcttacatttttttt

SEQ ID NO: 311740 - DNA, 1386 bp, Cannabis indica
attagcttaagtttaagcatcaatagcattttagtcatttggctaggggattatgtggccttttctagagctagacagctggtttttggaaattaattcagcatatggtttatctatttagaagaaaataaaaaaattaaaagaaaaaccaaaaattaagagaaaactcatttccctttctctctctttgttcagctcccacaagaccagaaggaacccaaaaattttccttttctgttctgaggattcagcaggaattaagggtgattcaagttgagatataccctagaacctcttattttgtgaattccataagttttagttggttttggcatgtagttttgaattgttgtggctgttaggatttgaatgaattgtagttcgatttttatgttcactttgaattagatttgagttctagttactggtttgggcgattggtgtggtggatgaaaaagtttgagtttgaaaactcaagcttggttcatccatggcatgttttgattctgggtatttttctggattctattacttggattatattatttgaggtcaatataggtgttctagaagttttggtgaggtttagacatgttttggacaggatttcgactgcttgggaaaacctagtgcagaccgattaaccggttttccaggccctttaaaaccggttaaccggttctgggacaggtttcccaagcaatctattttgtcgatttgtgttgttttcagagccttggctgggtgattccttgttatttagggtattgtagtttcaattatcaatattaaaacctttagttggaggtttgagttcccgaattagggttttgggcgtgtcgtttacccgtttatgttatgtgattagggcatccatccaacacgaagttttccgttcaggttggccaactcacttgaattcggaaacaagataagaatatcatagaacatattgtatatttgtgaatgtatatatgtgtgtgatacatatatatatatgcattcttgatgtgattcatacactaccaacacttgtatggtactagtacagagtgcattggtatagcgtataatgtttaaagagaatgttacggtgttaccaacacaagtatggaaaagtacagggtgtgtgtggtacaacacttagtggtactcagggtacgagataaaccctaccaacactcgtaccatattggtacgtaatgtatatggtatagtggttgtactctagtaaataacatttttactcatttgttaagccttgtaaataggtataagggcgcctagatacaaatcaacattatattatctgttatatgcttttcttactgagtctgtcgactcacagttgctactttcatgtgtaggtaaaggaaaggcgaaggc

SEQ ID NO: 311741 - DNA, 1517 bp, Cannabis indica
ccacacttttacggattggatttaagctattgcgtagattggattggatccaaaagttgaaattcgcacttagtgcagatgggatgcactatgagagaaataatgcgaattgaattggatgaacaccccaatgaggacgctctggtatatgattattagtcaaattttgcaccaagcattttattaggatggaaagatttttgtgattatttatttatttattttttgtaatttcattcacatatgtatagagagctaaaagcttacatgttcttggaaatctcttgaaacttccttaagctctttagggggtgacttggtgacttatgaagcaccttatcaccagcatgataggggctcaattgtgtactatcttgccctatcaaggtcatataataataaaatgatatttttccatgcttcttatgtatgcttttatgttgcctatgtgatgacatgttgcctttgtttggtcattgtgtgtcgtttgccgatgtgtttacttgtgggttgtgtgacattggtccttggggacgacttatgttttcttgctcatgtttcttgttttcactcaacatgtgcaagacatgtatcgtgcttaactattgagcttgtttgcatgtaggcgtgtttaggctaacttgctaggttggtgtgtcagcaagtgtcgcacgtttcgcctacttgggaatgtccaaatagtcgaaccgtgacaattggtatcagagcctagagaagggaagcttggtagcacatttatgatggtgagcaacactcaaagaattgaagtgtttgagaagcgcataaaggaactgaatggactagatgagagggtcagggatttatcctctgaagctcgtaactcggggccaacagcaacacaacaacaacttgccacttttgctcaagattatgctaacttgttggttagggtatccgcaatcgagaggagagacgctgctaccagaatataaagttcacttcagatggaggatcgcattagggcattagaataagcaacaacagacatgtagactgttatcattgggctacaaaatgggcaggtcgcataaaaagactccctgagtgatacaatagaagattgtcatgcatctatcacagattttcaggaagagttagcggaaatgtcaactaagctaaatcttactatgatggcagcaaagcgggaaaatattggagggaacggaggtatggagtatggtcgcctgagagcaccccaagcccatattctatagaggggcgagggatgcaaaggtgcttcaaaactttctgtttgacatggagcagtactttagggttgtgcagacggactctgaagaagcaaggtagcgatggctaccatgtatttgtccagggacgctaagtaatggtagaggacgaagtacgaagacattcaaagtggcaagtgctccattaaaacatgggatgaccttaagaaagaattgaatgcccgattcctgctagaaaattttgcctacttggttcgacgccaattg

SEQ ID NO: 311742 - DNA, 1044 bp, Cannabis indica
gacctaacttcaatccgatggacccaaatcgtagcccctatatgtttccactaccaagatggagatccacaacgaagacatgacagtgtttgtgtaattcttgttctataacatcttcaattgtcttttggcaagtcttttgatggtttgtaggcattttcttggttttgagcttggaaaccttattgtacactctacaagagcactgtcatacagggatggcagtggtcgtgttccaccttttggtagcttctctcatttgtcaagtgatctttgatgttggaaaacacaatttatccacttctctcctttgcattctcattgggcgaaaactgtcatagtggtgcgacagtgtttgtgggtttgtgctaacagtgccacaccattatggcagtgttcgtgtaacacccttgggccttatttcttgtgaaattttgactttattctcaagtcttggtattcttgtacctcaacaagtttagtacttgttaaatttctcctcagattaggttttataacaaccctaccttggattgctaaagagataaaccataggactaaaccctaggggcgaaaactgacctcttgggaatgtcagtgctcgccttgcactgttccaatgccatgtgtgttggtttttgtggtacttaatcaagtgtgcagtggaagtatcttaatgattatcatcgtatcacactgtagaatttccatctgtatatatattaaatcaaaaaatgaaaatatgagtagaaaaatatttatctcttgatgaactatcaagtgtccttgttatcttttcgtaagttgtatcaaagaaacagaaatgaaatgtacaccttgatctttcaaatcaaccacaacacacaaagactagtgtggggtgataggatacacaataatatgatatttttattttggtctcaacacatgagtgagaattctaactggagagaaaatgatgatacaattaacttttttttaggtttcttaaatatatcgtatatatagatttaggtttatatttgtataataattataactgtt

SEQ ID NO: 311743 - DNA, 598 bp, Cannabis indica
ccttgattctcctaaccacctcagtcactctcggttcctctgattcccaaagcaccaaatttctggttttccaaatctggtatactgtcgaagccgcgacagcaaaccagaagcttttcctaaacctgccagcctttgatctctcaatttatatcaagatcacatccaggtcaattgtttcaactttccaattcagccaacctttaatctgcagtagacattgtgaagacaaggaataagagaaaaaaagatggcattttgtctcagaatgtgtactgcaaagaagatagcagtcatctgaaatcacattaattttcttcagccttgctctagttcgaagtcggtcttgcactgtagtccacataacatagctttgtcttgggatattttgcctattccaaactccatgattccaaattactttcctttgagggggacaaaataaattgtagccattagagattgtgtatcgtgaactaataaactgctgtaaactcactttctccttgaattgatctttgacataaactaattttttccaataccagctcgcttgttgtggggcttggtagctccaccaatcctccccttttatata

SEQ ID NO: 311744 - DNA, 1520 bp, Cannabis indica
atatatttttttgaaaatattttctttagatttaatttatcagtattttgtaggaattaaagtgttgttgttgaagaaaagaaaaaaaaagaacctaagcccaaaagggcccaacagccaagcccagccggccatagtcggtgatgtggcagcgatccattggttgtggctgctcgtttttctcgttctctcatttgtcttcagcccacgtggcttctgctgctatccaagaatcaagatcttctattaaaaaattgtgttttatagtgtattaaaccaatctctcattgtgacacatcaattaattggagcattttaagagaaaaaaactgtaaagatggttaattttttaattattaaaaaattagttaacgtatcaaacttaaattggtttaacacagtatcagacacaactccatcacaccaaagcccatgctaatgctatgaaccaaatcaaagcaattataacatatatattgacttttcattaccaacataatcaacaaagatactaaaataataataaagataagatacattattattattattattattattattattattatttaatccaaaattatttttattttgtattttagtcttttttgtaactttataaataggatctcatttttagtttgtaagatgtataatttttagtgtaaaaaattttatagcgaaattttctttactttccttctcatatttctttttaaagttttaatgagtaatgtatgaacataatagtttaatctttcttggaaagttagtagatgactctatatgtcaaagtgagattattttatatcttttattcacttattgtgatatttatttgagtaatgcaagttcttatattctacttttatttttatattcttcatctatgtaatactaaatatatagacttaatcattgctctttctatatatttttatttaatgattatagtaaggataatattgctcatttctatcttttatgttcattttatttacttttggtcaaatgatatataggtttagtcatgctctccctatgtgtctaaaaattaataaaagtaatattaatgtttatttccttcactatcaccaccatctccatctctatctctttgtcattatttttactaaaaatatatagaattagtcatgcactgtctatgcgttactatttagtaaaaataatatattaatgtttaatcttttattacattactgtttgatgtataatgtcatttctaagttctacataagagtaaattattttttatattttcaagaacttgtatgctcaaaatataatgaactttaatattatattattcaactttgtgaatcaaaggtgtacaaaatagctaaacaagcatatggatgattcttgaagcctttctctcttttactattaattacacctttatttgttttcttttaatatttaataccaaagtaaaaatctctaaactcatttggttacttatttgttactttttattaactttttgtgtttatttt

SEQ ID NO: 311745 - DNA, 831 bp, Cannabis indica
tgttaccaaacgccacctaagttcatcgataaattatttttaatgataataattatgtttattaataatttacatgaacaacaatcaaactaagaagtaagaaccttaaacccttttatacaaatctatatatatatatgagtaattagcggtaaaatttttcaacttacttgtaaaaaattatcaaacctcatattttagtaggaaaattctctaaagtactgttccgtttacatttttaaaattacatctgtccaacttcgttaaatcttaattttacctatgtggcaagacaggtcattcaattattggccaacatggccacatttacgctcacacatcgaagggtcataccactctcaaaatttacacccacccacttgctgtcaaaaaaaaagttttatttataaacatttatttaaaatctcatattgttagattgggtgtaattctctctatatataagcaccaacaaaaatctacatcatttcaaaatagatagagagttagagacatacaaatatcctccaaacttgtataaatatgtgcccccaatttttttgggattttttcaataatatacctaaaattaattttatttataaaaatacctttaagaaaattatttgcacaaataccgtcgtgacacgtcaacatgcataccgaaattcaaaacaattaccgaaaatggaaaaaattggaaaaatctcgtttctagaaatttttcgcttttggggagatttgaaaaaagcaaccatttagttgttttttatgtgaataagatattaattggtttcttttttattaaaaaatttatttcaaaattttaca

SEQ ID NO: 311746 - DNA, 951 bp, Cannabis indica
gccccaaccacgtaaaagtccttctctcaatttcttaaagctcagtaactttataatattttattggttgccgaaaacctcggtcaacaactgtaatctcaatttagctctaattaattcataaaaaatctaacagtagaatccaagagtagcgaaatcgtactggagtctattaaattgattgtaaaaagggtatgatattctaattttgcatcaaagaacctttgaagtattattttcttgatgatgggagttcaggagtctgaaaatacaattaccattacctgttatattatcaactattaaaacagttggtaatatttattaactatttctaatttggtcttcatcaaatcaaaaattatataattggcatccacatattaaaaccatgacaatcatgtccttaagtgataaattttattccaaaatagaccacataaatttgactcatttatatgatgacccaacacacatttttatatacacaattgtgatccaaataacgaaatttctaacaatcttcttctgtgtcacatatgtatacacaattatttaaatacacaagtttcatgaaacaaacaaaaaaaaaaatacaaaggataagaaagacaaactctcactgaatctagatatcctcatactctaaaacacccatatgagcagtgtgctcatgaaagaccttgggtggcaaatccttagtaagggggtctgcaatcatggagtttgaacctaagtgttctatacaaatctgtccattctgtaccatttcttttacaataagaaacttgatgtcaatatgttttgacttcgtcgagctcctattgttattggaatataatacaattggggcctgtttggtacgcatgactggattggattagacaggctaatttgtccaatccagtgtttgggcatgttagaagtctggataactaatccagttaacct

SEQ ID NO: 311747 - DNA, 1016 bp, Cannabis indica
cttgacaaccaataaaactcaatgatgaaccaaccaaactatactctacacacactttgaaagtgtcttttatgtttattgtttcttatgttttctttattttgatttttgagactctttttctttctttctttaatttctgcaatctgatgaacctttctcatagaaaaataaaaaatttaactatggtgcataaaattgtgtaattgtgttgtgatcagagtaagattctttattgttgttgcttcaataaacacaaaaacacatatatttatcttaaaacctagaattttttaactctattcttcaatataggaataaattatttaagagatgcatgttaggttccttccatccataagagatgcatgttacctgatgaagaacacaattcaatcaaacccaccaaaactttagataatttcttttgtaagaaaacaaaaataaaaaatatatgaatacagaaataagtaatgatctaatttgagagattagattccattgttagcaaaaaggaggtgttgttaggaaggaagtatgaagaggatgagtgagtgagtgagtttgtttcattatttataagcgttacactaacattagtcacaagtgtgaattgtttaaccaaaccagttgcatttttctataatctgtgtgcctatacagatactatgggcctatggtccaatgggtcggcccatcaggcatatgagccccaaagtatctcaaaaagcccacctaaaaatctgtgcccatatgacttgaagtgtgtattgcttcaccaaactaatggtatcttttggatgggcttttttgagatatgggctccctatgggcaacccattgtgccataggcccatagtgtctgtataggcacacagattatataattattttacaaatacacaaaaaaaataaaaaaattacaaaaatacgattttacggaattttaaatatttttacgattttttttattttatttacagaaatacggtctttatatgttgtactcttgttaa

SEQ ID NO: 311748 - DNA, 2333 bp, Cannabis indica
aaggaacactttttcgggttaagcttcatattgtacttccttaatattttaaagcacttcgtgaggtccgtgatatgacttccactctttactgatttaactaataaacatatcatcgacgtaaacctccatgttccatccaatctgattcgcaaacatttaattcaccaatcgtcgatatgttgccccagcattcttcaacccagatggcatgaccttgtagcagtaaagtcccatgttagttacgaagcttgtacgtttcggatctgggacatgcatttttatcaggttatatctagaatatgcatccatgaatgacataagctcgtgcccagtagttgcatccactaactggtcaattctgggtagtggaaaataatcctttgcgcatgccttattcagatcagagaagtcaatacaagttctccaagttccattgggttttgggacaagaacacgattgcctatccacgagggataaaacacctcacgtgtgaagttgttgaccaacaacttatccacttcctatttgagtgccccttgtctctcggaatcaaagggtctcctcttctgtctcttccctgggtagtttggatagacatttaactgatggcaaataatattagggtcaatccctgtcatatctccatggctccaggcgaactgatcctagttctcccttaaaaaacttattagcttctatttcaattattcgtccaggtttttcccaatgtaaacacactttgtgggatttcttgggtctagaacaacttcttccaattcttccattggtttcaataagtttttttcatcttgaattcgaggattaaaatcttcatccttcttcttgccttcttctgtcaagatttccattagctcgtgactgacttttctgtgctgcagctctatgcgataacattcgcaagctagcatctgatcacctcgcactactcccacacccactggtgtctgaaacttcaaggataagtgcttgatcgaactaactgcccctagtctgattagtgttggacgacccaacagtacattgtaagccgatggcaggtcaataaccaaaaagtcttgcataattgttgtggacaaaggtgcttcgctcaaggtcaatgcgagctcgattattccttgactgagacactgttgccggtaaatccgcaaagattcaccatgcaaggtctcaatttagcttttttgagcctcatcttcttcagtgtttccctgtaaaggatgttaactaaactcccgttgtctaccgacaccccttttatcctcttgttggcgagctggatggtgatcaccaatgggtcgacgtgagggtacctcacgttcttttcatcttcctttaaaaaatatgatcagaggctcttcagtttttactttcttggaaagttctggagcaaatgcagactgctcgttcttcacttccttcacatacctcttttgggcattattgctctctcctacaatatgtggcccttccgagataacaaggatatcctctccttcaataggaggaggttgtaatccctagttgccagggttgttgggcgatttagctggttatgtccattgccctgcctctccacatattgtttgaagtggccttgcgcgatgagactctctatctcatctttcaactgtcgacactagtttgttgtgtgcctgatgtcttagtggtacttataatatctatttggatctcttttatgctttgcgtgcctcatgggctcaagtttactgaatgcaaccttgtgctcatgcacgaggtagatattctcccaagtttcattaagctcgatataaatggtgtaaactggcacgtacttatcgtgcttcttttgtttcttcttatctttagatgaccccttagagtcgtcttttctttttgagccagaggcccctaggttatcaactttagtcgagacagtacttgttgaagcaatgctaggtttgcttcctgagcaagtttttagcaagttcatctctttccgagcttcttccttttgaacaaacacctgagcccttttgttgaactcggtgatatttttcactggacgaccctgtaggcgtcctaagtttgcctccagcagtggagagatcagtagtgatccccgcctgaagggtagtaagctaggtactatcatccaaatttcttactctcgcagcagccttgctaaaattactaaagtacgctttaagcgtctcgctaggtttttgctttatgttggtgagtgaggacgcttcaggtcgcttattccttgcagcctggaactgctttttgaagtccttagacaattgttcccaagaagtgatggaat

SEQ ID NO: 311749 - DNA, 841 bp, Cannabis indica
ataataataataaaattaaatctaatacgattcaattatatttttaaatatataaaatttaatttatttttaaatttatttataaaaaatatatctaactaattttattaaacaataagataagtaaataaagttagatatttaaataatataactaataatctttttacaaagtataattaattattgaattaacgtgtaattcaaatataaattaagatttatgtataaaaataattatttgattttattgataatattttaaaattaaatttaaatatttaaatatattttttttaaaataattaattgattgatttaacggtgtgagttttaaccttttaactttaaaagaaatttttttaaaaaatccattaaactaataatttcgttagataatcaagatattggttggattagctagagttattattatggttgtatattaacaccattatttttttttgaaagctattaacaccataaattaattagctatactatacgtaattatataacagtcaatggaaaaaaaaaattaataaaaagaaaatttaaaaaattagttgttgctagttttaattggactactaaactttataccctgtagtttaaataaatgtcggtgtcgtcaatgcaggactacatattttatttatgattactattactatttaatggtttctttctttccttgatttattctacttaattcacttttgacttcaataattttctcttttatatatatatatatacatatatatggaagaggtttcaatggttacatttttattgtaaccatcatggttacatttttttaagccattggattactatt

SEQ ID NO: 311750 - DNA, 1182 bp, Cannabis indica
agagagagagagagaaaagagaagaaattctcttggtgctcacaaaaatgtctttttagaaaaacaaaagcacctatattcattcatttacaaagcatctttaagattatgattttgctttcttcattggtctttaaggaccatcattataattctctccctttttatctttattttatttttagctttttttttcaagcactctttttcaaagatcattgttacgaggcaccactaagatggcatcctctaaatagtttgcagtttcccataaccattatcgaaataaaataagtgagactcgatattaaattgaaccagtagcgatatgacacctcgtaagggtgctaggcaccatgagtgccctttagcattttttatttttatgaggcactatagtgtctagtacctttatgaggtgacgtcctctaaatggttagcaatattccataatcattatcaaagtgaaataagtgggacccaatattgaattacaccagatatatgacatctcataagggtgctaggcactatgggtatcttttagtatttctctttttgagcatttatatgaggtactgtggtgtctaacacccttatgaggtagcatcctctaatgtttagcatttttccataatcattatcaaagtaaaataagtaggacccgatattgaattgcaccaatagcaatatgacacctcgtaagagtgctagataccatgtgtatagtttctagcacccttatgagatggcatcctctaaatagtgtaattttcaattatcattatcaaagtaaaataaacgggacctaataatgaattacactagtagccactacaagcgccctttagcatttctctttttcaaactccaaaaagccactccatacataattgcatcattctttcttactttaacaagggcatcaatctaataaatccttatactttcttagtggctgttattgtcattagcaccaaagacaatgatagttactttcatttcatctctttataagaaatggtttcaagctagaaacttttttaccttttctttcttattaataggaaaaacttattaataacagaattatgtgggttattatgtgggttatttgggttatttggctcgaaagaaataacagaatttttgaagggattgaagcctcagttgaagacttgt

SEQ ID NO: 311751 - DNA, 822 bp, Cannabis indica
ggtacaaattatgagttaagatacgatataaccaaccaaaggagattatgtggacatatacataattaattagctaatgtaatactttataccacaaaagttaattacaacaaagtttatagtgattaaatataggagaattactttatttatcattctttaaactttttttaaaaaaagtttaaagtttttgtgttcccatgattgttctgatagtttttatgtgggttgctatgtgaattttgattataattttaattattttgttagttgttatgtgaatttcgtaaaagtacaaaaaaaaacttttaaagtataaaaaaaaccccttaaatttatcattaaattttctttaaaaacaaactattaaatttatgtaattatactaaaaaatttaatgcttatatattagtgttataatcacaaatttttataatttattatttttgattttatcaaattatttatttctatatatactatttccatatgcaaaattttactatttaattacaacattattgaaagttagcacttaaataattggtaataattaatataacaatatgctagcaattatactaatatatatatatatatgcagtttgataccaataaaaatattgttaaaagagaatcattagatgatgtatttgtattcttgattttcttttgaaaacttttatgagttgtgaacttgtgatcaagtagggttcgtttggtataccgtgttacaccgtattgtattatattaaattatattttatataatatttttatttaaaactatatgtggtattaatttttatagacacctaaata

SEQ ID NO: 311752 - DNA, 552 bp, Cannabis indica
ataattatttttatttaaaactatatgtggtattaatttttatagacacctaaatatataatattttagtataaattaaagtttagcatattactatatataaatatgatatataatctaatttaatataatacaatacaatacaatacgatttaatacgacattctaaacgagcccgtaaattattgagtagtaattacaacttaatttcatggcaagaatgatatgaaaatttagtgaaaatagttatattgagcaatgctacaaatctccaaatattatcataaatttgaatggtgtagcataacttatatttaaaatacttaaaaaaaaataaatataaaataataagataattattataatatgattaaaaatattgcggcattcgaaaatttgcataatattaaataatatatatatactagtaatcgatacgcagtaccatcgtagtataataataataataattataataataataataatatattttttttttgaaatcagtaaatatatttctttaatttatagtaattaattttaagaaaa

SEQ ID NO: 311753 - DNA, 1766 bp, Cannabis indica
atatgacagatcaagtaaacaacctccatgaccttttgccatattcctagagaaatgcagaattgtcttgcaatacataatgccaaggcaaccttggatgaatggtgatgctgggagataaaatagaatgcttaaggacatggtaagaagcatgattaatcatttttctttacctgaatcactttggaattggcacttaagactgcagtctatattttaaatagagtaactagcaaattggtagataataaacccctagaagaactatggacatggaaaaagtctagtattaaacacttacatatttagggttgtccaattgaggtaaggcaattttaggccacatgaaaacaaactagactaaagaataattaactactattttgttgggtatctagaaaggtcaaggggtttaaagttttgagatccctcaaccaagtcctttttcgagacaggaaatgcgagacttctcgaggatgttctgtttgaggaggaagataaagtaaggaatgttgttttttttaagagaaataaatttttctacgaaatattgttcttgacaatgatcaacctattgacattgttaagacatatttgaagacaacaatgagaattcacctatggaattccctactcaatatcaaaaggctactccaaaagagcaaactcaacaacatcaagaggaagtgacacataggcgatccactagagagaaaagaagtataatttcaaattattttattatgtttcttaaagagcatgagtttgacataaggacgatggaagatgatccaatcaactaataacaagtcaaacaaagtgttaattatcaacagttgattgattccatgaatgatgatatgaaatccatgagagacaatggcatttaggatcttgtcaattcgccaaggcttttatacaaaaggaaggcattctccagtgtcatcgaaagacttcttttagaataattatgtcacttttagctcatcttgaattagagttacactagatggatgttaagacagtttctctcattgacgacattgaggaaatgatatatatgatgcaaccataatatttatgtcaagttatccaatgtctatggttgcaaactcaagatccatctctggtctcaaacaagcttctcatcaaatcattatctcatacagatttaaagtcaatattattgacgattgtgtacatcacaagttcagtgggagtgaattaatgtaaatcttattgcaaaaaggagacaagtttagtctcaactattgccccaagaatgaaattcaaagagtaaagatgaaagaaggttccttatgctttcgctattagaagtcgtatgtatgctcaagtatgcgtgcatctagttttggagtacatagtgactatgttgggaaaatacttaagtgatcccggtatggatcattagaaggcaacaaaatgggtcatgaaataattataaagaacaaatgattataagcttacttatcggaggtcagaaaatttggagatcattaggtattctgacaacaatgggttgccaagaaattaagagatccacttctggctatgtctacttgttgtttggaggagttatatcatgcaaaagtgctaaccatacattcatagctcatcctatcatggcaacataattcatagcttgttatgagacaaccaataatacaatatgtaacgtcctcgcttcaagcctccattgggcccttacacccacataatgatggctcttatacacgagtacgtca

SEQ ID NO: 311754 - DNA, 1859 bp, Cannabis indica
ttcaacctcagtccatttagtgattaaatcgacagctagcactgcgtacttggctcctctttgccctgtgggaagtgctccaattaggttaatcccccatatagaaaataggtaaggcaaggtcattattctcagttccgttggtggtacgcaaagtatatgcgagaatctctaacacttatcacactttttgacaaattcatgggtgtccatgttgatggttggccagtaatatccttgtctaatgatctcttttgaaagactttgccaacccgcatgatccccgcaaaagccttcatgaatctctctgatgatctcatttggttctgtgggaagaacacaccaaaggagaggtgtggaatagcctcttctatacaacttgacatctactatcgtgtagcgtagcacttaatacaagagttttcgtgccttgttcttgttaattggaagttgttcattgagtagatagttaaatatgggagtcatccatgtgggcgagctatctatcatctcgacatcttcctttttgcatatacttggctcatttaacatttccactagaaccaagtttagttcatccaagtcattctacgaggctaattttgctaaggcatcggcattagagttttgttctttttatatttgctggattttgaaataattgaacttttccaagttcttccgaaatttctctagatacttggccatttttaggcgcttagccttgtattccccaagaacctaatttacaatcagttgtgaatcactatgacatatgagatttttaaccttcaacgcttcagctacctcaaaccaaaaatcaaggcttcatttttagcctttttatttaacgcgtcaaattggaatctcaaagcataatgaaacttaaagccttctggaaaaattaatatcaccccctgcacccgagctttgctcgtcggatgcaccatccacgaataatctccaagtatccacgtctcgcttaacaagcagattttcctctggatttattccttttatcaaaaatatgccaaagcttggccattgatggatgttcgtgggtgaaaagttatgtcaaactaccccagttcaattgaccattttatcaatcttccaaaagcatctagttttgataaaacttgtgtcaagggttgatcaattaacactttaattggatgtgcctggaagtatggccgtagtttacgagatgcgtggattaggcataaggcaagtttttcaagagggggatacctcgattctgcccccagttaccttttactgacatagtaaacaggttgctggtgctttctctcttctcgcactattgttgtgctgattacactctctgagacaaccaaatagaggagtaatgtctctccagttactggttttgccaaaattggaggtgttgacaaatgccttttaatgctattaaaggcctccttgcattcctctgtccattcgaatttcttgttgcctcgcaatatattgaaaaatggtactcttatcagttgacttcgaaatgaatctgttaagtgctgccattcttcctgtcagggcctagacttccttaggtttggtaggtgatggcatatttatcaaagccttggttttattagggtttgctttagtgcccctcacgttgactatgaatcccaaaaactttcccgaggaaactccaaaggaacactttttcatgttaagcttcatgttgtacttccttaatatttcaaagcactccgcgaggtttgttgtatgacttccactctttaccaacttcaccaacatatcgttgacgtaaacctccatgctctacctgatttattttgcaaacatcatttcattcacaagtcgttgat

SEQ ID NO: 311755 - DNA, 1449 bp, Cannabis indica
aatttaattaactccaagtaaaaattgtcttacaaatgacttacacattaattaaacaaaattaaaccacaaaatatttttgcataaatgaaaccggtactttgtttatttggtactgtaaaacaaagaaaacaatcaattagctaaattctctaatagtcttccctttatccaacacagcaagaaaatattttcaactgaattccagaatgacacaaccagaactgattcagtatcattgaaaatccttaaatatttgatgtaagatagaatcctaaatcaacaaataaaaagggtgatataaacaaaaaagaaataagatatttgaaaagtaacatacacaaatacatgtgtatattaactctttaaaatttacatgcataagaaacaattgaatcaaacaaaagtttcttcttaatggatagaatcaaccaaagtagtttacaatccatcctatgagaaaatcttaccaaaccatgacaattgacctctcgggaaaggcatactctcaaaaaaataatgttctagaatacatttaatagtatgttcatggattcattaaacaaaaaagctgtcaatgcattggactgtactcgatactcataggagattcaattcaattgggataaacttaatcattatacatgatatataaattgtatcatgctaaatcgtacaatacgcaggaaacaaaaaattttgacaataatacttgcaaaagacttgtcaccatatttactgtataattaaggataataattctcagactaggcaacttattcaattattttttctttaaacaataataataactaattcatgacaacagtaccaaattcttacctacgtagttgtttctagggttggcataaggctgcaaggatttcagtggcttcacaacaccccagagtttcttatttcgatatttctgtttcaatgtatcaaacattcccataaacttatatacacaagaaaaagaccagaatttgaacccatacaagctagttgaaattcattgtaaatcatcatttgcatacctgtcttctacggataaaagcaaaatcatcacgaaacctggctagggcactgtaatgaaccaagtcgacaaaggaagaccttgcgatggagagatggggaatcaaagacacaaaagacaagaccacaacaaacaatgaattcgtactggtagtggctaaccaattgtcattttggttaaaagggaaacctggtcggtgttttgatgttctcttccattcttggcttagggaccgatgacgttctcagggtacagttggcgacgagagacagagagagagagagagagagagagagagagagagagagagagagagatagagtagagagagagagagagagagagagagagagagagagagagagagagagagagagagagagagagagagagagagagagagagagagagag

SEQ ID NO: 311756 - DNA, 778 bp, Cannabis indica
ttccttctgcaaaaaatgacatattgcacagaaacacactaaaattttaaaggaccacactaagtgtttagtgtcccgctctgttaccatttgaaaaattgagtttttgctaatgccaatagttattacagggaaatagtaaaaatttaactgtaattgtctgcagcaatagaatgtaattatgttactgtagaactcagtcttatagaaacaaactaaaatgatcagaacaataaattcagcagaattaaaaataacaacagaaaataaaatcacttgacccaagagatttgtacgcagtatcagtgttcttttgtacactcctagtccacggggccacgcccaaagaaagaaatcaattagtaaactttcaaaaattacaaagacaattgatttatacaagtttagactccttctaaatcttttgacgcaatcctttgtaacacacttcacgaatgtaatttttggaccaccatcaagcagcgaactcccttcgtcattgaggtgtgagtgcttacttcctcccaaagtaaggcatgaataagtcctctctcgaagacatttctcttgttcaatcaagttgttgaaactgaccctaagaccagtgtaagaacaaatatacaaaaactaaaacttagatgaacaactacgtttttacaaaaagaactttctcttcacaaatgaaaatatgacaaaaaaaaaaaaaaaaatgaaagctagaagagttaaccgattggctgctctgtaggttctagttatagaacataggaaccataga

SEQ ID NO: 311757 - DNA, 1035 bp, Cannabis indica
agggcacaaaacccaacatttcggtgagtgcaaaaattgagatttttgtgtttcactgtttttggaaattcttaggagatcaaaaatcgtatttttgtcataacttttcacttgggtgtctgttttggacgttctatatatatactattttaaagcttgcaatgagctttattatatggtgtatgttttagagccaatatataagtttcattttagtatatttgtgctacgaggtttggtaagaaaccctgcgttgtcctttgcaattgttaagtagtgttttgggataaatacttattggtttaccgttattgtgacttagggccaagatcattgggtatagttctctacttgggctggctgacatgtataaatctaggttaaaggtaagaaaaatatattgtactgcatatcaatgcaattaatattgttgagaattgattgatattaggattaagttatgattattattgttatataataaaaagattgattaattaagcaatgataatgtgatgataccatgaatatgatatacgggctcacctgattaggtgatgtaatatatcgggtgccgtaccttattaggtatgggtggcagtgttatgaaaattgccaagttatggcatagaatgaaaccgttgtatggtttcctcctggcgatgtttcgagcgtaggcacgggcgtcagtgatatgaaaattgccaggttattgcacagattgaaatcattgtagggtttcctcttggcgatgtattgagcgtaggtacgggcgttagtgatatgaaaattgtcaagttatggcataaattgtaactgatgtagggtttcttcctggtgacgtactgagtgtaggtacgagcgtcgatgacatatgagtaccgacagtaggtacgggctcccctcatttggtgatacaattatgtaatatataggtgtcaggctatagtacgggcttgcctgattggacaatgcaatacctggttattagaataaagtatcgacttgcttaattaggcaatgtgatgtaatgaa

SEQ ID NO: 311758 - DNA, 1080 bp, Cannabis indica
ggatccccctactcacccttggcttctatcttgtgtgtacggtcctccttacctccatgctaagaaaaaattttggacttacctcatggttggggatagatttgggggtccctggttgatcattggcgataccaactttgttcttagtcattctgagcgtgaagggtcgtcgggtagggacccgtttgtcccttttatttctaatttggtggactctacaggtctgattaatttgtctatccaaggtgataagatgacttgggataaccatagatctggaagtaaccatgcaaaatcagctctggataaaggaattgtaaatggtgattggcttcatttgtttcccaaggctgttctttagtcctctcacacgagcaattcagatcatagaccgttatgtcttgattctagggggaaccccccaaaatttaagagattgttcaggtttgaagaggggtggacgagagatgagagaagtaaactgattgtggccaatgcgtggaaaacagttgagcatccttgggcccgtactagtgccttcaagaaaataggagctacgcgtgtggctcttcttcagtggaatagaacacaatacggtaaattggattggataattagagatctggaatagaaatttgatagcctctagaggttacctgctagagtacgagattggaaggaggaatgtgatgttcaacgattgttgaatgaatctttgactaggaaggcgatttattggaagcaaagggcaagaattgattggctcaagaatggtgataaatgttctaaattcttcttcctctctgctactattagaggaagatgaaatgccataaaaagtattctgaatagtaataatgtctggattaatgatcgggagtcaattggtcgcgagttcgttgagtttttcaaaggcatcttctcggtgtctgatcctggtcaggctatggactgcagacatctgtttcaggttagaatttctcaggaggatcaagatgggaccaccctctgtcctactcgagatgaaatcagaagtacgttatttgccatgaataaccacaaggctcctgggccggatgg

SEQ ID NO: 311759 - DNA, 903 bp, Cannabis indica
cttgcccatctccagggcaggcctcattagcagctggcactcttgcagctttaggagcagcagggtacaagccatacattcagaattatccacactagtcaaccggataatgtttctctgctcagacaacaaagaaaggatgtgatttgctctatcccttatttacaaagtagggatggaacgtctgaagagcgacacatactggaatttgtggtgctcaatcccatgaagaccttgtgcaataaaatatttttgacgtacctgctaacctttgacatggctacacagttagtgtcattaagccattggtgacaaatctagctgaaataaaaatagtatcttcttctctactttagcgcacacttcaactcgaaatagtacccaatctcgtaaggggtaggcggaggccaacctagctccctctacaagacaaataccaccgagagatactttatgcactttggcatgagctatgttgggcacatcctaaagtaagttcggacatctagaaaatactggtgaagcagtagcactgccccatgttcaatgtggtgcccaaaccatgccaatcagcctgaagggagcctgtgcaccctacagtttccacggggaatctcacaatgagcacccctattaggccactagtaaggatcttactgaaggcctcatttgagagagtagaagcaggtgaaacccaccttgctttaggtggtttcacatctagtatcttcggctctagagactaatctcggacgtgatctattcctagttctaaaggcctgccaatcccgttcagtggattacctcgggcatcataatggcccaaaggacggtcagagagaaaagaacaagtcatatacctcctccttctcactagagcaacctcctccagctcagattcta

SEQ ID NO: 311760 - DNA, 871 bp, Cannabis indica
tcataaatagcatgtatgttacctacatggtctaataaaattaccgtaattaataaattatgcatatttatttatagcaagatttcgtaagtccttcataattagattagtaagatcataatcttatccattaaacctttataaatccatatttcataaatatgccttaattattcataaattaaattttcgagatattacaattgatcatccttatgatatgaattaggtctttatattaaatgacatgtttgataaagacaacttaactacatatcagttcatgtcatatataatctctattataatagcacattcacttagatgtcatacaatatcagcaattaaaatcaagattgattacactagataacatgcattattgaaaccacactagcaaccattgattaaagattccataactttaatatgttgcagactattttattgatggaacacctcaggtcaatggtgtttcaaagataagaaatcagacattttagacattgtaagatcaatgaagagttactcatcactgccactcaacttttggggatacacacttacttagattttgaatgtagtaccctcaaagagcataagcaagactccaatggaaatatgcaatggaataaaacccagtttaaaatagttttgtatttggggttgtcctgcacatattctttaacccaagactagaaaactttctaccataacaaaagtgtgtatgtttgtaagttatttagaggaaactcgaggtgcatacttatgtagtcatgaaggcaataaactatttgtatcggcaaatgctacatatgtagtgttgggttttatgccctaaataaaactctttacaatctgattagttatc

SEQ ID NO: 311761 - DNA, 1100 bp, Cannabis indica
ttaggcggggatcctagttttaaaaaaagaggtcaatgctgcattgtatcacaacaagctagatttggtttggattatgcatttgatttgtattaaaaaatagatctacttttgtttgataattcccatcaatgtatagactttagtatcaacttcaaagatggttataaggatatgtgaaccgaaaaagagaaaaacaacaaaggcctagcattctttttccctttacaggacattgttttgctgtcatctgtgctattaatcttcaactgatatttggaaaattattcttgaggtgtttgaaaaggttttgatttaggtgatttgtttatttatctttaataccaatcaatatggccttcgtatgttatgtgaccgtgccatgtaataatagaaccatatggtcaatataatgatttggagactttgaatcataatgagaaatctaccatgttatgtcagctggcttggtttctttttttcttatttttggaagtagctattgctgttcagggatattaactattctgtattctattatgtttccttttcggaagttgatgctgctgtttggttcatgttctgttatttatatatttttctaggtggataatgctacgtaacttatgttttgctaatttgactattttctagctttatagtcatggctggtagaaggaagagaaaactatgcaagttgaaatcaactgaagaagtacacgaacggccgatgcccatactgacgggcaaattagttgaacaagttgatgaaaggaggactcgtattcaatcaaagttagggtctttggaagaagttgtacaaagaaatactaaagatatgccaaccaaaaaaaggtcatgtcgtagaatggttaaaaggaaggactgttctaaagacgaaacaccaatagctcccataggctcctctgctgttggtactaggaagtctcttagaaaatcatctgtagacaaaatacaaaaatctcctcctacagtctctaatgaaaaaaagtccaaaaaacataatgaggcctcaactattacaccagcagccaaacaccttagagaagaagttgagagaaaattagtttcttgcacta

SEQ ID NO: 311762 - DNA, 1005 bp, Cannabis indica
tttaaacgactatttaaaaacgtcggaaagacccatttttgtagtagtgagagcactgccatctttttggccaaaaagatggtagtggttgctagtgagggttatggacccttgggtgacttttctcacttgtatttgatatatggatgttggaaatacactttggccaaagaaactctacattctatgttgtggccgaccactgctaccatttgtgccaaaaaggtggttgtggtcggccaagtggtttttatatcacttggtggcttttttcacttagttttgacatgttattgatgataaagtacttttggcaaaaaatcttgttcccattttgatgtggccgaccactgccactctttgtgccacaaagatgacagtggtcggctaggcctcttccttagtgagaaatgatttctttcacttgtgttgtatttttgagtgttgagggaacatattttgacaagtttcctttggtatttagtgagtggcgagagctgccatcttcttgtggcagtgatctccaaaaaactggagagcactgccatcttcatgtggcagtggtcgcatggactgtattgcatgagattcttgtacaattttgactttatgttcaagtctaagtctttttatgtccaaatgagttaaatcattgttagttttcttgtcgaattgagtgtctttagggtgaaaatactagtgtgggcacacttgggtgtatgagtcctgacaccaaatagttacttaatattttcgagtctcatagtgtcatgaggccctcaaaaaaattattttaacttatttaatatttataagttttggtcaaagtctaatattgaccctttttaattttcgtaaatcaagtataacatatataggcagccgattttgtgcccatatatgcaaaacacggattggaatccgttgtacggcaggggggccccaccgtacttttaaattgtttttaatttttgaaatgtaagtggtaaccggttgttgtaggtg

SEQ ID NO: 311763 - DNA, 3102 bp, Cannabis indica
taaaaaaaaagatagaaagagaagcaaggctggagtcccaggctccttgtacaggtcttctgggctggttggaggtggaggatcatttgtttgagcaggaggcatgtcaacattctggccgaaggtagaagtaattgcctcaggttctccataagccacgtgagaagcacagtactcgagaaaatgtctttggtatcgcctgggtaatcaaaattttcatggggattagccttccaaaagtcaaaaaaaatcttgagacctgcgctctctaaggcatttaccttccctccgagcctcgccacttcagttctttgctgctcggccactgacttgtacttctcaacctcagcttcaaggtcctccttagacttcttctctgcttccaacctgcggaagacagctcgaagaacctccctttcttcttggaggctggtcacttcttttgagaaggaggcaatggcagtttcaagttgatcagaggcctgtagatctttagtcagcttcaccaccttcttctcggcagcaagaagtttcttgttgacttctcccagttccattcttccccaagttgaacccttgcttcatcgacatccttcttggccagatccacttccgcccgcatagtgttggaaatggcagcgttcttagaggcagctgacttagcttgggaataagcataagccatcttcaaaccggcctgcacaaagaaataacattaaaatctgaactaagtgaagaaggacaaagaggaaactttcaggaaagacttacccttgtaaactcctttaggactcctcccatcaccagctccagagacaggtcgttatcagccccagccagctgctcattcacctcagagaccgaccgagtaatgtagtgggtgagcatatctttgcctcttttagtctctggatgcagcaccgaaggtgcggcaggggccctgatctgatcaaatctgcttctgaccagctcagatccgccctttgacagctctggcttgttcgagctccctccttgagagtctttggacatagtcatttttggggcagaagggtctacgatggttggttgctcagagagatcaataattgcctcggccggtgccttctcacttggagggttgctcaccgcccctggacttcttggctggaggagataagcccgagcttcctcccactctcttctacgaagcttcgagcattttctgagacatgtctgtatgaaattaaaacaacatggttaggaaaaatcatgagaaataagaaagatagtaatcaggaaagttgaaggcaagatggagtatcttgaacattggcagaagcatctgctcgagcaagacctaatggggcatcatcatccaacgagtcttcttgctcctccaagatggctttcccctttcctactacaggagtggacgcccgagcaggtagactgggctcctgatcttaatcgtatgttcgataggcctgtgctcgacttgaagtttcttcttccttttgagcggagtctccgactcttcctcaacctcatcttcttgctcaaaattctcctgagcatattgcttggctcccgctcctcccttcaacttagcttcacgattctgttgaatggattcattctcctgatgagctccctcagcccaacgagcactggatttcctcttcttctccttcacaggatggggaatgaaatcctttcaataaatcccgtactccacgaagttggcctctaaggtcaacaaagtgatgttccaggcatcatgcagcacctaagtgatcctttgggctctatctctaagagccagcgtgaagggtggacgctaatatgtagggatctgttagaaccaagtataggttgtgcccatgccatccagcatgtaatactcgtcaacaaaattcccaatttcgctcacggccttgtccccgctgcccgtccagcacttgaggtctgacttgaagtctggctgagaaaaatagaagtatcccgacctgcctttcatggaagtagacttcaagtcaaaaaaccaactagcctcgtgcggagatggcataccccacttctgggtggcgtagaggacaaacagggcaaacagatacttaatgcccttgggagtaaactaggtcggacagacacggaataagtattccaccttcctaaagtatgggtgcaagggaaacattgcctcttgcttggaatgagcacccaaccaggcacacatccccttctatgggtttgtggctctgttgtttgaggtaggaacataacattctagctccaccagatggccggactggtccagattccttagtcgtgcctcagtgaccttggacggagggctcacccatctggcacccaaggcaccttgcctcctgtgaggaactgcaacagtaagctcctcaatgacgtagtcaactcctttaaccaagacatctctgtctacatctatcagctccccagcctcgttgtatccccaaaaatttggaggtgcagcctcctcctcttccgctacctcagaaaggctgctagaacgaacattgcccggttcctctatctcctggacttcggtgtccccttcatgatcccccttctcctagacgggtgcatcctatttggtgatgggtaaagtggggtgctaggccacgtgagggtcggacgcattcaccttacgcattgtttgcattgtttgagccatcatcttgttgctggatgggaagattgagttgaaacgaccgtcgattgaagagggtggactaaaacaaagatgagggtaatcctcgtataggagttgaagaaaatcctagtcaatttggagttcgcttccccaaaactcaccaggattcatctacaaaagacaacacgcgagatgagtgtttggtcgggatattcaacaataaacaggaaaatatgccgaccaggagtactcaacagattaaagaatggaaatattcgacgataagtcaaaatccaaaagtttgaaagttttggctttgaataagcaaggtgaaagacaaaaattttgcaatcaaaaggcaagcatcatgaatcatgaagtcgcgcagatcattgtaaagaaaaatcgcaaagtttctgaacctagggttt

SEQ ID NO: 311764 - DNA, 1413 bp, Cannabis indica
attttaaccaagcaatgcttgcttagcaagcttggaggctactaaaacaacctgattccttactttcaaagctgttaaagagcagatactacccaaacaactccttccttcaagctaaccttggtcactctcccactttaacatggtaaggcatccattggggtagaagtcttcttactgctggtttacgttggaaaataggagaagggtgcagaattaaatgtgttgatgacccatggataccaggacattctagcttttgccataccacttctcaggacctcctgatatggtcgtttcaaacatgattacggatgaaagacaatgggatttggcacttcttgatcaatagttttccccacccaatgtggaccgtatcttaaccattccgctgagtttttttcaaaatgaagacacccttgcttggcatcccagctcctcatgtatttactcagtccaaacaggttatcatctagcagcttctcttgaggaagttgacgatagctcttgctcttcaccaacgggtacttcgtggaattttttatggtcactgaaattgccacaaaagattaagatttttatctggcgtgtctacaatgatgctctccctgtcgcaacagcccttgttaagagaaagataataaccgattcgacttgttccatctgccagcaagcatgggaaactgtcgggcatgccctctttagttgcaagtatgctcgatctgtttggcaacattctaacatcactcacgactggaataatgctaggactatgcgcaaaggagattactttgtacacttggctgcaatatacacgaaattggagatggaacaaatttgttgtacgctatgggcaatatggaatgaaaggaaccgtgtggctcatgtttataaagcaaaattagctaaggatcttgctttttttttaccaagaattactggcagaactacaaagtagcccaactgaagcgcagtcctactgcatcaacatccaatccaccatctgctactgctgcttattcgctgctatctccttcggctgctaccctgctgccgtggacccctccactacctggaatgctaaagatgaacgtcgatgcggcagttgacagcacaaggaaaataactggtattggtgctttaattcgacgttcaaatggtacggttgcagcagctctatcaaagccggttgttggatgttttgcatcccatgaaatgaaggcaattgctatgtttcacagcttaaactggcctcttcgaattcaaccgcctataactcttattgaaacggatgctcttcgagtttctaatgctttatgcaaatcttcatcagcaatttcttcttttcaggatttaattgttgatatctctagccttttatcctttttccctaatgtaaatgtttctcatgtc

SEQ ID NO: 311765 - DNA, 644 bp, Cannabis indica
catctactttatattattttatattattttataacagattatttttagttataaactttttagagtaatatttataatataaataaataacaaaattaatcataaaaggtcaacaagggaatcataatgtgcgcaacgtttgtattattttattagcttaaaatattttatttattttaattttttacttttccccaaagcttaggggttacccttaatcacaccctaatgttatatattaaataaaaatataatttaatattatatatacatataaaacactaaataatataaatgcatgtccacgttcgaaggggcatgatacatataaaaaaaataaataaatatataaattatataaaataatgttgtgataatttgcaagacgtgcatgaattgtgaaatcatgggtcactatttatacatgtgaaatgataaatatggccaaatattttctaattctagctatatttaaaaattgttatatataaaaaaaattgttaatttaataattattatatataaaaaaattgttaagtattcataaaatgcaatatatataggtatatatagaaaatttttaccgttggaatatttctattattagtgtttagaaaaattataacttaaattttcttatataa

SEQ ID NO: 311766 - DNA, 726 bp, Cannabis indica
ggtcactaggcgtaaatttctctaaatattatggctgaaagaattatttgaatttgtagtaaataagtattgggtctgtagccagagttttcaaaaacgccataacatttcttaaaagggaaagtaagcatcttggaaaggtttggtctactgggcctttactagtgggcttaacttaataaattaaggggtttttagaaaaatactgaattatgggaaaaaaattacaattttactgcggggtggaattttttacaataatactgtctttttataaaacgattgtaaaataacaaaacagaataattaaaacaatagtggaacaactaaaaaataactgtggaacaaccgtgaaaacttaacacagtatacagtatttttgaaaataaaaatacagtatttttgaaaaaaaattttgccccacattaaaaaagttaaaaatttcattatgtggtgtaaaaattaattgttcaagggctgaattaattagtgaataattaaaaaaggaatgagaaaataaaagttggtgtttttctaacgaatgtaactaaaagggtttttcccaagttaacatgggagaataggaagggttctttccaaatggaatgtttgggaattaaaagcaaagagttggagcatgtttggtattgttttctgttttttgttttaaaaaattgtttttagaaataagaacaaaaaatagtttttgaagtttttaaaacacaa

SEQ ID NO: 311767 - DNA, 767 bp, Cannabis indica
aaaaaaatcaagtttctactaaaatttggaataaacaaaacattatctaaaatcaaaaatttattctgaaacttgaggcaagcttttcctctagcttagaccaatactaattagctattaccaactttgagcttcaactcacttggatttatgtaatcccaagtttcaagtagctggaatgaagaccaaacatggttagtagatccagaatcaataatccaaatggatttttcattctctaaaacacatgattcaaaaactaaggtattacctttgttcttagggttaagaagtctaagacatttagatttaaaatgtcccttctgtccacactgagaacattgaatagtatgtatgcttagttgttctttgattttctctattgctggtataatctattgtttaagatgatccaaggaagtagtagaactttctccaatcctttttactgagctaaaagttgcagtattgtcggagggatctttctcaatatatttagcttttcttttgctcttgcttgtagtactagagagggacctccttgcaatcaaaaatgtcctttcataagcacataattcagcgtccaacttatctatgtcgaacgagttctaattattgattatataggatacaacaaattttctatactcaagtaataagctattgagaacaaattgaacctgttgctcttttgataagacaattcccagcatagctgcgttcttgtaacgccctaatgctaaggcacgctacagtgctttttcaat

SEQ ID NO: 311768 - DNA, 2664 bp, Cannabis indica
gcacctgccttggggcagcaggcagcagcagcataggcgcgcagcaacattggggaatgttagctgagcttggctacgtgatgggcttagatggacgtgactttgcatgggcatgcatgcaaacggtgactcagacagtgtgcatggttgacacacgtgaatgacggttatcggaagttacttatgtctatccaaaggcatgcatgtgggctgaagtgatctgttagaggacagatgcaaggaatctgggcaagggcttggatggctgacacgcgggtgttagttagtttgcatagagtatgctgatgtgtaatatgctggtgtgtccagcatggcctaggcggttggggatgtcaaccgcaacctattattgtgtaatatagtaggcttgggcgcttgagtcatcagagtgtgatgtccagcgtgaacattgtgtaatccttgatattgtgtgaataacaaggttgggaaaagggtttcctgtatactgtgtgttcttatgcttgtgtatgcatttacttgatagcaattgagtgttgttgagtgacgctgggtaaagagtgaaaccgtgagtgtgtgtgcatactaacgggttgttgggttggctgactagatttgggtgaatctaggccatcgcagggaaaatttgagtgtgagaaattagccttgtgacactatccatattacaaccaattgctaaaatcgtcatctatattacagtcaattgttgaaatcctcaaacatttatcttatcgtaatttaggaacaccgcataatgacttaaatttacaaaaacaaaatgcacaaaccatattaaaagaaaaaatcaaaaccaaatttaaaataaaaaatatatatatttttcatcatcttcgttacatttaaattttcgatggagaaatcgaaaaactaaatatttttgaaacaatataaaccattcaatagcaccggcatatatatccaatagcacataatcttcatctatattacattgatttgcttgaaaacaaaatttatttgtgtttggaaataattatacagtctagtaattatatattatattgtatttaaatatgaggtgataatcacatacgaatttttatattgtttggcaaaataatttgtaattacacagaaaaataatattttttagtagttaatgtttaaaataaaaagtttttagtaatattatacagtgtaattacactcaattctcattgagccatgataatttgaaagtgtaattagaacacatcaattacctccaattacacagttatagtgtaattacacggtcaaataaatatgctaaattatataattacctctaattatacacaaatccaattagaataaacgaggctaaaatagtattggccattcaatagcaacaacacattcaagagtaacattagttattcaaccacaaataaaataagaagataaatacatggaccaaacccatatatttgcccaataaaaatcttgtgtctccaaaactctatctcatctgtatcaccttaattagcaaatgaaacacatgtctaatttcttaaaagctcacgtacgtaatgctttcagttttttgttattaaataagtaacccttctgtttcttttattcagttcctattaacattagctttgtgagggaacaaagtagctcactcattggaaaaaaaaaattatttacgtaataagtttgatatagctcatcatatgttacggttgtaaattgcatttctcaacttattggacaagatatttgattaatcatttcaagaaatgtcacttaattttacagtatatttttgtgctacaaaaattagtattgcgccgataaaatagaatttacttatgatgtgttggcaaatcaatgttgatattagaacttttgccggcataaaataaaaagcgctgacaaaaataacttttcctagcgcgtaaatgtagtgataaaagttaaattttagccactacaaatgtacgctggtaaaattttgacctctttaccagcgcagtttgcgaaatgcactggtaaaagtaacttttaccagcgcatacaataacgaactgtgcatgtaaaagtgacatttcttcgttctttattctctacaatcaatattcctatcattattggtattattattattagcactcataaaagatcaatctaataactaattagacagtcttcattgtttttgctacatatggatttgaatgtaaaatgaaaattgaaaaaaatgaatatataatattagatccatgtaaagataattttggatatgtgcccttaattaagggagtatgtttattatatatagaaattaagaagtatgaggaatcatgcaaggataaagctatagtggaggttgggaccataacgtggctgtataaaattttgcagttcctgcaagaaacaaacaaattaagaatttaaagagttttgttttgtatctacaggtgcatttactatacaagttggatcctagtcctattaaataaatgaaaaagaaaacaccaaaatcaaatttgttggtacatacacagaacaacataacgtcatgttacgttaccttaccgcatatatgtttatgatagataacgacagaattacagtatagtcaaattcaatcttgaataatttcatcacctttgtata

SEQ ID NO: 311769 - DNA, 1276 bp, Cannabis indica
gctaccatctcatgaatagaactccctctaaaatgcttaagggtatgacttcataccaactattgcatggtacaaatcccaaatatgatcatctccgaagtttcgggtgtttagcctatggctccactcttccttctagaagacacaagttcacaccaagaagtcgagcctcagttttcattggctatcctcaaggcatgaaagtctatacacttcttgacattgaaactaaacaaatatacatttcaagagatgttgtcttttatgaaacaatatttcccctattttcaacaacatctacttctcaaattaacaacatcttacctgatagtatcattccaagtaccagattggttcaccaattcactagtgatcctcacaatgtgttatttccaactacaatccataattcagtcactctccaaactgatcctgctatatcagtaatggaatcaaccaaatcacaggatcttggtgccactaatataccagattctgtcgaattgcagctcacaacagatgtttgcacatctccacctgctgcaatagaacccccaacatctggttctgctacaccagacttcacagcagccatttctcccccaaaacctgctgcatcagacactccagcagctggttctataccaggttctgctacaaaaactattacaccagctacagcagccgtttctcctccaaaacctgttgcatcagacactccagcagctggttctattccagattctgctccaacaaccaatacatcagctggttcattaccaacacaacataacattgaccaatcttgccccacaacttcaaggacaggtagagtcataacaaaaccaaaacatttgacagattatatctgtcatgcctcctccactgctcacccgattgagcaatacctttcctacattaaactgcatccaacttttcgagcagctgtccttgcagcatactcagaaattgaacctcaatcttatgctgaggcctctcaatttaaacattggctcttggccatggacaaagaaactgacgcccttgaacgcaacaacacttgggttgtcacaaaattaccccctggccacaaagccattggttgtaaatgggtatacaaagtcaaatataatgagagtggaggggttgaaaggttcaaagcccgtctagtagccaaaggctacactcaaagacatggcattgactactctgaaacttatgctccggtggctaagtttaacactctgaaaatttttttagctctcgcagccatgaa

SEQ ID NO: 311770 - DNA, 1608 bp, Cannabis indica
agaaaaaaatgtaatatcatggcaattctctaataaattattattaatattattaaatgaggtgaaaaagagtcatacagggcgagttttgccactaagagtgatattgataaatagtgaagctacggtagacaacgcaataccactcccaattgcacgaaatcctgcaataattattttcattatttttttttattttttattttttaaaaaaaagagtaataaataagaaggaaaattaagaaattataattactaaatattaataagtaaattaattttttacctttgaaagtttcccaaggataaatgagaccatcatgattcctgtcgaagaatgaagcatgtttttgcagaacaaactcattacttggtacaaacttcttactttcttcttcttctgtatatatatatattttaaattactaaaaataatatgtaaattaaactcaaaaaaaaaaaatggaaaaatggaaactgaccttgctgaatattattattagtagccatgataatttggaattaatattgataataagagagaaagaagagcttataatatgtatatatattatatagcaaaggaatggtttaaaatggagttgtggtatcaagattatatataaaggccatggatgaagatgggagttgggcttgggaccatatcatatcatatcatatagtaataactaataataaaataatatatatatatatatattctatacgcgacttattattctagctaacaataacagggcctttacttaattttgatttctatatatagatataaataaatgcatatgtatatatatgggtgtgtgaatatatatgatagaactatagttttaagggaaacgattaatttaggcgtaatgatgcatgtgcaggctacgccatacgtaattacgtattatatagttatgaaaggctcgcggagaatggatgacttaacactacacatctatatgtacatattacgtgtctctatacatatttgccaacccaaacttttattaattgctttttccaattttacttatttttcattcccaaattttattattttattatctttaaatgtgaatgtagaatgctcttttaatataccacttgattagaattagggtattatactttaggtgtaagagtataaatgttttatttctaagtaatttgcgacttaaatacttaagtttggttacaaataaataactaagttaattgtgttgctagacattcttgatattaatctgatcgtagcatttctgatatttttatttctagtgaactcttatatcttttgtatcaataatactaaattattcaatgaagttgatattttatctaaaaaataactaagtttaatttttagcggtaataatatctaagttatatttttggaacttcataggtacctaatcattatccatatatattatttttattattggtatattttaactaattttttaaaaaagaataataaaaatttaatggcatgaaccaataaaaaattacacgtgacaatttacttaacacttaactaagtaattattgaagttttaaaaatataacttaaatattattaccgttaaaaattaa

SEQ ID NO: 311771 - DNA, 2172 bp, Cannabis indica
ttcccattctcattcctattcttatatttttatacattccaaccaaacctcaccttaatgttcaaagagttcaatctaatactaacactaaatgtgatattaatactatatttgcgtgtgtgtatttttttttttgtactattattctttactggtattctggatagtagttacgaaaacttagtttatagctacataatatttatttcagtatcaattttaatatttcacatttaattaattaattaattaatttaacaataaattagtaattataaaataccaaattttaaatatatttatatttcatgaaggatggacaattgttgcatatcacaagaataatatattataattactcgagaactaaattaaaatgtattttgacattaattatatatgagatggtaatatttaattattattattgctctattattaatggtagccttcaatcaaattcacccaacttattatttatgttgccccacatgcatcatgcaccttgtctttgtctgctcgggcttttatatatggctttaaagacaaatcatgagtgtttaaatttctcagccagtccaatcgatcacttgattaattgctcactatatagtaagagcattgtgaagtatcattttggctgcattcaattatatgagactccatacttagttaaattaataataacgatattgacacgtaagagagtgctaaacactattggagtactttttaatatttctcatgtattaaatatatatcatcataatttcatatcacagcagtcatttcgacttatagtttatattaagaggatatgtattaagactttatgagattatgcaactgatgataatatctttgtcgatcgatccctgttactgggacctggcggcatatggctacacaacccagtaaataagttccatcccaattgatagaccttttttttttttacctgaaaatttattataagtgacttatcaactcagatgttatattcttattacttactctttcatcaagtatgtagttagcgttaataaaatcacagtacgtaagtatatatgttgtatagggtacagaaagtgaccaatatttgatcaaaatccgtacgattggttattataaataaataaaggtgaaatatatacaaaagaacttttatgtataatccattaaaatactgaaaggctgtgttttcaacttttttatttttcataattatgtttttaaaagtaaaacaaaaacaattttatcattttaaaaattcaatagtgcttgactcaagttcttaaaattatttttagatttttttttactaaaaaataatattctacaccataccatgacataaacccatccagctccagacccagacccaaaccccaaccccagcccgaacacagagcaggacgtagacccgtactcagacccaaactcagacccggaatccggacccagacccagaccttgaacccggtccaagaccctggcccaaacccaagcctggacctggacctgaccccgaactcggacctacgccaaggtccaggtctggtttttgggtccaggttggggtttggggtactagtctaggttaagctaaagtttggggtccaggtcttggtcctagtctaggtaaagctgggtttggggtcctggtcttggtccaagtcaagcaagggtccaaggttagggttcggtgtatggggtttgggttgggatctagggttacggtatggtgtctagggtctgggttgaggttcaggttcgggtctagggtccaagtccaagttcgagtcgaggtgtaggctcgggtctggggtctaggtacaggtttgggttgagtcaggtctgggttcgggcttggggtcagggtctggggttagggtctgggtttgagtctaggttcaggtgcaggtgtgggtttagggtccggggtccaggtccaggtcagggtccgattctagggtcgggtctaggtctgggtccaagtttagggtcctagtcaaagtccgggctcggactaggtccatgtttgtgtttggggtgtgggtctagggtctgggcccagggtgcgagtctggggtcaggggttagggtatgggtcgaggtcggggtttgggtctgggtccaggtctaggtccggggtgttgggttttatgccct

SEQ ID NO: 311772 - DNA, 954 bp, Cannabis indica
aaaaaaaaattataaatgattattttttaataaaaataaacattcattaaccaaaataatccaccattacaatattacgtaattcaagagttaactgataatcttgaaaagtacgacctggggaaaaacaagagatacgcgccaaacaatagacagttttgttcatagatcgttcaacaaactgaataacaacatgactcaaagaagataaaataatatgataatcattcaccaacaaactaactcagatggcatatgcaacttactatggatagcctgaacatagaccaaactatctgtttccaataaaacatttggtcaattatgtcgctgaatccaatttagagcttcctttatcccgatgaaatctgtaatctttagtctaacaatttccctttttgcgcttagtgaaggcctcaagatcttgaccagcatgatttcttgtcaagcaacccatcccaaaacggctgacatcattaaacagagccctgtcaacattgaccttgatctgatcagcagctggtgtagtctgatgcacacgcgaaagcagtcccaccgaactgttagacaacaaagtcgtcatccgtgattgtgaaaaaagaaattgatcaaggagtgatcttcctgacagtacaactgatgcaacagtaggagatttttgttgccaaacaacctcgttacgggccttccaaataccccatgcgaccattaccgcttcctccaatgcttgaggattgatccttgtcaatagaacctgaaaccaacagccaaaactaacacctgaccaactagaaatgctagacattgatctattccaacaggctctaacaaaagaacaatccactagagcatgaaaaatagattcctcggcctcatgacagatcagacaattggggctaataaccgcatgacatttaagaagttgcaaacaagttggaagtgttgggttttatg

SEQ ID NO: 311773 - DNA, 1124 bp, Cannabis indica
aataaaagatttggacatccacataattattaatatttataacaatagcaatagtatttcaaaattataaatatataaatagtacttagtttgcaaattaaattttaagaaaaaaactagaagagacaatgaaagattagacaatgccttgttttctatttcacagtcacaaactacaagtacaacacagtagttttttgtgtatttaatttaataatatttcacgtcaaacttacttcttaacacattcttaaaacatagaaaatatatacatattgtaattacctgttgcaatagaggttgtagtgctgtggttggttgtggtggtgatggtggtgtaggcacataaattggatcagacacataaatcgatcatctttgtgcccaattcgatttaaatttactaatgtgaatcaaaaatcttcatatataaaaccattgtcactcttcacccaatcacaaaagaaaactggtactcgtgttgtaatgtaatccaactcccaaattttattaattactccatagaacgtcatatcacatttaattggatttttatctttggatgtagaaacttggacagttttagcgacaatgctaacaccactatttggcgtagtcttgttgttatcacgctttttagtgttaaatagagtaccattaataatataagatgaaaaacttgataacactaagagaaggacctcgagaaatccacttaacaatgtctgacacattatttcttgtgtttttcaattcactcacaacctatgaaaaattcaattgtaactatcaaacaacatatcaagcaaatattactacatataaaccaaacaaatttacatataatataccttctgatttatccaagtactaaaagtgcgataatgttcatcatgtaaccatttagagtttctagacttggatggaaattgcaatttgatccaattaaaatgatcccttcatatatatatatataaatacaaccattgttagtaaatgattgtgtaaaatttcattaaattcacaattaataaataaacttactcgatataaggctcaatttcattagtattttgtaatacaagacgatgtgcttcatccagttcatcttgtcttactgtacg

SEQ ID NO: 311774 - DNA, 1017 bp, Cannabis indica
aataaatatgtttctttattgataaatgaataaagattatattatttagggcacaaagcccaacaagatattcactgacactcaacttaaaacatggccaacttccttaatcgagtagaaggatttattaagcttgaagaagctatctgataagcccaaactgggggacaggaaggttctgaacatgccctgagtggtggacaaccctcaattttgcccagcacacctgccagcatgcgcaatgtcagccagccctccaaaagtcaaaataatggaggtaagcgtaacaataataactctagccaaggaaatggcaaaaaggggaaatttgacaaccccccttatgccacaagactcaaaggagaaggaggagatgtttacatgcttcactctcctaatagaaactcctgaaatagtctacacgaccacacagtctatagttccatacaagagccctccttccttgaagaaagacacaagtaagagggacacttccagattttgcccatttcacaatgattttggccatgataccaatgagtgcaagcacttaaagttttaaaatgggttcctattcagaatgaacaatccccacctatgtcattacgtacaagatgatcagacacagggacaaggtgcccaaaacaaagactcgatgccaccgcctgtgaccgatcacttaggggtcatcattggcggactccatattacaggaaaaacaagcaatgcaatggagctaaagcttgaagagcatgccatctccttcatagaaggagacgctgccaaagtcaaattcctccataatgacccctggccataacagcatatataggaaacatgataggtaccaggtgcatgattgacaatggagcttcttcgaatatacttttcaagtcaacttatgagaagatggggctccagttgacagatctagcaccctgatgtacgagttctttagccaaggccttgtgcccttgggatacatatgattgcctttgacagttggagaaagtccca

SEQ ID NO: 311775 - DNA, 2878 bp, Cannabis indica
gaagggggatacgtatagtagatgattttgaggaagtggtgaaacactttgtcaagcactttgaaaattttatgggaagcaagagttcagcggttagcactattgatgagacttgtttgaagcagggtaataacttgaacttggagcaacaaataagattgattcagccattcaacaagggggatgagaagaaggctctttttagcattcattcttctaaaagccctaggttagacgggttcgggtcagaaatttataaggacctttggagcaaaatttgtgatgatgtttcttctgtaatcctcattttctttgccaatgggcggctgcctaacaccttaaaatgagactttcatctctttaattccaaaggtgacaaacccatcaccggctaaggactatagacccattgcttgttgtaacactgtctataaatgcatctcgaaaatgatctgctcaagactgtcagaagtattgccttctatagtcaacaataatcaaggtgcgtttatcaaaaatagactgttaggtcatagcataatgatatttcaagatcttttgaagggttatactagaaagaatatctctgccaggtgcatcatgaaaattgaccttagtaaggcttatgatacggttgattgggactttgtggaagactttctcaggcttctgtgttttccctctcgattcatcaaatggattatgacttgtctaaggggtactagctatcatttgcttctaaatggtcgaatcgaaggtagtttcgaaggtaaaaaaggccttcgcgaaggagatccgatgtactctttgttctgataatatggactaccttactagattgttgagctactactctagtcaaaagggttttgggtttcatcctcttgtaagcattttagcttgacaaacttgtgttttgtggacgatctagtaatcttttgcaagggtaacatcaactcagtgaggcttactcataaagccttcaccaagttctacaatgacataggtttgtcagctaatacctcaaagtctcacatttaactttggaggggttagtgaagaggtcaaagcaaagatccttgaaattgttcaaattgaagaaggtagcttccatctgaagtatctgggggtcaaccttagaccaaccaaatggaaggcagcagattgtggagttatcttggataagctgaataagaacctgaactgttgggcaagtagaaacctgtcttttgcaggtcgggcgcaattgattcactcggtgatgcttggcattcgaaattattggatgagtatattcatcattccttctaaggtaacagcagctattgataaaagttgtcgtgactttctttggggaacttcagggaacaagagcaagctccatcgagcgtcttgggaaaaggtttgcctccccaaaaaccttggagggataggctttcgggaagggaaaaaatgaaacaaggctcttttggcaaagcatctttgggttcttgcaaagaaggaggattgtttatgggtcaaatgaatcaactcaatttatttgaaagaccaaaacatttacgattgccccaagaaggatgatggtatttcaagaaaattctgagcttaagagattacttggatgaaacgaagctaagacaagctactagaggtaataaaattagtgttaagagatgttataacttgtttgtggaagataatcaagctgtcaatgcaggagctatatgggataaactagttgttcctaaacataggttcatattttggcagatttttaactcccatttgctcacaagggattacttacatcggataatagacattccaagcaacctttgccctgtgtgtgaagctgaaatggaaacacatgaccatttgttttttaaatgcagctattctgtttaggtgttcaaggttgtcaacaggtggctggggagcatccagtggcctcggtcaactactaaaatgggtcttggctgctgcaacataaggcaagacatgtctaaacgcatagtaaatgttgttttggctgctattctttattttctttggaagaataggaacaaatgcatatttgatcttagttgtgtaactcctagttgcttgagtttggagattagggaaattgttcagatgaggatagttagcaagggtccttttaaggattgtaaaagaaacaattatttacttagtgtaatcagtaattggtagggttttggggctgtagctgcaggttttctgcagttgttgccgctggtgtcttgtaggcttcttgccttgtgtttgtatttggttgttttttgaataaagcctcctcttttttcaaaaaaaaaaaataattttaatttaaaatacttatatttttaatcatatttttaaatttattggtttaactttaaattaaaataaaatgaaaaattatgtaaatatttcatataatgaaatttaaatttaaaatattataaatttatgataaaccgattcacacactatatttttaaatttgggaataaaaatatttttatcaaatttacgaattcaacctacatataaacacactcaaatttggttatgtgagttttggttaagtaaattacaatatatgcattatcagatacgaacctaattaaatacctcgtttcttgcagccaccgactttaagatcttgatcctaagtctataaataccacctttactcattatttgaagacatgattaagatacgagtttgtgcactctgttcagatgagattgagaggtagagagggagatacgaaagaaaaagagaagattgggttttggtagttttgttaagaagaatctcttatagatagagtaagatcgttgagtgaaaagtgtgagggtacgtgtaaacaac

SEQ ID NO: 311776 - DNA, 541 bp, Cannabis indica
cttaaataactataacgtagatgaccatgaaaaaaaatttcactaaaaaattatttcgggtgctaaaacagacaaaggtacattaatgtatctattttaaggggttgcattgtagaatttcccaataaaattttctccccaattcttatagaattttgttggttgcaaaaattttcatcaactataaaaattattgcaaatacacttttttttcaaattatattttgctcattttaaaaaataatttgctttatgtagccatgtgtcatttttattgttatagtaaattaatttatttaacaatttcaaactacttcaaaatttaatttattaatattaaacatacaaatattaattctgagaatacattatattcttataaattattattagattgctatgtatgtatttatttatttggactcttaaactgcaccaaattaggaatgtttgcagtgcgggtggtgagatttttgactattttttcaaaccaacccgcatatacttttttttaatttcccaaactgcacccgcaccgcaa

SEQ ID NO: 311777 - DNA, 2954 bp, Cannabis indica
agggctagagatctaaatggaaggagtcattatattttgctgcacccaatgtaaggtttactaaactttatatgtgtttatttcattgtttagaattcatattaggatgttaatgaaacatacttggtagtaaatctagatcctggtaaaatatttccaacaatggaggcctcaagtaataattggttgaaccaatcatgggcattctcctccagagtcgcatcgagcatccaactatttttccaactgaggtacctggtctacttccattatagtattaaagttatctaaataatcgattgggttagtaaacctttgtatttgagcgattcagatagcctgaagcccatcggaagtcgagcttgttgtacttcttctgtaaaaggcaatgtcccatggagtttgtaaatgggttttctctactgcttgataattttgtacgctcggaggaggctctcttggtcaatacccccagtaaaataggattggcctgtgttaccgttcgtatggcagtagtcgcagctatgttagctgggattactacctctatggtcaaagctggtgcattgggtgggttgtttacgttctgtgtgccttgatcgcccacttagggatcctgaggttcgtcatcatcgcgattccttggtgtttgggatcacgccctgaaaatttaattgcgatgatcacggagatcacctttatgaacatgatatctccctcctcatcgcgtttcaacagaacttgacctggtataaacactaggggagcgactgttagtagaggaagagtgagattcgactttgtttacctcaacttgcggctgggcctgacttcgaggatttcatcgttcagggtcttcctcttgtggtctctcttctctaccgcgacctgtgttaggtgcgacaggttccctgttttgcatggaattatatgtgggctggttaaagtcgagaccctcttgtttgttcccttgttccctgtgaatatgactatttttaagacatttgtttcgtcatttattcacggtagtcactcgagggttgcccgaatgcatgttcgggactcgaggcagatgtcgggtcctgactctcccatcaactttggccagcaatgcctgtatttgtttctacatggccgtatacttggctgttgtcatctggacaattccctcaaaagctacggctggtgtaataggcgggaagtggcctacagtggctagtagtgtcgacttttctcgtacatggccagcagtgtaataccctaagattatgaaaatagattagcaaaccctaactagttaattgtgtatcattatgaaattatattagtatataattttttatatgtgaattaatatgatatatgccatgtcaagacccctttggtgagctaggggtattttagtaattttacctgagaagggtaaaactgagaaatttatgttatgatgtgcttatgaactatattattatatagtatgcttgttttgtcctttttcaggtgtgttctgacaagttagcgcggtatagtcacaactgggtatttcagacagaattgggttcggggccgaaatacaattttgggatgaattattggcattttatttatgtgtaaataaactaaaattaatttgagtatatttatgatgaaaatgactattttacccttaaatgcttttatgagtgttatatggccctagggtcactttggtaaattgacaaagtgaattatttgtaacaaaagagaattagttgcaaaaatgaaaagcaatttatgcatttgttctcagcccattaaaccgaccacctccctctcttaaaactcttctttctagttcttgaattttgtcagaaattgcttagtttcaagattgaattgtgataatcattggagctagagtgatttgagatcttgaggtagtttttatatcttttatcctttaaattgttgttgaaattgtagtgatttaagcatgttcttatgtgtttatgatcttgagatgcatgttgggatgttcttgttgttgtgagcatgttttgcgtttggagcttttgtgttttgttttggattaagtttagagacaattttagacatttaattagtgttgtaattctgttatttagctctgaaattagttgcttgaggtatgagttcttggcttgaatgtgtaaatatttgaagatgggattctatggaatttaactcaatattggagcttaatctttgtgttgttaatctaaaattgttgatatgtgtttgctgaaattagagcatgaattatgtattttaatgcctatttaggtacttatcagttggtgaaagattaatttgagttgtgtgtagatttgggttggattgggtgtgaattgagttgattttcgaacctgaaagttgggtttttctgggtttggaatccagaggccgcgacccaccccttgtttgtggcctgggaatcgaacccaggtgccgcagcctgcccccttatttttgggaaagtttgaatgcgttattcgaatcctcatagctttgttatccacactccatttcgagagttctatatattgttggaaagctcgttctgagctctaagtgaatatctgtattttgaatgccaagtttatattatgtgaaagtggaattagagattaaccctaaatttgtaaatgccagaatttgtgactaggattaccgacacttggtcaggatcacctggggatttggaatctccacgtttgcgagacatcaggtaggacagtagttgcacatagagttatgcgcggtggcacttatgttgaaaattttatatgtgattaattggaaaccgaggttagggttattaccctaacatgagcgatttaatggcctagggttattaacctattaaattattaatgtaaattttatgccaggagattgcaatatatgtaaagttttagggttatgcgttcaaggca

SEQ ID NO: 311778 - DNA, 850 bp, Cannabis indica
ctttaatttcataaaaaattctttcgggtccgatcgtgttcttaagagaattttttcagttttcaaatgggttttaaatccttttcattcataaaatcgatctaaaatattatatgaatatagtaatgaatagaggatttgaaataaataaccgaaaataaaaaaaccgaaaaataatagaccgaaaaataaaactttcatgtatatatatactcgtatacaatgtatatatactgcataaaatcatcattaatgtatgaaagagagtattacatacaattttatgcaacaaaaatatgaaagcattgagtattatacataaacatatatacatgaaaattatatgtatacacacagtatatgaatataaatatgaatgtgcatatatttaattatttttaaaatatccaaaaattacaaaaaatttacctttttacaaaatattattttttttaacatttttaaaaaaaaattcttacaagcaattgtttttaggttctaaaaaagagtgttatttgcacattagtttcacgttgcgaaaatatattataatattgctgcaacatgaaaacgttgtttttcttataaaaaaaatcagaaatctgtaaaagcataacaaaaaaagaaaagaaaagttgaagaatacccatttttcttatacattaactaaatttatcttcaaataaaatttaactcaaatatacctctttttatgagtattgtacctaaactatcacactcacataactaagacataatttcaaacataatagatttgtgttctttgtagatggatgagtagatttgtgggaaagttgggacaaattttaattagagaaaaataaaaact

SEQ ID NO: 311779 - DNA, 1733 bp, Cannabis indica
aactgtaatttttctttaattttgttagtacagactctattattgtcttaaacatgacatatataaggtccaaattctagatcattagatctagaccgaaacatgtagtgttcgttacttctaaatatttttttgataaattcaaaatggagtttgtacagacaaaactggacgaaaattacaattttacaaacgttgggtacttacgaaaccgaccttgaaaaaatatgtccttttgtatatatatattatgtatgtaattttaaataaaatttaaataatatttactaatataaatacattctaaacaaataagtcatcacataaacttatacatttcaatatatcacttaaatattatacgtcttgtatttctagatgtaaattaaaagtattaattaaatttgtacaatcaagttttacaactatatcatgttcaatggataacatagcgaatctgtttaatctttcttgagacatggttgaacggagataagatttgatgaaggtcaatttagaaaaactcttttttgcatgggcagcagtgacaaaaatagttagagaaatcctataagcaatccaagtatttggataattgccatccacttcttttatatagttcaacacatcgatagctcttttggtaaactttaacgcaacatatataactcctattataggtcatcattgtcaagatctgaaatctcactatgcttcattaagtttataagattgatacgaaaattcttcaaagagtcatcatctgtagactttaatttctcaaaatcaaacaatagtttgaaattctcctcaaaattctaaaattgttcgaacctagttgaacaataattatttttattagttattatggtagcaatagtaaaacataattttaaataaagcatcatgaaagtatgcatacctagttttaaatgatgaaataacttgatcgattatataaagaaaatagtaaattttaaatgactctactgctgattgtgtcacctcctcattgacaatttcatcaaacttatttttcctgtaaacttttttttttttaattaaacacaggtttaagttccatcatacttgcaatctcagtagcttcagtcaaagccttctcaaaaccagtttctctatacttttgaagaaataaaagtagaatctttaactctttgatggcaacatcaatttgcatatcttcactttacaggatcttgctagcagtattaacaacaaataacaaattatgcgaaataaccatgctcactaagaactcaaaattctgaatattatagattgctaaagtctcagcatcactttttatgttggcatcttcattgctttttgccaagtaatttaaaacttcttttagtgtggagcttggaatcttattgtcaacgcagattttcgttaactaaattaaagcctatttcgtgatggatttgcacaaaaataatagtagtaaaaggaaaagaaataacaccaagctttttttatgtggttttgcagttaaaattctgcatagtccacgagtctatcttattaggattctgataccaaactagggctttttctctaaaggttttttcatccctttattagtgtatcccgctcctatttatagttacatgagttaattacaatcagattgatctcccacataattatcccctgaaattatgggatttgattacatcccacgtaaattaaatgcggttattatttgaaaa

SEQ ID NO: 311780 - DNA, 1589 bp, Cannabis indica
atagaaataggaagagagagatttagggttaagaaaaaaaagaatagtaacacaatatattttttaaaatatatttttttatttttaaaattttaaattattttttataattaatattatgtggaccaatagaaatttaccacgtgtacacttgtgtacatgtggacaatccactgtggcacttaagtgaaatttttggacgaaagtgtaaagagcaaaatggaagaggagttcagtaagttttgccgtcaaaattttagtttatgttgttaagttttaaaaaacataattttcaaatgatttttccgctaatatcatttttctaataaatctaaacctaaattaaggttgagtaataagtatttcagataagaaaaaataataagagacttgctttactaaaattgatatttattttaaataaataatttatttattacaattaccttttaaattgtaaatactttacatggtttgtcctaaataatattattataattttttttttgttatttgtgtaatttaatattaaattttatatattttaatttattatgctaatataataatacatcactttctcttgtagtatttttttcaaaataatattagttattaaaaataaaaaaatgaaaatattaattattaaaagataaatagttggtaaatacttaccaaaagtggaagataatataaaataaaaatagggcggagagtttggtagctgaaattatgcaatggggcgagcaaatggtttatggccgtaacgtcacaatcggtttgtcgttgaaaggtgtagagaattttcttgttgggatgaggacacatgtaggcataaatcgattaaattcaattataaccgacggattcaattataactgatagtcaaatatgagatatttaattgtaatcggattagatattatttttaaatatctaattaaatagaataatatattggatgtggtgtccaaaaatttagagaaatgttagaggacaccagtagtgcctagcaccttgctatgtgtaatatcgctattggtctaattaagtatcaggtcccatatagtttaatataatgacttttagggagtatcgctagccaatcgcaacgcgacatgtcgagaaggtgctaggcaccgctggtgcccaatagcaatgctcaaaaaatttaatacatataaattaatattttcatttagttttaacgagtaactagattttatattgttatacattcaataggcaaatatataaatacaaaaaaaacactaaagggtacttataatgcttcgcacttatgtgatgtttaatattattattgatacaatttaatatcaggtcctaaatattttattttaataaagattataaagaattactaactaattttaaaaggccactttataataatgccaagcatcttaattccccataacaatactcctaaatgtatacatatatctatggtgtcatatttattttaaggctaattagtaatttttctccccgaactttgacatgtactaaatcgtgccccttgaacttttttggccgttaaaaattcctcccgaactattgagattgtt

SEQ ID NO: 311781 - DNA, 4065 bp, Cannabis indica
gattttaccctataaagctagcatgttcatgtctgggtttggtgaccctgaccagttcttgacagagtcatgggaccttggcaaacccttccaaagcttgaaaacgttagccgtcatgggccttggttctatgtgggtagccagttttctgtccttttttgacttcagaaagaatttggctatgtaggcatatacaatcttagtctcacacgtggttcccttggaaactatgtatgaaacgtaatggtgagcctatatagtcgaatgttcaacttaagactcaacatggcttggaacctgtaaggaactctaccttatccgtatctcgatacgtggcccctataggagctttgtcttgtttgttttacctatactgttcttgcagggccttggccttatgcatgtgaaccgatttcatatctggcgtcaaggttttcatgttcttgcttttgcctattggacctctatttttgaaaactactattatttatccttaaagccttttatgaccgacatatgatcgtcgtggctatcttcttatagccttaacatgtatgtgtctggatttacttgtcaatccaaagtatgcctgcacgacttagaggtaggtttagtagcgtattctaagcattaaaatttctctgcataagttctttgtgctagtttgatgcattttacggtgtgggttcctcccaagtcaccatacagatttaggtctcttggtcacttgttattcaccaattttcacagaccttgcgtgggacatttcttgggttattgcctgttgtacgcatgtggaactgaaagaataactttaagaagttagtcttgttagctagtggtttagacatagttggtcttacatgtaacaaaagcttacaacttagtgtcctcttttgaaatcatgtagtggctacccgtacgcggcttgccgcacaacgaccatcactgaagagtgatgggaggccatgctgaacaacaatgggtactttctcttttatgggtccctacatggtgaatcgttagaggaactatttgacatgttggatagtgagagtacttaccaagatgttccctattgaagcgtttgggtagaagtttaaactccaagttctcgttgtactcgcgagtcttgtatgcacctttattgttatcttgtaacatggtgtggacttctcagtttggtctgaacatgcttactgcgggatctctgctgtcaaggaatattctgtaggagattcccttacgaagaatttctttcatcgatctgtttgttgaagggccaggtaactctttgtgggcaaccatgctgctttgagttggcttggtctcttcttctttcccttttgtcaagggatcctgctagcaagatgttgtttaccttttgatcactatagacaaaaagtatgaatgcaaactattggtggatcaggctgtccagggcaagaccaggtggccagccacattagagcattgcttggcaagttggagaggctatggttggccaagtcattgattatatggtcgaccaacttgtggaggtggtggccagccaggttgatgactctatggctggccaacctactgaggccacggtcggacagccttttggaggctaggtcgatgttgtagtttcattgcatctacactcggtttgctttgcccctcgccatgattgtcgtagagagtgcaggatgttggagctatcacccaaatccctgctttctagcaaggtttttgtttggaggtatgttgttgtaggtgtatcccatgttggttgtgcaacatgtcttttcctttgaaacagagatgcttagttctttgaggaactgattgtgtaccaagtttgccttggttatcaaggcacagttgagtagtcaagcgagtgcatcgcttgtcgtgccatctttaggagcttgcattttagtacagcctttcaactgacttaacggctcaggtaggccatcatcttcttacattgagctgtatattcacctaggacataatctacgactagttgagagttggggtgtatgtttaggtggtcatcccgagcttcgtgtgctagcttaaggccagcattcggagctccatgttcaacctcattgttagaagatttgaaactgaccttgttgcctcgtgcatcaattgcccctaggtacactaggggccatgcctatttcgggcaggtggtcaatgcacatcttcggttgagttattttgctcttgctctcgcttcttctctggcttctgcttttctcccaaactttgagagatttagggacaaatgcttctatgattagccatgaagcttgtgagagtttggcctttgttggccatgcttagttgacaggtggccttatattggccgagtctcggtggttcacttgagtggtcggcatgatgctttaggtttctatagaacctactactgcagttgatcgatgtacacctttatagggtgtgtttggaagtatggccttagctttttggaggcatggagcaagttgtgagtcaccatctccattagtgggtactaactttcggcgtcgattagtctcttgctgatgtagtatacaaggtgttgtactacgccttcttttcttgtgaggatagcactcattacatgctttgttattgttaggtaaatgcctagctcttttttgtttagggattttgggcaacactggtggcaaatccaatttgtttcttcaactctttgaatgcagtttcacattcctttgtccactcaaattttatgttgcctctaagaatgttgaagaagggtacacatttttttgtagacttggacacaaatctgctaagtgcaataatgcatccttgtttggcttgtactaccttgatggttggggccgacttcatgtctaaaagggcttggctcttgtctgggtttgagcttcatgttgtagctacggaggattttgaagcattcatctaggtcctccatatgcccccaacctttatcgacttgataagcatgtcgtccacataaacctcaatgttgcagccgataggatcattgagcattttgttcaaaagcctcagatatgtggcctctgctttctttagcattgaagggcatgactttatagcagtggaggcctaagtctgtcatgatgcttgtatgctcctaatctggtagttgcaatttccctttcttgcttggctttggagaaggggccatgtgtaacagtgacgggcagattgttggtcttctctcaacatcctacccctagattgtttggaattttaggcagaggtggttgatggatgttactgccttcatgtcatttcgggttggtcagcccatcatggggtcggaagccaagggaacgtcaattacgataaattatgccattagagttttggtggttggattttctccaacagtgagaggtaatctaatatactcggtgggtgcaatgcctttgccaaagagaccatacaccacttgactacattgtcccaagtcatcgagttagagcctcatcttttcaaatgttgatttgaaaagaatgttgaaggaggctccattgtccatcatatatcttgctacagtcaatattcccaatttatgtagtaatgatcagggagtcgttatgcaggaaattgacttgggcagaatctcattttgagaaaaagatcataggctctctaagctttggtttcttagagtttcgttcttttcctattgggatgtcgctttgggtcttatgatagagtgtccgagcatagcggtatcgactctgccaatgacgacccctaagtgtcctgccaccaaaggtttggacagagttgatggcacctacctgtgtgtctgtcaagagatggaggccagcctttgtagatggagttcagccttcgcagacggaggccaagcatcgtagatagaggccagcatttggacatggaggccagccttcggacatggaggcaatcctttaaagatggaggccaagctttggagatggaggccagccttcgaactcttggatatattttaccaggatctagatttactaacaagtatgtttcattaacatc

SEQ ID NO: 311782 - DNA, 1997 bp, Cannabis indica
gcttcaggccgtagagatgagtgcaacaaagtgtggtggccgaaagaagagatagacaattcagaacccgggtgagcaacagcacgaagcacggcgtcatatggaatagaggctgggttaatcctccaaatagcaaactcatcctcaagcggagctgtcaatccatataagtcgttaatcacatcaggagaaaaggggacactctgacccctcactctaacgacatcaggatactttggatcaagtgcagcataaaatgcaggggcaaccgaggccacagcacgcttaggaattgcacaaaatttctcccacttgtgctccgcaatcaaatttgtaatatatgcaggtaaagcttccggggcagggagaaagccgcgctcggccaactggctgcgggtttgcaatatctcaaaccgctcttgatgacggacggggtcggctttggctttaggacgagtagtggggttctgtttaggtggtggaaatgtggaagtggtgcgcttaggctttggttggcccttggaggttgagggagctgttttggcagttggagctttgggtttaggtgaggaggctttacgaggacgagtacggggtggtgagtgtgtggtggaggaagccaaggcaagggttggtgggattggggggattggttgttgcggtggaggtgtgagcaaggtgttggccggagctttacgcttacgagatttggatttggtggttgccatggctcaatctcacaacaataagctcgaaaatatctgctacacaattcacaactcaatagaatattattaaccaaaatcaatcacatcaatttcagtagcatatcaacacattgtagtgacaataacaatcattcaacttgaatatccaccaatagactcaaaatcagaagttagcacaattagccctagaatatgcaatcctctaaacattatagattctcaaaatgcaatcacccaacactaaaattatcatcattaatcaaaaatgggcagtaatgaaaagattatttacaccacagaacaaaactttatccctacaatatcacaaaccaaatcttgaatagaaatctcaccacacatggccaatgacaactacaattaaggacaagaatcaagatagcacagcatattgcagactaatttttagatttagcatgtatctaatcaagctcaatggattgcaaaagaaatttctcaaaacttacagaaatttgaatgagcaattgccttgaaaattacttgacagactatcaatggcacgcgagattgggtctcggagttgtttattgttgagatgggggagttgattgtgggtttcgggtctgggcaaatcggagcaaggcaaggggtggctgtggtggtcgggttcggtttggctggctctcacgagtggggcggtgcaatggctgagaaggagagttgattctgaggaagcaatggcggttgaaagtggtctgtgacggaggcgaaatggggatgggctgaaggtgggttcgcctgaaacaatgggggagttgggttctgaaacaatgggcgactttgggtggtttctggtcgtggggtggctgtcgggtctggagaatcgaagcaggggggcggaggtcgacggtggtcgaaggtgggggctggggctgatgtttgcttcaggcggtgtgatgaaggtcgaatggaggggggtcgggtctggttgtagacgggggaggcgatggggaggtcgaattgtggctggtcgaaggtggaggcgatggaggctggtcgaatggtgaagacgatgggaaatttttttttgaaattaaatttttttatgtaaaaataatattaatataaaaaaaaattctttttttttaataatagtaataatatatataagtgaaatatgagtaatatgtaaaagatggaccttgcatctcgtaatgtgagtgatattacgcctgctgtagcaaaatttccacaaaagctcagcaaaaatcttgctgagtgctctttgaa

SEQ ID NO: 311783 - DNA, 802 bp, Cannabis indica
ttgtcacgatgaggatataattagatacagatacaatataactaaaaattagggaaatcaatctcaacatcaaaactgaatacctgttgcctgttggagcttgaaggagtacccccaattgctgaaattcttgctagtgatcctaaaagaaaataaagtacccatcttcaaaatttaaagaggaagatcactactcatacttcatcaacaaattacagcaataaacacaaaatcaaaaaaaaatgattaactctacttactcaaagattgagtgaagcttataaataaaaaatagctggtggagattcatacctctgcagtcgtcgacaaaaatagagggaggccgtagctgggtgtgccaactgccgagggaggagtagttgtgtgggtgatgcggccgactgctgacaaagacaatagagagaagtgagaagtgagaagagaagtggagaaagagcgagtgaaggtgagaggcgcacagagataatcattcgtggcactacaacagaatgtgctttctacaatacacacgtgtcacctatgacactaaaaatacattcaatattgtgataattacaacaaaaaattatatttttattatgaaatattagtattatgtaatattataatttagagaaagaaaatagagaagagatgagaattttctgagtgttttattccaataggtgatctcctatttatacacatacaagagtcaaatattaagaaactaagagaaaaggaaactaagaaaaagggaatgttgattacattaatggtaataaataaaagatttggacat

SEQ ID NO: 311784 - DNA, 1118 bp, Cannabis indica
gattgaaaagattcaggtcctgtgaacgatttatcaaatcgatagaaacattgtttgacagtgtggccgagtttgtggcacaactgacattgaattttaggagtggacactcctcttccagtacctgtaaatccaccacgaaaaccacctctgggaggacgatgaggattagaaaaagatggatagtgttgtggatagaagttaccatagcctgctggagaaaaattgccatttccagtagaggaggatggaaaattaggacgataggagccacgaccacctgtaaatgtaccaaactgaagaggagaaaattgttgatagccacctcgagaagcaggaggtcgattttgagcagcaagatttgcctctggttttgatatatcaagatcagcatcagaagtgtcatttcgaatctcttgagccatgagaagagattcaacttcagcaaccgaatactcatcttttcttgttgacagggatgtaacaaacacagaataatcacgggtgagaccattgaaaatagcttcgatatggtcctgtgttgaaagattatgaccaatggaggcaagagagtcaacaacatgcttgatcttgagaaggtaatcgttcagattcccagtgagtttcgttcgacgaagttgagttcgaaactgactgactttagctcgattttgagctgaaaaatactcctcgagagtggaccaaatttgagcagcactgttgcatcctaccattcgagtgaggattttctccgtcattgatgagagtagccaggatactaacagactgtcttgaacgtcccattccagaaattcttcagagattcgattctgtgcttcatctgctgctgttgcaaatttctgaggtgttgctgttggatcgagaaatttcagtaggcggtgacctttgatggctgcgtatacttgatgtctccacggaagaaagttgttctcatcaagtttaatcgaaagagtatggttgaacgaaaaggcaggaggtcttgtgagattactggatgcattgggacgaagtgtagaatcgacagacgacgccattaaaacgaatcaagctctgataccatgttgagtttgagagaaagaaagaacaagaaagacaga

SEQ ID NO: 311785 - DNA, 1596 bp, Cannabis indica
agattgtaaagggttttatttagggcacaaaacccaacatcagatctagtactgagtctgagtacagggcattaggacatgttttagcagaaatgtcatggattgagtcattgcttaaagaactgaatttcccacttcttcttccatcaatcacatggtgtgacaacatcagtgctagtgctctggcttctaaccctgtcttccatgctagaactaaacatattgaaattgatattcattatgtttgtgacaaggtcctgcaaaaacagttggaagttaggtacattctgtctcacgatcaagtggctgacttgttcactaaaggtctatcaaattccagattctcatttctagtcaaaaaaacttggtgtgagatcctcaccctttcatttggggaggtgttgagaaatgagatgcaatgcgaaggtgcattgggtcctatcagcagtgtgctgcaccagattgctctctccttagattgtgccaggtgtaaaggggtccacgtttataggaatcaatgattggaaattctgttagaatattctctctatgtaatctttattgggatctgtattttgccacctgtaaaatgagtcgttgctcaccaaccttgtattggccctaatactctgctatataaacaatactctgactcaatgattaaatggggtgagaaattattcatcaacatatttcgcttaattttactggtgttaattctaatttttgttttaatttgattttattcggccaattataatctttaaacacgatgattaagtatagattaataaagggataatggtagaaaaagaaaaacacaaaaataacaaaaaaaatgtataaaaatacggttgtataaaattttaaatatttttacgattttcatgatattgtttacagaaaatacgatattttcatgtatttttatattgtattcttattaatttattgtagattttttgttatttctatatttttttttattattatttgatgttatttttacgtaacttttatttaatttttgtattgttttgttaaacaccatataaatgtaaaaaaataaaaattacactaataaaaaaaaatagtattttatataattatcccattaataaacacttgacgataaatattcaattttaagaaatgattttatattgtgaattttaattttatcattgctaatatccatacagtaaatatagagttttctttcagcgtaaaaattaaatttagttcatgatcaacatgtttattaatagtaagagtaaaaattgcaactttgcataagcaaacttgttttactatatttcatttatttttttattaatcttaaccaattgatctctaaataacgtgtaaatatagattaataaacacttcctaacaataactttttacataaaatgttattaattcaaagtaagtttaaaaaattaataacttcaaatttctcaattgaatttattcgtttaaattccaactaattcgcgcggttataatattttttaagtttgctaaatatttaaatcaataagtgatataatttaaagtatagcatacaattttgaattaacaatactttttaat

SEQ ID NO: 311786 - DNA, 1190 bp, Cannabis indica
gtacggtggggcccccctgccgtacaacggattccaatccgtgttttgcatatatgggtacaaaatcggctccctaattttataataatttataatatttaaattatttattttaaacgcgtgtaattaactgtttaaatcttattttcgacaggttaattttacataatatcttaaatatatacaatatacacaataattaaaaaaaattaataaataaaaatgtctgggagatgcaccatcaaaattttcacaataatatttaagtatattatttacgttaattagaatttttacatctaaactttaatatgtactaaatcatgctttctgaacttttctagccgtgaaaaattctccataaactattgagattgttagatttaaggacttttgtctattctcattcaattttactatttcagtgattgtttatatactaaatcatgcttctcaaactttgatatataccaaatcatgctctttgaactttaacatgtactaaatcatgctccctgaactttcatccatattaaattttttgactaaaatcggagacaaaaattcttaaatttaacaatctcaatagctcataaagtatttttaacgatcttaaaaatttaggaagtataatttaatacatgttaaaattcggggaaaaaattctaattagtgtattatttgtttaaagtagaataataagaaaagaaacatattgggggagagggagttagttagcctgatttgtttgaaccgtggattcacatagttgactttattaggctctctagattttcatcatcatataattatttctagtcaaaattattcaaccaaaaccaaccactcagttatttaccaaaaatgtcaatagagaacaaaaccattttgtacatatttgaaaagaataatctgaaaacccaattcagattcaccccaaaattcaacccaaaaaagaaaaaaaaactatcaagttgcactcttattgcttttcatttttcattgtcttaactctttcttggttttgggtttattttaatttatttgaagacttatacttgaattggagacaattaaaatttgttacaggaaaggaattattacttaaagaagaagaatgggacatgaattttgggtgtgtggcacaaggacagagctacatactccatttcttttaaaaaaaattgtaa

SEQ ID NO: 311787 - DNA, 715 bp, Cannabis indica
aaagggttttatttagggcacaaaacccaacaagaacaaccagcaccgacgcatcggaaagaactttcttatgatagtcataataacccctaaatgaggagttgtgctggaagctatatacgtaatgcacctctctggccatgggagccctaccaacggcctccttgagggctatggagaagcaggtccatatgatcgacccgctcgacatcaactgaaggggagctatgccaaaataatccaaaacctctacgaaaaaagggtggagcagccaagccacgcccgccatgagaatagactacctgaaagccaccatgttcactggtgaaaagttggcacggtcctccaacaagggtttgaaaccccgctccatagcatattcgttgactatcctcttgatgtcagactgtgttattgtactctggacatcagccatcccatactagtgtgaggggtgacgggtggcgggtgggaagaggcgcactagggttgctcaattggcggtgtttgtccatatctgtaaaagcacaaggaaagttagaacaggacatagtgcacttcatgcctttcatctgacgggcaagagccttccgacttgacttaggcctagtgggagctccgccctctgcccgacagatgggtggctctacggccaagggtatgggcgaacaatttgttggaagttattttaccagaaacttagatctactcacaa

SEQ ID NO: 311788 - DNA, 778 bp, Cannabis indica
ttttttttttttcaataatttgcttttagaatcattcaaggttttttgaatgtttgagattttacctatgattgtcaccacaaatgttgtgaatttaggggaacaattgaggaaggtctaattatttatatggctgtggatttcacctaagactaaatccacttttaactagacaatagcctacattggtgttgctgtttgagtttcactctgttgtttttaaacattttctagtatttatttgctgctgatcacgtacttggtttgaattttctaagtttaagttattttcagggaatccctctagcgccgctttgggacttcacgaggggacagtttgttggtgttcttagtgcgttggattttatattaattttaagagaggtatatccatgtctagaactatgatcttttcctatttatgagctcttctagattgataaatcactttgttgatttcatggataagctttcttgctcctacaaaacatacaaaaaatttgaagtaatttggaggttcccaaattctgttgttggatagtgtgacatggtaagatgagaattacacatgtcatgaaatatactcttgaatgtatattgaaatatttgtttctggattttgttttgcagtcaatttgacttgctttaaatatgatctagaggcttggtcgtgcttttatttatttgaaatttcactttatttcatttctcatctttttccaaacatgccatttgacatttgacatgagcaattgatttttcacctgattattttttt

SEQ ID NO: 311789 - DNA, 712 bp, Cannabis indica
tgttcagttttgctgtagcagaattattttctgctgctgcaaacgcgtacatttttatattttcttatatacaactgacatttgcaaaaactcagtttttcaatattgaagcaacattgattatccttgttggcatgaacatgtgaaatatggagtaggcacaattatagtgtaactgttttatagtatgaattatgttgatgaacttttagttaatttggttacattcagcaaaataattaaaaataatggtgtaactggttagcaataaaataataatggtgtaactaattagtcaaatacgtttcctattggttgactcggtgacctaggacatttgacctgtagtagtactttaagctattattggtcaaagtcaaagataagttttggaactgcaccatcagattgcaccgccaagtcactacatttatgacatgtggcgtcaaaatatgaacagagatcaattttttcacggccttaaatggagattggatatacttatacaaacaaactactatcattgcatcaacgttattggtgcaactcccatcagaagcagcaactttttttttcttcaaagaaagcagcaactttattttgagggtctacaattttcattttaaggtaaatactattttggactctctgtttacaaaaattattaattggaccttgtattttgttaaatgacaaaatggaccttgtattt

SEQ ID NO: 311790 - DNA, 788 bp, Cannabis indica
aataaaataaaactaatttaattttaaaaagtctgtttatgctctctcttggagaagagccttctgtttgaaatgctgcaaaagcctgaaactaccatggatgatcttcttgccaaagcctcgaatctcactgtgttggatgaagatggttgggaaatcaatgaggctgggggagctgttgttggggaacactgtgcgaaggcaagattttgttccaacagaccgatgagtcatcctctgctgaagacgattttagggcgtgtttggggcatagctgataataaatggggagtagagattaaattcagcaataacaaatcaagtttcttggtcttttccttcaaatccgctcaagatttgaacagaattttgaccaagagcccttggttccttaattatgggactttgattcttgaaaggatggagtctttgcctcaagattgggaaaaggaattaatgcgatttccgatcagtgggcgcatccttcacttgccttcgcgctcgattactcaaggcaatttggttcgactggcgaatttggctggtgaggttaacgaagttcagcccgcggatattcctcgaatcgtgaataaagatttcttcacctttaaagtttggtgcgacattactaagtcgatcttcccaggccttctctttccttcgaaagaaagaaagaaatggctcccgttcaggtatgatcgtcttcccttcatgtgtttcaattgtggttttttggggcatgatactcgggtttgtgcagaacctcccaagatgtttgatgatggtct

SEQ ID NO: 311791 - DNA, 567 bp, Cannabis indica
atgatactcgggtttgtgcagaacctcccaagatgtttgatgatggtcttggaaattggaagccgagctatggaccctggttaaaagttaatgaaaaaagagatgccaagatatactcgatgtttgatgctcatgttccctcggtgaagaaggccaactgcccagtccatttagaggaagattcatcctcctctgctgtcaaggtaactggtttgggacttggtgatctcttagagtccacttcggatccttggactaagttggacttgaatgctggtttggatcttattggtttgaaaggagtaattcttgacaataaagaagtgcaggctaacagtagggaaaagatgaaggagaaggttgaggctggaaatatcaattgcaagagaagtggttcctggagggaagacaatagcaatatagaaggttctacagcaatggatacagatagtggctttccttctctaaatttggggaagggcagtactgggtctatgatgaacgccattaacttagtggatgcccccataagttatgttgataggttggaaatgttgggttttatgc

SEQ ID NO: 311792 - DNA, 1356 bp, Cannabis indica
tttggactccaaccccaacttagaccttggagcccagatttagacctgccccggtcccgacctcaaacccgaattcaataaaatttacacaatgcactttggttttttttttaaattgaaaaataaaaattattatagaacataaataaaaataaattttatatttatgtttgtgattaaaatttaaaaataaaaaaattaacattaatcattcttattactattaaagaaaatgtaccaatgagtcaatgtcagaagacaacgtgttatagatcacatcacactgtatagacaatattataaaaaggaaagttgtaacaaacacttccgaccaccaaagatctgagttcagacacgagcccaaaattcaaagattcgagtaagtattagccatggctacggaaacatctgtttcagacaaccaaaacccagaaatcaacagcccaaataagcagatcttcatcttatccggtcagagcaacatggccggccgaggcggagtaaataaaaatcacaagtgggacggagtcgtaccgccggagtgccgacccaaccatgggatcctccgactgagcgctaagctccactgggaaaccgctcatgagcctacccacaaagacatcgacaccaaaaagacctgcggagttgggccgggaatggctttcgccaacgccgtgaaagcccatctggcccagttcggcccagtgggcctggtgcccagcgctgtgggtggaacggccattaaggagtgggcgcgtggggaacacctctacgaagatatgataaagagggcgaaagagagcgtgaagagagggggtgagattcgagctttgctttggtaccaaggagagagtgacacgtcatcggaggatcaagttgcggtgtatcaggagaaaatggagaagcttattcagaatgttcgacaagatctttctcttccttcacttccaatcattcaggtcataccaaccaaatttgttttaaatcctacgtataagtcattacatttttcatttttaaaaaaattcaatttaaatatacttagtacataaatgacttcatatttaactattaaataataaaaatataacttacttattattactattaaaaattaaatttaaatatttatttacaaaattaaacttatttccctaaaaaaaaacaaagttaaacttatttatttataattttttttttaataataaaaccatataaataagggacttttccacttttacacttgaaaaatagtattttttgtatttttacagaattttacatagaaattcttattgaaactagcgctgcaacctaaattataacaaaaaatcatatagaaacccctattgcaac

SEQ ID NO: 311793 - DNA, 3465 bp, Cannabis indica
gtacttgattgcttttaatttcctaatgtgtacttttggggggaaatcgaagcattcgaaattctaatcgattacaccctttcactaatttgcatataaataggatagaaaatcctcataaaccacttttaccatttttcttgctaagtgatctcagagcaaaaatagttttttctctcgaatctgtcgtggaatttagcagaaagggccgatcagcttcgtccgaacaacatcgaagcttcaaatagtgagtaagtttctcatctttttctccttttattcttgaatcttcaattttctgggtttccattgtagagaattcaattgttcttgacttgttttaagaaaaatgtagaaaatctaagcttgaaactttgtaactttgactgtgatagatcatataacttccttgttgtggtatttcgattttaatttcacaatgttcggttctcactttgcctgttcagggtttagtgaagataaacctttaattcaaaattcttgaaattcagggttacaaacctaaccttcacgaatttttttgcctttttgatctgtcaattagacctggtcggtatattttcttgtttttgttatatctcggccaaatactcatctcatgtattttcttttgcagatgaactgtggtgagtttcggggaggcaatcactatatcgaccaggatcatcttcagcttttatacgaggaccaacctcgtctttgcgccagtccgtcctcttcgagtgacgaactttctaactcaagttttgaagattgggaggtgagtagtgaaagttcacctactctagaacacgaggtgtagcactatttttactccggacagatcacaagaggatgctacaggcgatttgttcggagcttaggaaggagtggagacgttatcttccatctaactggacatatattgtttggcgatgtgttgttgacactattgccgtaaggcgtctaagttctggtgccttcggcatccctatcgctgttcctgtcgtgactgttgcacaacacacacaccaatacccgtccaggaggaggatgatggcctacacaaaacagacgatgcagaagattaatgcaactaaccctcacgtggcccagcatgccacgttgccaagtgtcgaacatgacctgatcgctacaaaggtggtccctcattggaggcaaagtgccttgatggctaggtgggtgtgtcctccgtccattgtaactacggaccatttacgagatttggagaagactgggtatctgggctgagttgagtgcttcctccttactccaaatcaccgggcaaccagtctgagggaaggatactatgccctgtcgggtgctcacacaaaacaaggggcgatgttgcctttacacccgtacttcaaaaggattgcagactactaccacctttgtccaacccaattcacacccaagggcatcaagtatttatccgccctgttcgtcctctacgctattcaaggatggggcgagccgtctccgcatgacaccaactggatctttgatttgaagtctatgcccaagcaaagcaagtcagagtacttctacttgtctcagctggacgacaagtggctgaagggaaccatggacacagaggttagcaaaatagggcattttgttaatgcgtattactttgtgactggcatggagactactcatactcgatttcagcagatcctcacatattgccgtcatcctttcatactgaggcttagggaaagggctcaaaaaatttctctaactatcggagaatgctcgaaatatcactttattgaccaaagaggccaactttgtgaagtacaaactttacccggtagattttataccccaccccatgaaggagaagaagaagaaatccaggctgagccaagctaaggatgcagagcaggagaaagagctcattcaactgaagtgtgaggctaagttgaagggaggcgctagagccaaacagtatgctcaagaatattcacatcatgagaaggatgcttaagaatattcagagcaggagaggccgcgtaagaagaagaaaactctcctgaccgagcatgcgccaattgagcatgccatccgaattagggaacttggtgtgcctgctcgaccatcaactcctgtggagggaaaaggaaaagtcgtcctagaggagcaggaagactcttcggacgatgacgctccatttgtgattgttcgggagaccacccatgtcagcgtgcaaagtacttcaacttgcatttttttttttatttttatgtcttcacatattttatgtcttcctctgactatgttgctttatccgtggataaatgtctcaaaagatgattcaggctttaaagaagagagtaggagatagctcgggcctgtctcctttggccaaaaaatttataggtggtgagatcccgtccaaggagaaaatgccgattgatgaggtcattgatctctgtgaggagcaacctgctgtggacacttcaacccagaaggtcttgaagtccaaaagttcccaaggagggaattcggatgggtctgagcaagctaagactggatcagagcaggtcaggggcggatccgaacaggttacgactccttctacaaccctggtgctttgcacggaagccaggagaggaaaagacatgcttcatcactatatggctcggtctcttccctctatcctttttctttcattcttctttgaatagttcggattctaacacatttttcgtacgggctggtgtgaagatggcctatgcctactctcaagccaagtcgactgctgtcaagaatcttaccacctctagcgcgatgcaaagggacgtggacttggccaagaaggacgctgaagatgtgcgggcccaactcgagatcttgaggaacaaaattggagaggaaaacatgaaacttattgctgctgaggccaaggttgttgagttgaccaaggagctgcaagatatgccctcaaccgtgcatcttgaggtagaccttgtttctttttcccaagaagttaccagtctctaagatgatagggtgggtctccaaactcttctttgcaggttggaggaggaggctaagaacaagaagaccagggaggaggaatttgaggcagaggtcggaggactcaagaaggagattgagagcaaaaagtccaaggtggaggagcttgagagggaggtggataccttggagatagcttgtctcgaggttttttacgacttctagaaagccaatcccaaagggaactttgattacctcagcgcttccaaagatatgtactttaattactacatggcccaggcggccaatgagaatcccaaggcgaccacctccaatgctcatatcgaccaaaatattgatgctccttccgtccagatcgatgatcccccgactccttcagacccagtcaatccttaccaagagcctgggactcctgctgtttgattgccttctctttat

SEQ ID NO: 311794 - DNA, 1182 bp, Cannabis indica
gactttagatattattaaaaaaaatttagaaaaagttttttaaatctaaaagttaaaaaaagaatttatagaaaataaggcaaataaggccattcgattggattggataagagcttgttatatgaatgaaagaaaattatgaacccgttttgcttagtcaaatagggctattggattagattggataagagcttgttatttgaatgaaagaaaactatggatccgtttcgcttagccaaacaagattagtggattggattggataagaagttgattggaaagaatttgttatttgaatgaaagtaaactatggatccctttcgcttagcttttaatattaaaataatccatatgaaaagtcataaaaaagtctttaagatttgtagcttctctcaaaataaattttgagaagctatttttaaaattaaaataatttacataatttttaatttactcacaaaacctttttgtaataatatccaaacaaaaattactttttattaaattttttttttcatacgttaaaaataaatcaaatcttattatataaattttcatataaatcaaattttattatacttctagctataagtaaaagtagaaatttagccaaaggagacttatatggaaaaataagtactgtggattcaaaaaagaacgggttgggcagggaactgtaggaggttagacaaatttcttatctaaatttcaatttcaacgttgacaaagtcctcaatattatgctgttattatttatttcaatgtgattaaacacacatggaaggcctttctctttgctcccttctttatccgattgtttcaatacgtacttgttcatacttttcctggctgatataagttattcatgtcatgaagtttcatgcattccatggatttagcataccttgctgcagatgttgttatttccagagctggtgcaatgacttgttatgagctcttggcctttgggaagccttctattatggtattctccccttttgttttgagccagtgtgtgtatctatacacatcccatgactgaatattgcattgtaatcaactttcatttgctactatgcagataccatcaccaaatgtttctgaagggcatcagttcaaaaatgcatctctaatggcagatttagctgatgcacaggtcataactgaagatgaactcgattc

SEQ ID NO: 311795 - DNA, 1292 bp, Cannabis indica
aaaataatttccaacactattatgtaaaaaccataataacagtaacattataggttcagtctttcttgagctctcaatgaaagtacccaaatttgaccgagatttttagaaactaaatatttgagaactaaagaaataataaaatgtaaaaattaatgtgatggagatttttatgtggttcgggtgttaattaaccctagtctatgagtcagtctattagtctctaaggacgtatttgatgtgtttacaatattttacaggaaatcctaactctacgtgttctcagtttctctcttgaagaagaagacttaagataatattggcagaacttcagctatttaggttgtgatcccccctttgtatggaaatagaagggtatttataggctaagggcgggtatggacatggccatgacccgcctagggtttttgctgaaagcccactgatggggtaaattacatgaaaaagagagctgaatattgggtctcttggaaacaattgtgcttgtgcgtgcagcagctgaacaactagggaccattgtatgtcgtggacacgtctcgctcaaaggtttaacctttaacagtagagggcacgtgtcaccaaaagatttcacctttaaaaatagaggtctgatataaccatctggaaaaaagtggatgaggtgcatgcactaccatgcctgggcataggggacaagatctgatcttgtgttagaaaaattatacccgtcgctaggcaatccaggttacacaaaaggtagacatctgcgacactcttgagcggtcagttcccggcgacaggtccttcgagtacccatctagatatcaattggacaggcttccacatttggaccactccgagtttgggagagaccatatgtcgtttgtgtccggtaagctgagataaggaaaaatggactttcgtgtatcactcactcttgacttgtttccggttccttgaggataagattgtagtgagagattttaattagtgagattatgaggttaatccattctgtttatataccacatttcacatgttcagaaacacagataacaatatatatatataatttttagtacctcgcaaaatatattattattttttcaagaaattttttgtcaagctaaaaaattcgatcaaacatatattagtataagtgatattatttttctttctaaagtttacatatttaattttatttttggttttctaacttagctaataatatttatgtgggatatttattttaccaggatcttagatctactcacaagtatgttgtttaaaca

SEQ ID NO: 311796 - DNA, 1868 bp, Cannabis indica
tagttttagtgtattatatatttttaagcatatattgtcaaatttcccaatagaaataaccccattaatctaactttgttaacttttcttttccaatttgattcaacaagtttctttcttttataatagaccatactatcaatttaacctaaaatatctaaaatcattgtataatgtcaattaagtcttttttttttttttgacaaattagttgttaaaatattgtttaatttattttatatatttaatagaaattaaatattaatatcttgtgtgtaaatttatttttatggttgtcatatatcttttaggaaagtttttgcaagaaaaaaagaactaaaagttttattaattgatttatatattgtataacttattttcattgataataattgctattttgttcttgttatgaatatagcagaatgtataatctttttatggcaggaatggaagcctaaattgtgatattgacttttgatgaaagtttcataattctacctgagttgtcactgtgattctattactgaaaattagggtttattttaagaaaattttgtacaactttaaaaactattgtggatatctctagggtttttctatatgctataaataggacctagagagtagccaaacgaattaatctcttttagtctcatatttttatatcttaattttgtaagaagagtgtttcatttgtaaaaacgtagaatgctctactagatttttgtgtctttgttaatgtactcttgttgttcatagaatacgtgaagagaagctttgaacaagtgttggtctttgggataagacttttctaagtctcatttcgggaggaagtgaacatatatcttcgggagaagatttgttaaagactcacttcgggcgaaagtgagcacacatccttatttgaagggagttcactacttggtgtgtttcagagatcaaattagcaaggtaaattacaaaaggttggggaaaactgttagagggagtcttaatttgttcaagtcatttgtttttgtaatctttgatgctttactaattgatttcattctctggacgtggccttgtagactagtagtatttaaacactcataccacgtatagttttcttgtctcaagttttaaattctgtacttattatttctgcaatcaagtattatgattttatcacagttattgtaaaattaaattattatttttttcaaaacacggactttgaatatcggtggaaagtggagtgtattgtgtgtaatatatcaccgaggtaaagaaaaaaaaaagctggccatgaaaatgcccaaaataagagaaaaaataataattaaaaaagttgcagtgcaaactaatttgttgttggttgttagtatgatgccaaattctgctgcaaaagaaaataaagtggaagaagagagcagaagaatgaatatgacacacatattctaaagctaaagaaagttaaagttcttctgttgaaaaagtaattaagaaatgtacttgcgtgttgggtccgacaataatcttatattatagtagatgtggtcgcttataagcttttttgattatagtgaaattgtaatttaagcttattacttatggcttgttcatagttctttaggataggtttagggtatgatggataagagatttgattcattttgtgttctcgttttctacttcaacaaccgtttcactttaactattaagtattttaagccttttgagtttttaattttaatatggattggtttaccatcatttctttcgcatactctttttcattatattatatggtaatgaagttttaattttgttattttgtaggttgttttgtggagggcctatatttacagagaatttgtcgataa

SEQ ID NO: 311797 - DNA, 608 bp, Cannabis indica
aaacaacatacttgtgagtagatcaaagatcctggtaaaataaactccaatagtggccaatcttattatgttccttttccatgtggggagggacatgatgtgattcaccatatccctcatctgcaatgtagggatggagtgcttgtagaatggcacccgctagaattggcagtggaagatctcatgaatgtccaaagtggtgaagtagtttcaggcatacccgccaacttttggcatagttatcttgttggtgtcacccaaccactggtggccaacctgactaaagtagaagtacctagccttgttcggcttcggggtagactttagataaaaataatatccaatctcatacggagtggcctgaggccaacctagcaccgcatacaaaataaatattgctaaaaggtactttatactttttggtgtgatttgtgttggacacatcctgaaataagcagcgatgtctatgaagtaagggtgtcgcgaaaacattgccccctcctttatatgacgctctgaccatgccatccaaccaagggcaagccagtgcgccctctggtctctagtgggtatgtctcaatgaacacccagttggaaattattttacc

SEQ ID NO: 311798 - DNA, 978 bp, Cannabis indica
agaatctggaagaccaaggaaaagaagatttgtagctgattgggatacaaaaaaacagaataagtgcagcaaatgtggtcaacatggtcacaaccgaaagacatgcaacaatcaagcaattaaatagatacagcagaattatttgaattgtttaaatctctatgagaattttgacaacatgaaatgttagttttgatatattgctattaattatcaaagttgaaatagtttattagtagttgcaaaatagtttctggacagttttgatacttattaagaatttcataagaaaaagtttttaaaagtcgaatatgagtttttataagttgtataataaaaagtacaaaaagttgcataacagttggtaatctattgagataagatgttagaaatgaaatgataaatattttaactaccaattgagtttgtatacagttgcataatggtttttttaaagttgtacgcttaaaaatataccaaacatattaattgtaaaatcataacacaattgctattaaaacataaagaaaatgaacatagtataatggttaattttaaatatcctataagttgataaccagttttataacatcaaacgtatagagtacctaaaaaacattaaaaaaaaccaaatattgtcttaaatgaaaatcaaccaagcacaacaaagtttcccataaaatggccctactttttcaatttagaagccttggaagacttgctctgcttctcatcctcactatcaatactttcattatttttcctttgaccatacgaaaacaagagggcagcaagtcgagtgcggaaaacttcaatgtcaaagtcatcagggacatctttcccatgaatgaagaactccacaaatgctcctcaatcactattttcaaaaaaggaaaacaaaatagttaaacaattattatacaccatgaaaaaacttaaaaaataacaactcacttttctgctgagatggaagactag

SEQ ID NO: 311799 - DNA, 919 bp, Cannabis indica
attccgttaagggcgtagaaatcttagcaaatccttcaacaaatcttctgtaatatcctactaatcttaggaaacttctaacctcagttgcagacttaggtcgatgccaatcccaaactgcttcaaatttcactggatatacccagataccatctttgttcaccaaatgccctaagaaacttgcttggggtaggcagaactcacatttcttgaatttagcataaagcttatgctcctggagatgtcaacaccatctgaagatatttctaatgtgtctcttctgaaacaaagtatattaaaatatcatcaatgaagacaattacaaaatcatctaaaaaaatctttgaatactcgcttcattaaatctatgagtgttgtcagagcatttggtaatccaaaggacatcaccagaaattcataatgttcaaactgggtacgaaaagttgtcttaggaatattctcctctcgaattttcaactggtgataaccatactaaggatcaatcttagagaagacggtatttccctgccattgataaaaccaatcatttattcttggtaaagtatacttattctttaccgttaatttatttgactcccagcagtcaatacacattcataaggttctatccttcttcctcacaaaaaaattggtgtaccccaaggtgaggtactcgggctagtaatttcaagcacaacatcccttgtaactgaaccttcaacccttttcgctctgcaggtaccatctgatacgaagctttagatacaggctctacccccggtatcaaatcaatttcaaaatcaatttttcactttagtggtaaccctggaactcctctggaaagacatctagaaattcttgaacaactgatacatgtttcggtcccgttggtgtttcttttgtagtatccaccacactg

SEQ ID NO: 311800 - DNA, 1074 bp, Cannabis indica
gatcaggtaagactcgattttggtgcttttacaagtttgttattctctctctttcttttctttgtaatctgaatctaactttgtgttcttcttgtgcatgtacttctcctagctcgataatcctcaccacgagagttttactctcagatctggaccagttctctctggatcttggatttgggagctcgaggttagggtataacctccttctcttctctcttactctctgttctgtattctgaagtagatcttaggttatttgctttgatttcctgcttatatagtgttgtagagtcggttgatcaaaggtttaggagttagttacaatttcggttgtaactaactactaaatcttgatccactagaggcgaagccacctaggattgaatcaacttattttatttcactttgtatgttgctgatgtggatatttatgtgtataagggactgggtataagtggaatttattcaacagaaacctagctccaactcattttatagacgaaatttgggaagtttctcattttttccgctgaacagtgaaactgatgcaattctaaaattttgctacgacgcctaataatattttaccataactattttgatatcattcagaattgaacgatttaagatgttttggaaagataaaagaatgatctagaacatttattcagaaagtttttcttgagagtaaatggatcatagtcaaaaactatcttgaaacttcagcctttactttcagtcacaaacggagcgtgttcagcatctaaaacttaaaatacttaaactactagtctaaaataaattatgagaatatatgtattttttaaataatatttgtttacttaattttgagtagattgttaattaaataagtaaattagtttagaaaatgaacacaatttcaaagaagatatttgtaattattttaatagttacgagtaaatttttacaacaagaaacaaaactctacaatataattattgtttattgagaaaagtctaatttattatatacattggtaagtgtcacgggctcaccttttcaggcagcggaatacccgtgcggcacctt

SEQ ID NO: 311801 - DNA, 2983 bp, Cannabis indica
tctacctgtccattggcttgaggtcgtgaaacaagaagctcttaataattttgttcctttcacataactcagtgaacaactctctatcaaactgagttccgttatcagacactattttaataggtattctgaatttgcagattatgttcttgatgaaaaagtcgagaactttcttgcttgttatggaatctagaggttcgatctctgtcaattttgtaaagaagtcgactgctactactacgtactttgctcctcctcaccctgtggataatgccccaatcaaatcaatcccccatatcgcaaatgggtacaacaaggtcatcattcttagttttgttagtggtatgcgaggtatattagaaaatctctgacatttatcacatcttttgacaaatttgtgtgtgtctttatttattgttggctagtaatatccttgtcgaattattttctttgacaaactctgtcaacctgcatgatctccacagatgttgtcgtgtatttctttgactatctcgtttgcttctgtggggagaacacaccgtaggagaggcattgaatagcccctcctatacaatttgccttctactatcgtgtagcgaggtactgaatacaagagttttgtgcctcgtttttgtctactagaagttgtccattgagtagatagttaactatgggtgtcatccatgtaggcgaggcatcaatcatttcaacttcttccattttacatgtacttggttcgtctaatacctcgactggtaccaagttcaagtcatcaagttcgttttgcgaggccagttttgccaaggtgtcgacattagagttttgttctcttggaatttgtttgattttaaaataatcaaacctttccaagttcttccgaaccttctccaagtatttttccatttttaaaccttttgcctggtattcgcctagaacttgatttacaattaattgtgagtcactgtagcacacaagattcttaatttttaacatttcatctattttcaaaccagctatgaaggcttcatattcaacctcgttgtttgaagtgtcatattggaatcttaaggcataatgaaacttaaagctttctggagagattagtatcacccctgcacccgagccattttcattagatgctccatccatgttcaacttccaagtgtctgtgtctcactgtataagtggattttcatttggagttatcccttctatcaggaaatctgccaaagcttgggccttgatggatgttcttgggtgataagttatgtcgaactgccccaatttaataggccattttatcaatcttctagaagtgtctagttttgacaagacttgtctttggggttgatcagttaacacctttatcggatgtgcctggaagtaagaccttaattttttagttgcatgaattaggcataggttgagtttttcaagagggggatatctcgattctgcccccagtaaccttttactaacatagtaaactggttgctggtgatttccctcttctcgtactgatgctgcactaatcgtattctccgagatagccaagaagaggagtaaagtctctccagttattggtttagccaaaactggaggtgttgacagatgtttctttatatttgtgaagccttcctcacactcgtctgtccattcaaactttttttacatcgcaacacattaaagaatggtaggcacttgtcagttgatttcaagatgaatctgtttagagctgtcattcttcctgttaagacctagacttcctttggttttgtgggcgatggcatttctatttatgccttaattttttcaggatttgcctaggtgcccctcgtgttgactatgaatcccagaaactttccttaggagactctaaaggaactcttctttgggttaagtttcatattgtacttcttcagtatctcgaaacactctgcgagatcttttgtatgatcttcactttttactgactttaccaacatatcatcaacgtagacctccatgctccttcctatttgccttccaaacatttcatttactagtccttgatatgttaccccagcattcttcaaaccaaaaggcgtgactttatgacaataaagtcccatgttggctacaaaacttgtatgctcttgattagggacatgcatcttgatctcgttatgtctagaatatgcgtccatgaatgacattagctcgtgtccagcagttgcatccactaactggtcgatccttggtagtggaaagtaatcctttggacatgccttgtttaaatttaaatgtcaatacaagttctccgagttccatttggtttaaggataagaacaggattagatgtccacaaagggtagaatgcttcgcgtataaagtcgttattcgataacttgtccacctcttctttgagtgcccattatctctcaaaatccaagtgtcgccttttttgtctcctaattgggtaatttgggtcgatattcaagggtcgatattcaagtgatgggaaatatttttagggtcaatccctatcatatctgaatggctccaagaacactgatccttgttttcctttagaaaacttattagttgctattttagttttttatctagatttttcccaatgaatacacaccttgtgggattttctggatctaaaataacttcctccaattcctcaattggttttaacaagttcttttcatcttgaactcgaggatctagatccttgtcctgtttctcactttcctttgttacaactatcattagttggcggccatgctcattatttttgtagctctatgcgatagcattcacgagccagtagttggtcacctcgcactacacctacacctgttggtgtctgaaacttcaaagataggtgtttaattgaactaattgcccctagtccaattagcgcaggtcgacccagcaatatattgtaggctgatggtaagttgacaactagaaatgacaatattatttaata

SEQ ID NO: 311802 - DNA, 1707 bp, Cannabis indica
acgggtcgactttatccttaatgggcggggtgtcagtgctttggctggttggagctcaaattcttccttgtctttttgggcctcacaaaaactaagatatgcctccttattttcattgaggtaatcaaagttcgcatctgggtttgccttccaaaattcataaaaaagatctagggcggccatctccaagttgtctacctccttttgaagtgcctcccgctctgcctgcccggagttgagactctcctccaaatactatttctccttggttaagctggagagaagagcccagagaccttcctctcatcttttaaagcattcagatctttggtcaaagcttcaatgttcgctttgagctgagcagtggacaccatatccttaatatcctgctacaatttctcaactcgcttattggaagccaaaaattatttattaacctcacccaactttacactcctatcctcaacctcctttattggtttcctccacctccctcttcaagttggtggtggttgttatagttttcaaggctgtggactttgctcaggagtaagtgtaggccatcttcaagttaagctgcacgaagaaaagttaaaatctacacgggtaaacgaatgagataaaaaccaaaggaaatgcacttactcgggtagcctccttcagtagcccacccatcagcagttccacgaacatatcttcccctccaaacagctcatcgtttacctcggggagtactcggtcctggtagaactgagcatctccttacccttcttagttttagggttcagcgcgacaaaagtggctaaaggtttgggcagttcggacccatttgtgcttccccctttcccacccttggacggggtagccatcacctgagactttgagttcttcttggctggtgtgatgacctctggcattgcttccttagaaacctcaactagagacacaaatgaactcattctcattgagagtgctcgagactatgtccttgggcggaacttcatccacctttgaccgtttggctagagatgtctagctagagccattgcccgacctcttcttcaaagcatgcaacaccttctaagacatagctgcacatgaataaaataagaagaccaaaacaactgcaatctaaggaaatgacaaaaaaatttgaaagcaagttaaagtaccctacccgtaggcaggagcattttcccgaaaaagtaaagaaggagcatcattgtctgaagaatcctcctgttcttgctccaccatagtggctcttccctttccagccaccagggcagacgatcaaacaaccttcctagggccatctctgatcttgatggatcgctttatgggtacttggctatttggaaaagcctttcttttcttcttcttcttgctcggtgcctccaatccgtgtacaacctctcctgttgcttcctcaccctttggtacaaattagtcgaataaatcttatacttaacaaagttggcttcagtagccaggagagagatgttttgttcatcaagagagagttgggagaatttttgaggcctctccctgagctccagtctgaataaaggatggtagtaggacgggatgttctataattggtgtccatcccttttacaaaataatagtcctctacaaagcctcctatctttgtcagctcgatgtccattgtaacaccattaactaacataggcgtattacgtgatt

SEQ ID NO: 311803 - DNA, 533 bp, Cannabis indica
ctgttacttgctcctccaatactgatccacgcatgctggttgtgtccacgggtacttcttctacttcttttgccactcaaccaccgactacatccctattcacaccaccctctcttaataattcctcactcattaaaccaccactgcctttcaatttgccaaacactgctcctggttttgatgtcccaattaataataaagggaaatccatttttgttcctaacagcaacaacaattcccctttattgatagatgtgtacacacctgatttagagacaaaagccacaactacaaatgtctttgccacatatcctccaatgattaactcctctcatatcaaatcacaatcattgcagccacactctgttggtgcaatccaattctcagcagtttcaacgactgcccctgctactttgcacactacaagagcaactttcaaaggtcaagagaatattcatcccaatcgtacttttaagagacaatatgacatgaattcaatgagacaaactcttaaaaggtgtcgagccaaccaa

SEQ ID NO: 311804 - DNA, 1807 bp, Cannabis indica
aaagtaattgaagatgagaagaaaagatggagatcgaagccaaggcacactctgcaattctcctcagctttggagatgaagttctcataaaagttgcagatgaagaaaaagctcttggcctatgggacaaacttgggacaatttacttgaagaaattccttgcaaataaattatatctgaagaagagattatacaccttgaagatggaagacagcaaagaactcagaagacacttagatgatttcaacaagactgttcttgatctgaacaatataggtgtggaagtggaagaggaaaatcaggctatcatcctactaagttcctttcctaaagtgtataaacactttgttgatacaatactttatggtaaggacacccttaccatgtcagaagttaaggcagccttgaactcaaaggagatgcataagagatcagatgaaaagccagaaattggaggagagggactgtttgtcaaaggcagacatgaaaagaagggtttcaagggatcaaagcactccaatgagaaagggaactagaagacaaagtccaattctagaaacaacactgacaagaagtgcttctcttgcaaaaaggaaggccatttcagagatgaatgcattgctttgaaaaacaagttgaagagggaaaaagagaaggaaagaggtcaagctgatgtggctgcagatggctatgattctgcagatgtcttggttgtgtccaatgcagactctggccaagaatggactcttgactcaggatgctctttccacatgtgccctacagaagaattgttcagcaatcttgagaagaaaactggtggaactattttactaggagacaacaaggcttgtactatacaagggattggctgtgtgatgctatagatggatgatggatcataaaagaccattacagaagtaaggtatgtcccttaccttaaaataaatctcttgtcaattggtacattagcatctaaagggtgttcaattaaaattgataaaaaatatgcttagaattactaagagcactaaaaatgtaatggaaggaagatataaaaatagccaatatttctaaatgggaaaatagttactggtttagtgtcaaatgtctcaaatgcagatgatggtgatttaaccaagctatggcatttgaggctaggtcaggtgagtgaaagggggattactaaactcaagaagcaaggaatcttgaaaggaaaattaacaggcaagcttggattttgtgaagaatgtgtctatggcaagagttgcaggcaaaaattcaccactggtaggcacaacaccaaggaacaacttgcctatgttcactcagatttgtgggggccatctaggatcccaacccttggtggtgctcactattttttgagtatcactgatgacttttcaagaaaagtttgggtgtacctactgaagtcaaaggatgaagctttcaacacctttgtcaagtggaaaaagctacttgaaaaccagactggtaagaagattaaaaagctgagaacagataatggattggaattttgctccaaccaattcaaggcattttgtgacaaggaagggatcccaaagcacttgatagttagggacacaccacagcaaaatggacttgctgaaaggatgagcagaaccctcttggaaagggtcaggtgtatgctcaaaggcgctggtctagaaaggaagttttggggagaagctttgcagacagcctactacatgattaataggtgcccatcaacagcaataagttgcttggcaccacaagaaaaatggacaagtgaggcttagaactatga

SEQ ID NO: 311805 - DNA, 886 bp, Cannabis indica
tagcataaatatcatttttctaacttataatttataaacaattaaatatttaaacaaaataacaaattttcgaatttgaaaatattatggttagaatatctataaaagatctagattaatttcaaatttattaattatttaatatatcatataagataattttaatacaatatttgaaattaaaaggataaagttatctttaaatttaaaatatgcccaatattaaaatatctaatcttattattaaataatatataaataataaagaaattaaaaaaaaattaaatctgaccataatttaaaagataaaataataaatttttaaatttaaacctcaaaatatcaaaaattaatataatctattaaatattaaatattattaatttaaaattgatatttaagtttaaatattttaaaaataatattttattttaattttagggtttgaaaattgcaaaaattcgaaatttggggaaaaatcctacaaaaatcaaaaattggtgttggctgcctaggagggctgcacgtgcagcccaagaaggctacacacaaccacaaacgcgcgcgaagggaaggatctgcatgatccttggttgagaaacctcggtaggtgcagggtgaccctcggcgtgcacgcagcatctcgtgtctgaagacacgagcgtgacactccttcaggcaaggagatgtccaagaatttgcccgcgggaggtcttcttgtgcgagggtctagtgcgcatgagtaccaccctcgacacctaatggaccctgattttcaagtttccatatctcctttatttttcatcggaatcgagttttgtaaaaatgaatattgcttaatttttcacaaggaatccaaataaaatattttcagattgaaaataaa

SEQ ID NO: 311806 - DNA, 845 bp, Cannabis indica
taaaccttcacaaattgtcaaccaacctcgtgtcgacattggtggccaagacttaaggaccttttacactttggtacgtacgtgtatatacaattaactaattaatatatatatatatatatatatttatatatgtgtgtgattaactcatcaaaactgaataattattaatacaggttatggttgaccctgatgctcctagcccaagtgaccccaatctaaaggagtatttgcattggtaattaattaatactatttttgcattgctaatatactatatatactcttaccaaaaatatataacatatatatttcatcatctcatgaccatcaatagtatgtgcatgtaaatatatattaatttgtatatgtatttaactttagttattagtaaagtagttaaaaaagtacgtatattaatgacatattttataatattattacttcgatttgtgcatatatgcacatcttgtacgcactacatatgatatacgacgtatataatggcattttttatttttttgctaaataattagtaatttattatcaatattaatataattaattaccctcaaatttgttttcttcttattctttttaattaagccacgatcgaaattcaattgccaatttaaaacaaacaaaaaagctattgttaaatgttttcgtacatgtatacgaatgggtgcacttttaatgggtattacccattcatggatagtattatgaaaatttaagtttttatgcttagtttttctatctaattaaaaaaatctttcatttttacattatatgagttgagattatttcatcagttgaaaaaaaaaaattaagaaaaaagtttt

SEQ ID NO: 311807 - DNA, 3084 bp, Cannabis indica
tcatccttgactaacatcaaacaataatttggagaatccttgaaagcattcttgagtcactttagcacgacaatgatgaaggtcaaaaacttgaatgattgtattcaattaacagcactccaggctgggacaactattgacttgtctaatgtaggaggcgagttgtgggatgattagcaagggcacccagtcacatcaataaatgaatttaatgatagggctctcatctatgttagaaaggaggaagctcgatctaaattaaaagtattaaaagatgactcggggaataaacccagcttaagcaatgcagacacgaacgttgcaaacacaagaaaaagtcacaaaccacatgggaaaaggaaagatgagttgaaggactcatccaaagacaaaaagaaatagaaaaagtatgagaagtatgtccccgtttataccgtacacaccaagctgaacgaaatacaagaaaatatattcctcacgaataagaatagggtcacatttcgtaaacctgaacctatgaggaatgcgaggaatacacaggatcagaacaaatattgtcactttcacaaggatattggtcacaccactaaggagtgttgatagcttaaagacaagatcgaaagtcttagttcttgaggtttttttttacaatacatgaagaataaggggaatgagcagaaacaatcacataactaaaatcaaaaccaaaatgtccagcaaccacctgtacagggcaaggacatcttggtgatttctgggggacctcaactcgcgagaacgagtaacactgcacaaaagagatacataaaccaagtgaaaaaccaatctttagattttgcacctgaaatgacaaaacaagctaagactaaagaaccccccaataacttttactgatgacgatgtgatgcacgtaaggttttctcatgcagatttacttgtgatagccatttagctcgcaaataagagaataaagcgagttttggttgataatgggagtaaattgatcattctatataaaaggacctcaaagaaaatggggttagatggagtaactctaaaaccatgcatggctaatctatgtaggttcacgggtgatatcatcgcaagtttgggtacagttgagctccccctcacaatgggagactcgcctctattagtgactctaatgcaagaattcttggtggttgaccttccctcgatatataacttgattatgggtcacccagcactaattaaattaggggaaattacctcgataaaacatttttcattaaaattcccaactcaaaacgaagtaggaactgtaaaagatgaccagttgttagcacgagaatgctacaacattgagttaagggaaagagccaagtcttgtcaaatgatggttgtgataactgaagaaattgagaatggagaggagtatctagacctaaggatgggtgaagagaaatcccagctcgggctgatagaggagttggaagaggtattactcgaccccaatgtccatataaagttgtaagaattgtaaaggtttaagggaagagttgaagtagcaattaatacattttttaatggcaaaccaggatcaattttcttggagcaattcagacatggttgggattgactcggatgtcataagccatcaccttattattgaccctcaccatcatccaaagtagtagaagagacaacttctcgatctagagagggagaatgcactgaaagaagaggttgacaagtttttaaccaatgacttcatacgagaagcatttacccactgtaagtgccaaagccaaaagggacctagagaacttgcattgatttctcctacctaaacaaagcatatccaaatgattaattcccattaccaagaattaatcagctcattgatgccactgcagggcatgaactcatgtcttttaggacgcttattctggatataaccagataaaaatgaatgtcactgataaggagcataaaagcctcattacaaaaatgggattatatggttacaaggttatgccctttggtttaaagaatgcaagagccacatatcaatgcctcataaatagcatgtttgagcatcagataggttaaaacatagaggtatacatggatgatatgttagtcaagtccatcaagagcactgatcacgtgagtaacctcgtaggttatttctcaatcttaaggaggtacaatatgaagctaaacttgaagaaaggctcttttggggtttcttctgacttcttatattgtgccaggtgtccattctataggacagacctacaaattcataagttagcctggtcaggcaacgttccagttgtaatcttactactgcatatgtagaagtttaggcaatatagtattctactaacatattaataacatgttttctatcatgcttttataatcacaaaaattactaaataagtaaacacttacgtatcaatgccttataaatatcatgtttgagtgtcagataggtcaaaacatggcagtatacgtggacaatatgttagtcaagtcaattaagagtgttgatcacgtgagtgacctcgtagaatgtttctcaatcttaaggagatagaatatgaagttgaacttgaagaaatgctcttttagggtttcttcttacttcttatattgtgctaggtgtcaattctataggacagacctacaacttcacaagtcaacctggttaggaaacggtctagttgtaatcttactaacatattactaacatgcttcctattatgcttttataatcacaaaaattactaaacaagtaaaggcttactgaaccgtgagttgagcttctttttgacgatgattgtgttggaaatattttaccaggatctagatttactaacaagtatgtttttttaacatcctaatatgaatttctaaaaccatgaaaataaacacatataaagtttgagaaaccttacagtgggtgcagcagaattaaatgactccttccgctcaaatctctaacccttgtatcctttctgtagcagagtatcaccaagatctgagcccaattttccttcttgttgattggattcttcacagtcttacatacta

SEQ ID NO: 311808 - DNA, 1717 bp, Cannabis indica
gacaaaagtccttaaatttaacaatctcaatagttcagtgagaatttttaacgaggagaaaaatttaagagacataatttagtacatgttaaagtttaggggtaaaaatcctaattagtcatttgattttattgaaaagggaaaaaattatttgtcaataaaatgcatttaaaaaatattatgtcaataaaattatttataagcatattttttttagtagaagaaactaacattaattataaaaatctatcattaattttgttaaagtgtgggtcacactattaacactttttttttttggaaacacactattaataatttaaagacaatatattttaaaaaatattaataaaataattataataagcaagaatacctttcataatatacttaagttaagtaagactgaacaaataatggcattgataacataaagaaatttagaatctaacaactttttttaagccaagatgacacgtaagtaagttccagaagtaaatacccaaagcctcaacaacattataacgatacccatggtaggtacccataagagtagacatccaaataaaagagaagttttcatttataagcttattttaatagaattacatttgacaaaaagggaattcaagttaaaatttccttttcctaactttttgacaatatgtgcaatgtaatgcattaattgagtgatccatttttattcatgctctttagagctgatgattgatgattgataagtgaacttgattttcgatggaaaatgatagcgtgtcaataaaaaagttctagtaaagctaatctcgtttgacgtgaacttgtgagaagaaacaactgagacagggtctagtctcatactacgccttgtataatcaaaagaataagcaggactgaaaaaaattcatactggtcgtgcatgtactgattatatgtgttgaccaagcaagtctctcctgcgactagtaaagatcgtttcttcacatatatttagtccgattgactaatgtgttcgacaacttgttgggaactcacatgtttcacgttgtcgacacatagaatgtctaactatgcgatcaaagatgaacacagaaatttagataataggcccaaaggtcatctcttgcgagtaagcgggcaactcgcggcttatcaagtcgcatacgttgttgcacttaattcaagaacgaatgaaaatgttcttcatttattccttaaacatttactttgagtaaatactgttatttattgtaaaaacgattctaaactaatcagatgtgtaagtctaaaaggtacttattttttatataaatgagtgatctaaattaaataaattaagtcgaaattattgcaaaagtagaccaagttctgactgaaccactataatcctcttattttctctttatattcttgctttcgttttgtctatttgatatactataattcgagtattcgccactctatgtgaatactcgcatatctgcaattgagtgttccaattttctttaaatattcaagtaaatttagtattttttaaatttcttcgacaacataattttttttttttgaaataaattgctctttattaatttaaagaggaaattacacttagtatgggattttaaaagttcttatgataaatatggcacatttaagtttggccaatttatatggtatttttttatttttaggtttttgtatggtatttgatatgccatat

SEQ ID NO: 311809 - DNA, 1319 bp, Cannabis indica
aacatttttactttttaaaaaataaaacactttgcacaaattgaaccgaaactccagtttttagaaagttcaaaacctcaatacgacttacttgtgaacaaagactaatattaatgcctaaactacgtaaatatacttttctgatcaaaactatttttcttgctataaatcttctattttttttttatttctaaaaaattttggtaaagatatatttttatatgtccatatatattaaattacaatcttttaaacttatataaaataataattaaaaaatcaaaataaaactaaaaagacctaacttgtaggttacctttcacctaattcatatatgtaaatataaaaataaataaagaaaaatttaggttactttttttttttaaatttaaatacatataatagatattatgtgcaaactatgttttatatcatttataaaataagaatatgtttaaatatttaatttatttttaattataatctttttcttacataaattaagaaataaaataataattaaaaaaattgcaaaagcacgcatgtgcctctctcactagtatatatagaaaattgctaaaaattattagtgtctaacaccctttttatactgttattagtgtaattaaatatttaattttaaataaatagcttttaaaaaatataattaatcaattataaaattactattaaaagatattcaataatgatggtcgtatatataatatatgcatgcacttattgtaagagtttggtggaataattatgttattattattatgaccaaagaaaatatatatagttgtgtagttgtaagagtccatatttatctcatgttgtatttggtttgtaagtgacaaaaagttggtgaggttgagaaaattaaacgaggcaagctggcttcaatggtcgtcctttcaacaaaagctttagactttacttgcttttatattttcaaaaagataattgcacaaagaaaattatttattattcgcaaaaacaaaataattaaaaaaagactttgattaattttacataatttagtcaatcggccataccaactatagttctactcagaggccaaatgcctcttcaatttactccatttatataatatatatcttttgaattttatagtgcaaactttatcaatagtctctaaatttatttagaattttcaatctgatacagttcaataaaaaaatacaagtacatttttaaaaatacaagaacaacagcaccaatattttgtcttattgtgcatttaaattaatagcataaaaatgtcataataatctatttttctaaaaataatatta

SEQ ID NO: 311810 - DNA, 2180 bp, Cannabis indica
gtcaatttttggagcttgaatcacgttcgcgagacctttttcgagtaagttgaaatcctaactcccttgagcaaaatatttggacgtgatatcttcagaataaagattggagtgtgagacatgacttaacatagcgttgaaatagcttcaaaatgcaagttgcatcacgataatcggatcaatattgagtgagttatggccgttttattaaaggctgctctgatgtcggtgcccaggttgataacttagcaccatggttgacatccaaagcctaggttgacatatgacgtcaacctagatgctggtgagggaataaatgtactttggatgtattttttgatgcctaagtgatattttgacatcacttagttaatttctttattttggtgaagttgctgactagttctcagagatgttgctattttttgaaattaggatactcgaaactatccaatttgtgactaagtcacttagccaaaaaagtgaaattatgaagttgtgcatttgacttgtctgagttcatagctcacatttactatgaaaactagacgattactcaagaaaaaatcacaatcaaataagcagagcacaacacactaggtcatacgtcaacttgggcgttgaatgctcttttcaaagcttctaggatgatgtgctgatgcttcaagggtcttagaaattgaggacgaggtctcttactcaatttttgaccatgaccgagagaatgcctagagcaaatttgcattcgagtgacagaaactagtgcacaaggttaattatcaacctgggcgctaatcccaacaccaggtcaacctgggcatttggtttagttcatagcccctcaggattctcgttttctccttaattttacttgtatctttactatttttgatgacaaaaaaaattcctaaaatactcttttgggaaaatgattggaaacaacccaggttggaaaaatgtcaacttgggtgttgggcctaacaccagatgtcaacctgggcgttgggtccactttctggcaaccaaagggcttcatttgattcctagaatcacttctgtcttaatctttgacaaaaacagagaacatgccctgaagacttctcagaaaaactccttacaaatggcccaggttgacaaagtatcaaactgggcattgagcctagcacctaggtcaaccagggcactgggtcccggttttggcctccaagttgattcatttctctctcaaaataattttttcccatttttggatgaatacaaagcaaattcttgggatagttcttcaatttgagggttggtagcgccccaggttgacaatatgtcaacttaggcattggtgcctgggcatttggtgctccaggtgctcaaaattataatttctccaaatatgattctgtttcctcaaatatgttcgtgaaatatctaatttatgtctaagtgaaaattttgggtcatctgcactaagacggtctcaaaaactgaaaccctagccaggttgtcaacttgggcgctaggtaaagccctaggtgtctaggttagcttctgggggtccgttttgactcctttcactttctagacttcaaacttggattctacttgacttcattactcaaaatattaaaggatggtgacttgaaaataacttggcaagatccaaatacccattacagaggcttgaagtgaacttgggggcaaggctagggaccctttcctaagttaattgttatgactcgagtaacttaacttcgtgaatgatttccttcttgccacatgtcaaaaattgatatccacatcatatgggatacttttcttgtaaacattttccattcaggtcaactttacccttgtgtgagcttgacttgatgacgtgaactaagaccattttatacgaaactactaggtgggcatcaattttgacaatcttaggctactgtgttttgattgtcttcttgtgtaattataaaatttagatatagattagcaaccctaattgaatattaatgtaggattatattataatataattaattatgtgatattatttgagtatatttaaatttaagaccccatttatgtattggggtatttcataattttaacctcataatgataaaactatatatatatatatatatatatttatttttttttttttattatttggtgctaatggactacat

SEQ ID NO: 311811 - DNA, 1805 bp, Cannabis indica
cttaatgacttaccagcactcgctctagcaccttaggattaagaaactcggttactagggacaacatcaacatttcattaaactatagaaatactaactgaggtgcgcaaaatttttgaatgccactgcaacccctggctctcgtataccagggtaacacccagctcctgtataccaaggtgtatgtgacatacatggatctcgtgtactatgaattttttgtgaatgctcatgtaacgtgtataactctcgtatactatgtcttatttacccctaagtgattgaaaaaataccttcattggtcagttgccataccaaatctcattgggctttcttgatcatggatctcaggaagttgttacatgtgtgagcactcgtccacttatctaaagattcatgggttggaaatatttaactcactaaataaataaccgtagttacttcaagaacaactctacaagctttgttcaacgcttgagagcatcatcaggtctgtgagttataattgattaataacaatgaagtactaacaagcttttactcaagaatcttatacattaaatattaaattcaattatatcactatgagctaagttgaaagaagaaagaagtaatagttgttaattttcatttttcatcaaaacttaattgaagtgatccccattacacttataaatttgttggcagaaggctatgcgaacccttaaaattgtttgactgatctcttataatttcatttaagggcatccctagctaggttcaacaaaaaatagtttctcaatttaccttatttaacacacttttaattcttagccaatcacaatttatttatttttgtaattaaacatataaaaagttacgggtgcttaatatgaaatattttcttcaccactcccttctctcttctaccatttaatataatatgaccaatcatccaatccaatgacaatcgaccgcccaacattagatatccaattgtgatcggatcaaattagatgttatttttaaatatccaattggatcggatcagatgttggatggattgtccaaaaatctaatacatgcaacatccaatcaaactaattaatattttcatttagtttgaatgagtaattagattttatattgttagatgtaaaatatatatgtatataaaaattaatgttaaaattttactcttttttttttggatgggatgaatccaatctaattcaatacatattggacctaagatattagatggattcaatctaatcaagaaaatattaagtctaaaatattgaataaatccaaattaaaccaataaattatatgaaatacatctaataaatagaactgatctaattcaacatccaatgtatatttaatcgattggatgattggatcggatcaaatagtaaaatctaacctctaatatataattgaatcagatctaaatagacgtaaaaatattgaatgtggtccaataaacactcctaacttataagataaaaattggcctaagatgcatattattattattattattattattattattattattattaaggaacagtacttttgtacgtagttgatacacaagtgggcagtgacacgtatcaaaaggagagcaatgtgcagagattttaattgccaattattgattgcaccatgaccatatgcattttctgcttcttcttggcatcattcgctttaaagctctatcagtaatagagtcgtgcttgactatgaaacacattccaagtcaaaaggatcgcttacaaattataatcatataaatacatacatatattttctttttt

SEQ ID NO: 311812 - DNA, 870 bp, Cannabis indica
cggcgtaaaaaacccgtttaaaaaaataaaaattatttttttggcgttaaaaaaaataaaagaatcgttaaaccaagaattgccgttaaaccaagaattgccgttagataggcacttttaatatataaagatatatacgtggtaaatttttagtggtccatgtaatattatttattaaaatattataaaaattataaaaaataaataaattataaaaaatattttattttattttattcttttcctatattatttgttttctcttctttctttttctttttctttttcttttctttcttcttctccttcctcttcaaaaaaccttatatatctctctctcttcctctcttgataatctctctctttctctctgcttgtgcatcatcggtgccaccgacggaccaggagctccagcccactaaagtcagaccacaaaatcagaattcccaaaccacgaaacccaaaaccccaatttccatcctcccccgagctcacccgagagtttcccacaaccacgagacgagggccatttctagcttcaacagatgtgaaaactcgaggaagaattggatctcccctcccctgagtttttcagctctcgtctctcctcactcaacaacggccaagtttggtcctcctagatcgagcaataagctaagttgaaggaggaggaagaagaggatgtggatttgcatttttactagctacaagaccaatttttttttaatcactgccattgttgatttttttcttgaggtttgattctttgaaacctttaaattcagggggtttagtgtaacgtccccgcttcaagcctccattgggtccttacacccacggaatgaatggctcttatacacgagtacgtca

SEQ ID NO: 311813 - DNA, 582 bp, Cannabis indica
ttggacccttttttggaaatctttgacattggatgctccctactattgtaattcattctaaaaaggagtcctcgtacggatccaagcttaaaggagggcaagttgttttccgtcgtcaaccttcttggtctttgaagcctcttctttgaatctttttataaagttttaaagtttttgcaggtaattgctttatattagtcagggcgctgacttcaaggttagtctttctcgttgcaaaaaactgtctctgtaagctgacttgtagtttgttacagcagtctactgatttgggttccaacttcttgaaccattcttcagcggaaccgcttagcgttagtggaaagcataaacactttgcatcattgctgaccctcatgacagtcatcacttggttgaaacatgacaaatggtcactggggttcgaatctctggtgtatgctaccatctaggctatcttaaagttcttgggaagctttgcatccagtatgtgtcgggcgctgttgggttttatgccctaaataaaactcaattcatataatcagatttacttattaataaagatcagaaataacattttatgtt

SEQ ID NO: 311814 - DNA, 1676 bp, Cannabis indica
tttcactctttctctctcgttcaatttctttctgccttagacattaacatggtatcagagttgtaatctttcatggagaattcttctgcaatcaacaatggtggatcgtctgtaccatcacgttcgtttcaacagatcactttgcctaaaactaatcttgtttctttttctcattctctctctgttcgattggatttgttcaactatctcccttgccgccattaaaggaagtcgcttatagaagtatcttgaaccaaatcaagcaccaccgcagtatctcacagctgaagatcgagctacgaacaaaatcaatcctgaattcgaagattgggaacaacaagacaatatcctcgtttcttggctcctttcatctatgtctgagaaagtgctcactaggatggttggatctgataccgctgctcagatttggatcaacctacgtgaacactatacatcccacaatcgagccaagatcgggcaatacaagaccttgcttcgcaacactaaaatgcagtcctcgttaaatgactatctgctcaaaatcaagaacataatttataccttggcgtcgataggtcatcctacttctgttcaggatcacattgaagctatcttcaatggtcttccatcggagtccaatgtgttcatcacctcagtgaacaccagaactgaagcgtacaatgtagctgagatagaagccttactaatggctcaagaagttcaactcgataaagcagctaaagatcttgatgtttccaaaactgaagctaatctttcccacactaagtcccaaactggccaaggctctttcccttacccaaccaacccaggctttgggttcaattccatggaaagaccccctaccccaccctaccaaaattcaggccaatttcccactagtcccagacctggcaatccaccatctcgcagtcaatttgccaacttcagaggaggactctctcgcggccgtggcattaacaccatttggggacaaaaagcacagtgccatctgtgtcacaaactcggccatacagtgcagcaatgtttttatcgctttgataaaaactttactggtcccgagtcctttcaagctcttcaaggaagtaacagtgccaatattgcagaagttcaggcctattatgcctctcccgaagtggttaatgaccctgattggtatccggattcaggtgctacaaatcaccttacaccaaacgagctaaatctcaataccagcagcagctatcttggtgaacaacaagtgcatatgggcaatggaacaggtttaaacattcttaatattggcacttcttcctttatttctccttatcattcacaacatcttgttttgaacaatcttttacatgtgccttctattactaaaaaccttctaagtgtgtctcaatattttcaagataatggtgtgttttttgaatttcaccccttccattgtattgttaaggatcggacatctatgaggacttacttgttgggaaacttgagaaaggcttgtacaagtttgattctcaacaactcaacctcctcaacacccgacaacagttttatcccagtccttctcccaattccaagtctacaccagattctgcacagtgtcactcaagtagtattagtgatgtaaacaattctttttctttatggcacaaaaaacttggccatcc

SEQ ID NO: 311815 - DNA, 1956 bp, Cannabis indica
cattattctctcatcgactccattttgttctgctccttcttcacttctctcgtcgatgtgggacttcatgaattgttgttgatgatgatgaatattctcaatgttataattatccaatgatgaagaaaaattattattattattattattaggtggcattatgggagcctgaaattgcaacaaaaaataattataatttggtattaataattcatcatagcaaaacaacattttttctattatataatatgtataaatcaagaagagaatgatgactatgactatatatattatattgcatatatatatatatgtataggctatatatatagtatataccgaatagttattttctttctccataagatgttgataagttttatttttcttttttttgtttttgtgtttcacttaaggacaaacttggtgggtctattggggtcactgatcttgaacgtactacctgtaaatttacatggtaaatatataattaacaaacttataataatattaatatatatattatgtatatatatacttaattattaattgatcccacaaaatctatgtaatatggggtttaatattatctatatatatatatgtatacaattacctgaacaaaaattaagaatttgagagaagtgatgaaaatcaagacttgggtaatttttgcatatacatatatatatatacatacatatatatatatgtatttatatagagggagggagccaagtaggggattaaatttagaggtgatgatcacatataattttgaggctgaaattagtcacttttttcacctacctttttatttaagtgtgtcacaagctaacaacgctcttccctacccaccatgacacttaattatatactcttttattttattttattttttgaaatttaaacttttcaagatttatatatataacatattagactgatgaagattcacgtaaaagctcttcttttttgaatttatttattattgaatgtaattaatatctcattttattgtattaaacttttttttcatatgagttcatctcgtgatcatggacaattcaaagttcaaacgcattaaatgttacgtacaaaaatatttgttgaaataataattgattataaggaccttataaataaatacacaagtttttttttttaaaacccaatacagaagaaattaaaggataatgaaataatttgtcgaaagaaaaatgataataatgaaataaacattcaagtgagttgaggtaaaaatgggatgggccgaaattatcaggcccgtatgtaactgggctagcttagcttcagacacttcgactataataaagcccataaagccctaaacacacaatgctcacatggaaattaacattaatattatatgtgcagaaaataagtcttagggtcaaaaatagttataatttatattttattagattctaagtgtgtcatgcatattatttttgaattttaacattttcacgttgtatgctcagtaatagtaacaatcaaaaatttgaccaattatattatttagatacggtttaatatcttaaaattagcaggataaatatataaaaagttagaatgtaaggtattttgttatgactattttcttacccctagttttagagctttctaagctagtaggtggtaactttcaagctcttgtttgtgcctaaagctgatatatggttcccaaaattatttaagctaccgaagggatgagaaagagatctacattacgtgatctcctttttttttaattagtaaaaaaaaattcttgttgtgtaaggggcatatagctatggcctttgagtagtagagaggatagaatcaaaagaagagatggatgggcgatggaaggagccaaaagtgtaaatatgggtttattgtgttggtcttgcttttcatacttctagttaaaacttatcattttatagtcta

SEQ ID NO: 311816 - DNA, 991 bp, Cannabis indica
ccactaaaggacaaactaacaattgggcaaaatgaccattttgccccttcacactaaaataacataaagagcactaaagggatattttgggaaattctaaattcccggccaatcccgacattcccaatgtctaaataaccgtcccaatatactaacatactaagttgtgatcttactgagccaaacaccgagttccatgttaccgggcaccagaaatgcaaaattatgaaaatcactaaatgacataaaatgcatttcagaattcaacaataacaatataaataattatttaaataactataaataattttccataattaaacttaaacataattaactgctaatttccaaattaaactaagcggtctttacaaaactatagacaaataggtaagataatcaccatgctttatttaacctgctataataaaatcgaactgaaaaccaaataatttccacactgttttagcatgtttgcaacagaacatcgcatgcccccactgattcccaagcattagaacagcgactacaagttgttgaatcgataactttttgatggaataaggagacagcaaccggtagttcattttgagacacccttcatgcaaatattttaactttagagggaagtttcaagctccaaagcgatttccaccaagaatcttgggttttagaactagaagaaagaacttgttcttctaaagagcaagtaagatgatagctcgtttgaactaaatactcacctgaggtactgtgatgccaaatccagcgatcattcaaactaaaatgagatagaggaatggtaaggatgtaatgcacatcagttaaagaaaaatcacactgcaatagaggaagattccactcatttgtaggcatgatatagttacactatattgattggacaacctgtgtatcttaagggagtaaaggttgaattacgtggaatccaaggatcggttccactgttgggaatattttaccaggatctaaa

SEQ ID NO: 311817 - DNA, 536 bp, Cannabis indica
ctcttgcaaacataatctggtttttttagagtcttcaaaaccaagaggttataccatatacacatcttcttcgagataaccatttagaaaagtattattgatgtcaagttgtcttatggtccaatttcttgacactgcaatggtcaaaatgattcttactgttgatgctttaatgactggactgaatgtttcactaaaattaatacctagtctttggtgaaaacccttggcaactagtctagccttgagtctctcaattgtcccatcttgtctgagttttattttatagacccatttgtttccaattaggttgaactcgggtgagtaaggcactagcacccatgttttcttcctttctaaggccacaacttctattgacatagcagttgtcgactcctttgagctgagtgcttcctccgaattccatggttcttctgtaagttgattccattttgctttgctaagataaacctttagtttgaagatgcctgtaacaccctaactagcctaggcgtgttacgtgatttttaaacgta

SEQ ID NO: 311818 - DNA, 815 bp, Cannabis indica
tgaaattttgttatgaaagatgactatatataaaatatattaagttgagtttgaacaattaaagtccttggcctagcgttaactttttaagtaagaagtggtgtggtattccacggacatattaatcagagtttactatttttgcctaacatttattttctatttatatatatattaaaagaaatctagatttaaacacttttaataaaattaaaattgattgctattatggaatggtataaaatctcaaaatttaactgagtttgctttttttctttttcttctttgaccgttttagggtttttagtacttgggtaccgccggctagatctggctggtggcgcctagggtctagactccacgttgtagtaggttgaaggcagagggtcctccgtttaggtagttgtgagcggtggcgatgaacgtctgtcctctttcttcttgaggtcagctctttgatgcccaagttttcaggtgagtggttgtcgaccaaggtggatggacgtctcttttgaggtgtctcaagtccgaggtcggtggtcatgggtagctccgatctcatggacaagatttatgtttgtttgagtgtttttggatatgagttgtagggttgtgtttgaattgggttggaggtggcgatagttgtggttattttgaatctaaaaaagatgtagtgggaagttgtggtttcggcggtggtgatggtgcgttgttatttcggcaatggtggtgggtagttgtaggtagggatgttcgcggtgtgggtggtgctatttttgactattttttcaaatcaatccgcacatgcagttttt

SEQ ID NO: 311819 - DNA, 1454 bp, Cannabis indica
ttatttttatttttatggaattagattgatttattattttaaattaatttttttatttttaaatattttttaggtgggctaataatataatgtcatccttcaaaaaaaaaaaataatataatgtcatgtgtacattgtgtccatgtagaaaatactatgtgtacacacacatgctcacatgaaagttaattgtcaaaaatatatggaaagggctaagtcctaacatgagtttaaggggttttactaccaaaattttaaaattaaaggttagttgtaatacactaggtacacttacggaagttatgacgcaaattactctatagaaaaagaaaaatataactatttggatgtaaaaaaaaaatgattctattgatacatattttaatggtgcatcctagaatttctaaaatcattttcgtggaaagatttttttttttttttaaatagattaaatcacatcaaaacacaatatttactcaattattataatcatatcataaagttaagacttggtaagctaattcattgtacttcattccgacataatattgattttaaattgaaacgagttcggtttttttagatatataattaacttctgttttctttacttttaaaatttcaactacttgcgcacatttttatttttatttttattcttggtagtacatacatatcactaaaacttaaaataaagatgtcacccgtcattattaaaaataaagatataataataataataataaaaaaaataataataataataataatggagtgttacggtctcaccttttcaaacaataaaatacttgtgtgatgttttgatttttctaagataaggctagtattctaaccatctaaataacaatcagttcatttttttttcacgacagttccttgaacaactccaccatgtcatgctcgcaagcatccatgagtgtatccatgtataagctctctagccaagatacttacattgtctgtaggtttccactatggtagaagaaatccaaacactatcgcccacttagtcaattgtgaccaaggtagcttgtgtggtcaaatgccaacattagggaaatttgattttttatgcttacatattcttaaaatttttcccctaaactcataatatttgatatttgtgggatatgacacattttataatatccctaaaataccccacatttacattactcccctctcttttcttctctctttatttcactacactgtcgactatcgggcccaccattgggcccactatcaggcccattgggcccatcggacccatcgggccatatcaaattctatttttttacacatgcaatcagacccaccatcgggccatatcaaattctatttttttacacatgcatcgggccccatcgggcccactatcgggcctttgtcttcctcaatttttttgtgttactatcggaccggcatcgggc

SEQ ID NO: 311820 - DNA, 1403 bp, Cannabis indica
gaaagcaatgtgggcaaaaacttctcctaggaagtagttttagtacatttcttttcctgggcagggatctgactgaattgatatttcagaaaaattcttaataagtcattatcctactatatttctaacaaaccatgttcggaagttgttctaaccttataatcatgaaattgacatttccatttcgtgaaaaatatagcagcatgctaacatacatgtatgcatatgcacacagcacactctataaacttcaatatttttgtattcaagaaaaacattaaagaattttcttttaataaaataaatctaaatcaagaaaggtagagctaagtaatcacacatttaaagcattacatgtttttacaataataccaaggatccaaaactctgaccatgctttctcaagttcttccagcacagattgggcaacctcacccttttgttcaaatagctcatcaaaggtcatcctagggacaatagctcgaaccactagaaccagaagtcaaaaccaaagacattaatgtaccaatttctttatttttttttttagaaaaaaagaacaattctcatttattacaaaagaagataccatccaacacaaaagcttgaatctgttctttagggttctgcaactcgtaataagcatcattggcattttttttaacgactcggtattaaattgatcattgtaattgaacaaaaatgttatcctgaaaaataaagatgatcaattattccctttgttaattcataaatctttatcttaaaaggcaaacaaacctagttttggtttcgatgcggacatcaagggagtagattcttgtagatagaacggcggcgaggcattctccggcaaaagggttaaagaagaggaaacttggctcggccaacctctcaaaacgaccccatctctccacgaagcctctagtcagagttgtggtggctgagatgctctcgctctcctcttcttcttcttctttgattgagatatcttcttcttcttcctcgtggtaaaacggcggcgtgtctgttaatttaacaatgggtaagggtttggtttcgaagaggacggaggagtcgcctctgaattctccagagaaatacgaagagctcagtgtgagggtgagaaaattcatgcgacagtaggcacctaattaggttttgaggattttactttttgttgcgtctgttactatctctcattattgtattttgcgacgtttttaaaacctcgctaatacaatactgagtgttaataacagacgcaaaatggaaagtaattttttaaatttttgctttattcccgtcggtttatgttttagcgtcattttataaaagtcgcaaataacagactattagtgtcatttttaaagagacgggccaattatttgagtactatttac

SEQ ID NO: 311821 - DNA, 1101 bp, Cannabis indica
cctctcacacactctctctctcttctccatacaaatggctaaaccccttcaacccttttctctctcccaatgtcctcctcttcctccgccaccgccgctgtttctgcaaattccacttcatccaactacttcaccaatctcggcctcggctatcccatcgccatagccctcggcttccttgtcctactctccattcttcttctcgcttcctacatctgctgtcgcagcgcttcatcccattcccatcaccatcgtaactcttcatcttcttctcttcctcgaaacccaaaccctaattccgacggcgtgattttacccagaatcatcttcgttgccgaggatgacgacgaagacgaagacggccgccgtgacctcgacgaaagctccgtcatcggactcgatcagtgcgttatcaattcgtaccctaaatttccttacgaaagggacgttgcgagcatcaaggagtccacgtgttcgatctgtctttgcgaatacaaggactccgagatgctccgaatgatgcccgagtgtcgccactacttccacctgtgctgcctcgacgcgtggctcaagctcaacggctcttgtcctgtctgtcgcaactcgccgttaccaacgccgttatctactcctttgcaggaggttgtccctctttcacagttcgctgctgaccgtcgacggagtaggtgatgatgattgtgccgttttgtgggttttctctactcttttttttttctctggttggattatttgggtctaactcggcggttgtttcactcgtttggtacgggaactgtatatctttttctttgttgggtttggtttgagattgaaatctggatatggctttgaaacaaatgagtgttattagttttattacatgaaatccaagttattaattttgctttcactgttacatatatgctttgtttattaagcagtttcttttatataatttactactttcactaaacttaacggtatctttttcaatatttaaattcatttttctttctttctggggttttcttcttcttggcctttactgcttgtgttcaacttattatattttaaaatatatatttatataatatttgttcg

SEQ ID NO: 311822 - DNA, 1392 bp, Cannabis indica
tttactaaagatatgaatacaatctaaaattatgaaagagatacatgacctaacttctataagtgtatttattgatatacaccttattgacagctcatacatagtctgaacaagaccacaacttacttgaaacctttcctaaaataattctttaattaacttagaaatttattgttttgtacctacaaaatggtgagcaataagtgcaactttccttttatagaaaaaaagtcttgcttcggttttcttcacaagaaattttatcaaacattttaaaaaactcacaaaggatcagatatacacaactagatagataggtattggttgaaccatcaaacttaccctttatggcttgcttttcataaatagaaaagctaatcacattccataccttatataagtcaatcactataaaaacacaattaagaaaacaacctaaacaactcagctaaaaataaataattaaattataaaatatttttgtcaattgaaagatgcaaaaaatagaattaaaaatttctccatttcggcactttgattgacaaaatattttataaaaaaaaacctacatcaagtattagaaacaaaaataataaagtataaaaaatactcatcttgcatgaaagcatactaacacattaaacaagataatttttgtaaacagaaaagttcactaatcataaacaaaataactccccctaaaacaaaggtctagagttgtaatcaataaataaaaaaaatactactccctctttttgtctatcaagaagccaaggataacaagcaaaataaacaaagtcataaaaactttaacaaaacatagataatgagcgaaagagaaaaagaaccacttaaacatcaccataggattgaaagaatttaatgatattattcatccttttgagaagcaaagcttgacttgtctccatttttcccaaatgcaagttgaattctgccatttctgtggtgtagaagtggaagctgaactaacaacatgttcatttagagtaccaggagaagcagatcgagcccttttccttataggttcagcaacaataacatcagtattaatatttttgataaaaggtgttttatcaatatttccccttctatagtcatgagaaagaaaaaattcagttagacgctcataccaagcaagtggtacttatttcaatcaatacaatgttaaaaaaattaataataaacccaagatcaatttgtatacaacatagaacacaataataatatataataattaggtatgcgtacctgattgatccatagcaattaccacaatttgatagtgtaaaactatcaaataagtcttccttcctagatctctaaatcaaaagcaatttatttatttgattatcaagagtctacaattgtgat

SEQ ID NO: 311823 - DNA, 2494 bp, Cannabis indica
ttttttttttgaacaatgaacatctgtcaaaaataatcacagtttaatacatcaagtattgttctcagcaagtattgttgtaggtactattcatagccccaaaagagtgtgggttgcatagtagcatgagttatgtttcacttaaaaccaagcctagttgtagggtgtgatcatatcagcactaccaaattctatcaaaactccacagttaagcatgtttgggtgagagtaatactaggatgggtgatccgtgttgcacccctaaattttttgtttgtgataataacttttctacccaatagaggtagctcaaatggtcggacatgtgatttgctcccgcaaagtctgtgattcaagtcttttctaggccaccaaatattacaaggttaggtgaaatactagtttttgaaaaactaagcttacttgttaccattcagaaaccataactttgacatatcaaaccgttgaaggttgaccatttctgaataatattgacgattcacttactgatataagctaaaaatacataccccttctaatttttatttatttacatgaatgcagacatactactatatatattcaattagattcctaatacgtactcttatacacgaagagtatgtgtcttgctaatctactctcttattttatttaaatcagagacgtactggtgatcctcttcgtgtatacatggaacttgaggctggcaggaaacggtccggtgctgaggatttatttattagttatcatgccaaagatgatgtgcagtcgacttatgctggtggactctttcacaatggtcgaaattatcatgtctcttctcacaaggataatgtaagcacttggctcttcttcctgcatgtttgttgtttgttgcattgtcatatactgttttcccttgatatttgattctgcaaagcttggcaagagataatgtagcacttgtaactcaaatcaatgatgttattactgaaggatacacttgtttactggtcgtcatcacgttgtcttcctcaaagaaacaagctggccaagaaacttctcagcttactgcctcaccattcatttggtaagtgcttgaacaatgttggtggtctagacaaggccctgtcattttaccccgagtgcaccaatgatgctaatgtcaccccgaagtggtgggatcacttacattgcgccatgtcccattacaaatttgttcttgcaatcgagaatactgtgacagaaagttatgttacggagaaactattctatgctttagactcaggttcagttcccatctattttggggcctcaaatgtcttggactttgtccctccaaattctatcatcgatgggagtacattcagctccttggaggaattggctgcttatgtgagaaacgttgccaatgatcctatagcctatgcagaataccatgcctggagaagatgtggggttttgggtaactatggaaagactcgtgctgtgagccttgacaccttaccgtgccggttatgcaatgctgtaagcagaaaaggtgggagaaatgcaggagccatttagtatttttgttgtttttgtatggggttattgatttgtgatgatatttacagtggtcgtagagtataggttaggaaacggtaattacgataggaatacaaaattatagagtccacttaaccctctttcccttggtctgtctactaacattgtatattaccaagtgttatgggtttagacacttgtatttttcaactgaatgtactcccttcacaatgggaggaagtgtttttttttttgagtaatgattagaattactcatgaatttatgatacagaaatttgcaattatcgcaggactcttctcgaactaggataacttatcgtctaactgaaaaatatgttttgtcaaatcatgggctgttaaaatcttaacgcaaaccacatgagataaaattaagcctgaaaatttaaacaataaagctatgtcttcaaacagcactctcaattcctaacacattgaaaaacaccttttcattattaataactctcgctaaagctagcgaaattaaaactaaaagcattgcaacactaaagcaaaaaacaaaggtatattaaaatgacaatcttcaatataaaaattaatatacaaacttagaatttaaagcacaatccattttacaatttttttttttgaacaattcattttactagttaaacattactaaaaattaaaaaaaatctaagtataactagctaaaaatattatcctttggttagtaataacttactagcaccccactaatttaaaactactgaaaattaatatctaacaaattatgtataaaaaattaaatttattggcaaattttctataatcataattggggggaagtaatttttgtcgaagggtaaattggtatcacgcttttcatcgaagtacataatgtgtaaatgtaatatgagctatatgtggaataaaaaaaatttcaagttcggcgaccctgaag

SEQ ID NO: 311824 - DNA, 1823 bp, Cannabis indica
agttctaactgcaattcacctaaacaatatgattccaccttctatcatttcaggtttttctccttttgagaaactatatggttgtattcttgactattcttctttaagagtctttggttctacttgttttgtgtttcatcccagtgtaaagcatacaaagttgtcatcatgctctgctctttgtgtgtttcttggttatggggaaggggaaaagggttattattgttttaatcaaatttttcaaaaattgtatgtatctcgtcagtcgtcatgttgtttttcatgagcatatacctttcttcactattcctggcactcataatttgataaaatcagatcttattcacattgacccattgtctgagtctgagtctgaatcatccactactcctatagttccttttcctcttcattactctcgcatgcaccgtgttgaaaggtctcaagaattagatactagtactttgcaaccaaaaatcgctcctccattagatactggtactttacaatctaaaatcgctcattcccctcttcctacaactgttctagatcctcctgagattgtggaccctcctcatcgttatcctcagcgtgtttgtaagtccactcgccaactaaattttacgtactcttattattctgcttcttttactttgtttttagtatctattctttgtatttttgagcctttgtcctataaagaggcagttattgaccccatttggcagcgtgctatggatgaggagctctttactttgcaaaagactcatacttgggatttggtacttttgcctcctggtaaacatgctatcggttctcgttgggtgtataaaatcaagaccaaatcttatgggtctattgaatggtacaaagcttgattagtggctaaggttttttacagcagtatggtatggacattgaggagacttttgctcctgttgcaaaaatgaatattgttcgtactcttatagcagtggcatcagttcatgatcaatggactatatctcaaatggatgttaagaatgcctttctaaatggtgactgttacgaaaattataaacagtacgcaagtgcacataatcaagtagtaaactcacacgagtgaggtcgaaccacagggaattggattgaataccactagactagatttatgattctatttggcaaaccaatagtttttgagattataaacagaataaaaattcaagaaacttaagtagataattaaagattaatcaagatgagaaaatagggaagagaatcttgttgttttgtttacccaattgttaatgcctaattgatatccttttcttgatgtaaatgacagattaaacaatttaacctaactcttttcaaatcttttaggttctaaaccacatgttctctaattaatctcttaattagaatcacatgtaatcagcattaagcaataatctaagtgtcacataggttatgcaaatactctcgtttcacatagaacctcgattatccaattttagcattctcaattctcactttttagattttgaattgagatcatagaacatgtagaaggtgatcaagcttacacatggaattaaacacaaatatagataatttcacaaatcaagattgaaggaatggcaattaacattaactaggcaaaactttaaacaacattcatcatcctccctaaatgggaatttagttcatagaaataaaataaacatccatgattaaatctgaaacaaaaatagacataaagaaaataaagagtgaaagaaagaaactagatggtgatttcgctccgggtcttcaaaaagcttcctctcctccttcattca

SEQ ID NO: 311825 - DNA, 2674 bp, Cannabis indica
gcataaaacccaacagtttggtagttgtatgagagtttcttgaatctgacgtgtatatttttcttgctctgccatttttctttgttgatctaagaccacatgtctttgcctcaccacctcaaggtctttctcgtagtacttttcttcatagtttttgttataactgtcattttcgttctcatcaaggccttccttattatcctcttcgtggggagtatcatcaataggattttcctactaggcaaatgattggccacctctgatgcttcaccaaccctcataatgtctgcctgaagatctaccgctggggtcaatttatatcatcaacaacatcatcctcatagtcttgatgagcatggggtctaaccacagtgtttcgggttgcaaccattattgtagatgacaacaatggagaatactttcctcaactctcaatgaaagtaccaaaaaatttatcgagattatcataaactaagttaataaaagattaagctaagaaaagataattttaaagaaaagaagacaaatattttatatggttggggcgttaatgagccttagtccatgaatcaatattattgaagctctttggctatgaagtattttacacatgtgttcttgccaaatttttgtagagtttctagccaaagttttttaaccctttgcatggaggagtaaagccttatttataggttgaaactaggtttttgggtgaactcagacccattatggttttatatatgaaataagcacactgtcggtgtaaaatacaatataatattgactatgggcctagtaggtgagacccaattgatgaataatcattgtccgtacaacgtagtactatttgatgttgctaggtggccatgtactgccgatcatgtacactaaaagtcagaggagtgggcgttagacaaaaaggcatgttactttttgtgttgtgcgcctttctcaggtctgacacgggagacaaatttgtaattctttggaatcagaggtgtgccacgtcgaaccaaccccaaaaggttgatcttcgcgataccccttggactaccctttcggaatacccacggggtatccatttatgtcttttgggacacttggtaactcggttgagtaagctctctaggtttgttggtccagttttgcccgcagtcaagccttaatccaatccaaatcatccatcttccggcttcattcttaggtcggaccactatctgttttggccttgagaatgggcccgtaaattgatttaggaacactgaatgcacacatgttgcctgtccaaaaatgcgaataacacgtacatataaaataaaatgtcttaaccataataaaaaataaaatagatgaaccaaacttcaaaacatatactcacttttatataaatgttataaattagtatatttccgtcttcaacttttgacactatcccaaacaaaatgagacttttacccttaaattatgatgctagatcatctgaattatattattcgtaacaaattttcctcgaactactaaataattgcaaattttcctaattggttgcatatcgcttagttttttaaataatttattaatgtgatcacaagccacacttatgattacagtacgagagtctattcaactaatttaaaactagttggaaccaagtataatgacgttaaatatttaaatattgaaccacttgaggctagctcaagtggccatagagagtgcgttgtgttggaggtcctgggttcgagtcccagattatgcattaaataaaaaaatatatttaaatattaactctaaaattacggatacagtactattctagattttattgttagagtattatctatgtatttatttttttatgcataaactcttaatttacaatagattatctctggatcagtattcggaaactatttgtaaaattgaacataatgcaattgaatggaaaataaacattttacaaaaaaataataataataattcagggataaaattctattagtataatttaagggtaaaaatcctatttataatgagaagagtaatagaaattaggatattttgatttatttttgtaatgaacattcgaggtggaatctaattgcctataagtttagtccatgttattaaaattctatgcataattgcatatggtttgtccttatagtatgtttttttttttgaaggaagaatatgtagttaattaccataactaagttttactttcttaactatgtaatatgttttcaattttttttaaacagttgttttgatgttaattgtgttttcagcaagagttttgctcctcttcgcttgctatggatgatttgaattgatgaaatcctatttttattaaaataaataaaaaaaaattgtgatttgattttttaattatctttattttcatatttttaagttgctcaaaataatcagcgtcttaaaatgaagtttttgcattagtcaacgttgaccaacgctattgattttggttcaacgtttgtgtccctagaaaattgacgcaattgatgggccaattgtgttagttataaactgacactagatagtacaagtagcagtaataatatttctttaggtaacgtttggttagaaataataaaatggaatagaaaggaaataacttttatttcattcatttgtttggtttcattttaaa

SEQ ID NO: 311826 - DNA, 573 bp, Cannabis indica
tatatatttaatattaatacacccattctaaaaattaagaaacaaaaagactacgttatatttttcgagcattgttattaagtatcagtggtgtctagcactttttcgacatgtcgcgttgcgattggttagcgatactccttaaaaactattatattaaattatatgaacccgatacttagttagaccaatagcgatattgatacataaaagagtgctaagcaccactggtaccctttagtatttctcatattttttaactgcccaattcacacacatatcatcattaaaaacaagagaaaactgatcaaattattctcttgtatatctagtacatgaaatcccgtctctagctggtatacgcagtaataatatatactttttaattaattaaaaaatagctataaatatgtataattcgcctcagtgttactataactaagcctatatttgaactgttttctaggttcatcgatcgagtttatcatcaaaatgtgggatgtagttggtttgtgcatgggaactttgattgttataatgataagtcattggtgttacagatggcagaaccca

SEQ ID NO: 311827 - DNA, 3221 bp, Cannabis indica
tgatgaaaatccgataatcagatataaagaattacctgcagaaagcagagacagttaagcgctcgcacaaagccaagctttgcctagatggtatcacaccaatgttgtacctgtgttaaaaccaaatattattccttaacagttaactatgaagatagatagttggttatatgaacactcaaattcttagatatgatagttgttggtacattattttgtgcctgatcccgaattcggaacacatttttctctgcagattagatctaagaagaccttttacaaagtcttatagctacatcgaaaataacaaccagaagtggaatgtacggaacaagaacaagcactcgaaaaggtctttcaacaaaacttaacatcatcatcgtaactggactgattaaagacacaacgaatctcatgattgttaacaaaagtacaacaaagtcatgtttttcttttttattaaaccttccagccttaaatcacccaattatgttctttcttgacacataaatttgtgtacatatacatagagacatatcaatatccttagaagaaaaagaaaagggaagctatatgtgaactgtaaccaatttactgatttggatacctcaactaaaaaccatgtgcactaacactcaccacaaaagcactacttttaataccaaaattaaagacccaaaaaagaaagaactatagcattgaagaaaacgataaaaagaaaagggactcacatcttctccaagagcatatcagtcatctgaatacgaaaagggtctcttccatccatcttcatcaatacgtttaccaatttatgcaccatccgacacaaacccgaatacctaaacaaaattataaataaacaattgatagagaaatcaaatagaccaaaaagcacaaagaattaaaagagaattaattacttcttataatcgtcacgaccagtaacatggtagcgctgcattacatgagactctctgtgacctccttcgctcttccattccaagaagttgactttcttcagctttttctcgtggaaacttagctttctcatggtttttcactaacttttctgttgctctttgttgttgaaaagaccaaccttcaaacacttcacaaactagtaattgttaatttgcagattctacaacccaagtcaaagaggggttgaggattaagctttatacatatacaattgaagttatattaaattgttgtaatatttggttgtacccatatagcatcaaattaacatataatgtgcaattctatcatttgatttagtgagtcaaacccttgaaagtgtctcagatacaacacaatctggataaatcaatttaaaaattcgaatgaaatggataaatcaattccaagctaattttttccctagaaatagaatctgaagtgtggttttccttatgttcacagaatataatttcataaccaaaaccattaatattgatcagaaatgaaatctaaaagaagtgattaatatggttttaagaagtgatttcaatcttgaagattggacttgcatgttaaatttttttcacctaatgaaataatgaacatatgagatgtggtcaagaagctacaacatacattaaaaaagaacttatttgagcctggagattcaagaatacagacaaaggaccagaccaactacacaatagaacacaatttacttgaattaccttttactttattccaattgcataccaaaagagtagaacatattagaagaattatctcactcacccacactgattataccctatcaatcttgtttgactctgtgactctgtgattaatctccaaattaaaaacatacaaagcacttttgtctttctcttcaattatttgttcagacttatcatactttctcagaagccatttgatcaatcacaatcacaaaactagaagggattccaaggcctcaaacccaaataatcttcaaaactcaaaacaataaatacacacaaaaaaaaaccccaaaaagcaattttgaaccaaattgaacaaacccaagattaaactaaacctcaaattcacaacctgatacccagattacaccacagaaactctggtaaaaagttcaagacaaatcataacaaaagaagaaaaaagaatcaaacttttagcacagtagagtacaactaaccaaagaaataaatgaagaagacgtacccaaatcaatgtgaagcgacaaaacgcggcggaaggcgacgactcacggcggagaaactgtgtgagacaacaaagaggagagagatatgagaagaaaggggcttaggttagggtttaacatctcacaataaattcatccccaaaactacgtcgttttaatgtgcaatatatatatatatattattatttcggacaaatatgcatacacaacaaataaataatgaaaaataattcaaaataattcttttttttttaataaatcatgtcaatttattaatagcatacaatctaatcgagatatctcccctgttaatcaagtttagaattaaaaaatgagtcaaataatcaacaacccaatttctaaattgtttgacaagaaactataaataaaataaaataagagactacaacatcacagtattggagaatattgtcccacatgaattaaatatgaaagtattgagccatatataagaacatgagccactccactcatagccaattgattttgagttggaaccccatgattctcaacaacagttagctttaagaatatatgtattcagtttcatctatactactaacaaccctttcaatcgcagagaacttattatctataaccactaacaacgatttgatgacgaatcatcgaagaatcaacaacgaaactaaacaaaataaaatcatgtcatacacacaagactaaaacactcaaagccatttcacaaagacaagactaaaacacttaaaaaactttgtcacagagacaagactaatcacagttgcaaaaatcaaatcacaatagcaaaatcaggctgcacctatgcctagtaaaggtcgacgggcctacacagagaaagtagacaacctcctatagctataaatcttataacgagaaaccctaatttgatttttttaattcaaaataactctatagttccattattttcatatgatattatacttgtaaatatttttgtaaatatttaagagtaaatttgaaatattttaagtacaaaaagtaaaataaaaataat

SEQ ID NO: 311828 - DNA, 1763 bp, Cannabis indica
aaaaccctgcttgaaactcaaacttggagaaaggttaagaatttgagaactgacaatgtaatgaaattctgttaagatttgttcacgaatttttgtaggaaagttggcataagaaaacacaaaacaattccccaaaatcctcaacaaaaaggtatggcaaagaggatgaatataaacattttggaaagggtaagatgcatgttaatacagaatttgttggcaagaatcattggagtgtcgcattctttagcatcttcaaagttgactttgtgtagaagatctgtagcatatttagactgagtgaggtagatgcctgaatgatttctgtaggcttcgaatcccagaaaataactgacagaaccgagagatttcagagcaaattttgtgtgtaaatttgttatcagcttggagatggcttgagaattagcacttgtgattagtaaatcatctacataaaccagtactaacaacaaagatcctttctggtttttgtaaaataaagatgaatctgatacagagactttgaacaccccaagttagaagtgtgctttttaatgtgtcaaaccaagcccttggtgcttgtttgagatcatagagggatttgttgagttgacaaacataatcaggtttggttgtatcctcatacccttgtggctactgcatatacactgtttcttttaactccccattgataaaagcattgttgacatctatttgtttgatgtcccaatcataggtaacagctagggagaatataattcttatagtggaagtctttatgacagggctaaaagtattgtgaaaatccaaaccgggtgtttgttgaaatcctcttactaccaatcgagctttgaatttgtcaagatatccatccttattgtatttaaccctgaaaatccatttattagagagcacattcatgtcagcagttctggggactaatatgtatgtttgcttccttttgagagccaagttttcatgatccttaactttcttccaatgaggtaagcttagagcctgcttgacagtttttggtagttcataaatatgattttgtgaggcagtaacaaggaatattttgggtttgtatatgccagactttgatctggtttgcatgggatgaccatgtggtaatggtggaggaatgggagaaatgataggagttggcagaacagtttcctcagtgtgaaccgaggcattatctgagataggtgaagcagatatattgtcatctgcagaagtggtttcaacaggttcatcaacatgagaagtggagacaccaggtggattatgtgaattttcagaaagaagattgagagatccaaactgaatatgagagtagttatctgtaagagatacattaggaatgatgaaggcaagggctattagatttttgtgataggatgactggtgtatgttggtaaacaggtctgaatagagaaattcctgctcattgaagttgacactttgagcaatatagattcttcccgaagagtgaaggcacctatagcctttatgaaaaggactatacccaagaaaaacacatttagaggtcttaaattgaaatttatgttgattgtaaggcctaaggaaaggaaagcatgcacacccgaatgtctttaaaaaactataatctggtttaaggccaaacagactttgaaaaggggaaatgtacttattaacaacagtaggtagcctattattaggtatactgcagaaacacaagcatcccaccaaaaatttaatggcattttggcttgagc

SEQ ID NO: 311829 - DNA, 1612 bp, Cannabis indica
aaaaaaaaataataataataagcatattttagtgtcataattgggagaaaattgtaaaaaaaaaaattatgtccaaatttattcgaaatatatattagtatcgtaactaaatatttttttgaggcaaaaaaaatttttagaaaataaaaaaggttggttgtcatgggtagagtagggttggcaattcgtgacatgatacgataacacaattcaaaaacgatacaaaataaatagatttgggttacacatttaattgttgtgccaaaatcgaatcgaaacgtttaacaagtttattaaacgtgccacttcgggtcaacatatttaatccgaaaataatatgatgaccaacgcgtataaaaatatataaggactttaatcttttatattatgtgaactgaaaaaaaaatctttgaaaagctctataaaaacacttttcaactttttgttatcaaaaaagtaataatgaattaaatctataattttatgagtaatatttgtgttttatataagtatgttagtggtgttaatttcacgtcataatatatttaattgtgttaaacatattgttttgggtttctgccataacacgttcactacacgtattatcgtgtcgtatcgtgtgacttaataaaaacttttgtcgtgtttgtattttggatcttgacacgataataatcgtttcatttgtgtattctccataatgtatcaacacaataatacgaattgagaaacgtaaaaaagaaagcgaaaataaaaataagcaataagaaaattatgggagtaatatttcgaaaaaaaataaaaagcgtaaattttttatttggaattaaggaaaactatttttttttaagactcttctttgttatggcccgaacgaacttcgaataataataaatactcaaacactcctttctaaatcaaatattgttaagactaattaggatttttgtcccctgaactttaacatgtaccaagtcatgccccctgaacttttaaggtcgttaaaaatgccccatgaactattaagattgttggatttaaggactttttttcatttagtaaaaaaaatctaacatagataaaagtttaagggtcataatttagtacatatcaaagttcgaggggcatgatttggtagatatcaaagtccggaaagtataatttagtacataaacaatcactgaaatagtaaaattgaataaaattagataaaaatacttaaatccaacaatctcaatagttcagggaacatttttaacgaccttaaaagttcagagaacatgatttagtacatatcaaaatttagtggacaaaaatcttaattaacctattgttaaatataaatatttatatatattagatatatctttttagggttaaatatatattagataattgtaaatcattatctaatatatattaatttcacaattctagaggataagagtatcaataaaaaaatatacaaattaatttcccccgttttgaaaaaaaaaatgtagtttctacataaaccaatttgggaaaatatagatctgaatattatctttatactgtttcaaacaagaaagggtaaacaaattaagcaatttttaacttttttcgttttttt

SEQ ID NO: 311830 - DNA, 1017 bp, Cannabis indica
ttacagtataagtttagatattgaaaatgaaagatttttaaaagaaaaattggggaaaaaatggtgaagaaatgagggagaattgtgggtttttaatggtagttggcgagggttttggcgtgggtattggctctactatggctgtgctagttattgtgtgtttgaggaagatggttgaagtgaaaaagatgaagtggcaatttatagactctatggtgtcagttattaggaaatagccgaccccataagtgcacggttatttgacacgtgtgcacctatggcgtcagttatttccataataaccgacgccatgggtataataaaataagctaaaaattttcaacctccaaccgacggtataaatattattaatttttataccttcggtttttatcaaaaaactacctttaaatgtcaattttgaactaggtggatattttcacttcctttaacttcccttttataaatttggttgaaaaaatagcctctaaaggcccacattgtagtagtgtacgaactctgagcctctaaatcatcattctcatctgattcatcttcttcagtagaaacattgctgctctttctaatcgaagacgaagaagaagaagaataaggacaacatgcagctttcgcaacggctccaccttcttccatcgtcgaaccagacgactccaaatcgagcctccttactttcaatagcgattgacatgagaaaaaaaaaagaagtaaaaaatattgatcaaatcaaagaaaaaacaaaatgagatctcgtcaaaatttaagaacaacaatcaaaaagagagagagcaaattgttcttatctttgggtctcaccgagagaggggatggagcgagagaaggtggttcatggtcggcctttgggtcttgtcgaaggaggaggtggcagtggttgtgggttgctcaccatttgaacgatatagtcaagaggatgaggtgacggaggaggtgattgcgtcgttcgaatgagagagagagagagagagagagagaagagag

SEQ ID NO: 311831 - DNA, 999 bp, Cannabis indica
acatattggacctaacaaatataaaaattggtatttttataatgtgcggtgcgatttgaaccacatattaacaattcaaaaccgcaaatcgcaccgcaccacgcggttttagaaaaattcaaaccgcgactgcaccgtaaagaatttcaagccgcatttttttttgcggtgcggtgtggtgcgagcggtttgatgaacacccttagtttctgcggtttggactatcactaaatgattaaactatcacaaatacaataaagcttgagcaacactggtcaaaaataccataaggcttaaaaataaatacgaaaaaaaaattacaaaaatacaataattagtgggctttggactgcacattcacatattggatctaaataaatataaaaattaaaattttaataatgtaaggtgcgatttgaaccacatatattaacaattcaaaactataaatcgcaccgcactgcgtggtttggaaaaatgcaagccgtgactgcactgcaaagaatttcaaactgcgttttttttacagtgcagtgcgagcgatttgatgaacgcccctacttaaaagtaaatagcgagtatataagtggcaagaaaaattaattatataaatatactggttcagtgagagttgagtcagcttagtacattttgagagatttccatacaaaatcgaattttattcatgtgtatttttttatagtgtatatttttagtttttttcagacattttttttgttgtacgtttgttgctttaggtagtttagatacatatatttagtttatttttgacatattttattaaaatacaataataagattttttttaattgacacaatgtgcaatagtagataattatatattgatatgttaattatgtattacccattatattatacagtaccccattttaaaattataagattttattacttttactattaatgtaattatttatttaacttttaaaaaataaattatcatttaactgtcactaa

SEQ ID NO: 311832 - DNA, 990 bp, Cannabis indica
aacaaataattagtttaacttatcttatatatgcatctatcgctgcttacaattaactatagaaatttagggaactcagctgatttctatcaattatttagtcatgtctgaaatcaaacactgctttctttgtcctgtcattcttttatttcccacttggaaattttaattcgttttttttaaataaataatacaattttattaatagtaatccgttaaaaataatagcctgcaatgcaagcaggatatctccccgtcggagacatgactaagattagaattagaaaattgagtcaaataatctaccccattcttaaactgtttgagaaataacctaaaaataaaataaagtgaaaaagattgcagcatcacagttaactttaagaacacatatatttagtttcatctaccactcagaagacacgggagtggaaactgttgcaacatgttcatttaactgcgtagcttgagtactcaactattgtgcaaggtaagtaactatactaccagtataataaaatgctacttttagtgacaactttttagtcacaacaataaattttttgttactaaatgtgacttttagtctcaacaaaaagttacttgtgactaaaacatagtatttagttacaagttgtcactaatttagttttagtcacaacaaatttgtaatttttgtgactaatacttttagccacggactttttagtcacaacacagtaataataatttataattagccacaactttttttaatctttgatcacaaagtttgttatgactaaaagtaagatttttttattgtagtgataataaaaatctctccagtcctagagaacttgttgttcccaagcactaacaacgatttgatggcgagccatcgaagaacaaaggagaaccaacaacgaaattgttgggttttgtgccctaaataaaatcaatttcaatataatcagatttattaataaagatcataaataacattttatg

SEQ ID NO: 311833 - DNA, 2749 bp, Cannabis indica
gtctcgtggtcacacccccaacctccatcctcgacccaatcttcaaacaacaaagaaaaagaaaagtggtcaagctagcgggtaccccaaactcccccacctcagggatatcatggcctcggtgtgttaaccccattttgccatgtcctacacacgggttgtataccccgaccctcaatgggggtatctcagggtagtggtcgataaggggggtcgagcttcataccccctcaccatgataatccatcaaattttctcaagtatcccacatctccacaaacacatttgtatcactttcatgagaatcaaaattggaaaaaatggaggaaaaatgaaatttttatgttcttggtgttcttcaaagtccaagaacaccatcaatgcaagaaaattgcaagaggaagtgtagagaacttacccactatgaaaatggagacctcaaaacttccaaggattattataatgctacaatctttgtaaatatttagattatttcttttgtaaataatttatttttcttgtaaaggaaaaattatcgttaggatatgttgtaaaatatgaaaaaagtaatggttagggaaaatattttagggtttttagaatgtaattttggtataggtgtagtattttctgtactgccgcaccaggccatcaacaactaaagcgagacccggattacacaagaaagttcctactgtatggtcataccgctagaaacttgggggcaaatgtttacccaaattttaacgatgatgacatgtcaagagtagcaacacgtggtacgaaaaatatcgagactaaattaatgaaaaatacataaagtcatgaccgttgggatgaccgttaatcatgaagagtggtcaagaccattaatcatgaagggtggtcatgaccgttaatcaagaagggtagtcatgaacgttagaatggaagtcagacggtcacccttacccctagcatgagtaaggtaggcgtctcgaagaaggaaaaatgatggactaataccttcgtaagcataatgaacgatcaccacacacctacgagagtcaaacaagtctaagggtatatactactaaccctacctcaactgccatgatctacatgggatttaggctaagggtacaccccttaacccccaaatggttagtctaggggtacaccacataccccctaaagggttagtctaggggtacaccccttacccccgaatgggttagtcaaggggtatacccctacctcttacaccctcatggtacaagtcattgattttaccatacacataatgacattctcaaaggtatatggggatatctatattacactatattgacaatggacaaggggacccgaggggtcaccccgagatgacgattgtcaccctcctcaagttgggtctcaaaagtcacctcgcgatgacgattgtcaccctcctcaagtttggtctcgagagtgtcaccccaaggtatgggcttaatccccgaaggtggtcaacaaccgggtcacacccttaagagaccctcgtcatcagtgactatttcaaatgttcaaatcccatgaaatgctcgaagacaattataaactcacgaaaatagcaggatatcatcataaaaattagacttcaactgcctccaaaaatcaaggagacggttgaggtagcttcgcgttggtcgcgtttcctgaagagagaagcaccaatcctttcctctatataaggggtcatccatgacctgggaaggggatccgcaattttgagcccttagaaaaaataacaactttttcattctttgcaatctgttgttcatttattgctaaaataatcttgtgatatatttattatataaaaaaggctaatattttttgttaacaaaaatttgtgttaacaaccactattatacacagcaaaataaaaataaatatcatcctagaataataatataccatataacaaaatagaaatctaccgtataacaaaatttatataccaacaccccagaacaactcataaaaaattaagaaaatcgacataactttcaaaaaaaaaaggattttaacaaaattaatatagatataccatgatatttaagtaatttgtttttaattctaaaagaaaattattgatttttttttatgtggcaaaagataaaataaataataaatagtccaaaaagggatatttctttacaagttttgaaataaagacatttactaatataattttatgattttaggccatttactatacttaacataatatatgaacatgtaaaatcacttattcaatcaaatatctatctaagtttgtatatttaataaagtgaaaaactattaatttaaaaatttaattcatatagtataaatacattttaatagttaatatattaaatatataatctatacttctatacatacactaccaaacatgaaaaaattttgggaagatttcatgtcgaacattgatagatatgaaaaaaatttcatcatctccaacaatattatacatgaaaaatgagaggggatgtaatatataatcccacttattaccgtattaacccataatataaatataaatcctaattatttaccattaggcttatcgggatattacaataatttcctccttatagaaatttcgtgctcaaaatttatttaaacaattcagaatattactcctgtatttatgattctaactctcaaattaatgtttctatcttgctgttttgctacaacactttctcaactagtggaattg

SEQ ID NO: 311834 - DNA, 3487 bp, Cannabis indica
taattaacaaattacgattatttactcacttatagcaaaatttaaattttatgctgaaataaattagtaggatcataatcccacttattacctgattaattcataatatcaatataaaccctaattatttaccatttaacttatcgggatattacaatataatagagattatatatgacaaggaccgatatgaataaagttgtctttattaacatgtcgtttatcaaaaagacataatttttgatcaatagtagttcagcataaatcctgaattattatgagatcctgttcatgttattaatttctttgattcactcgttaaaatttctcagagaagatgattctacaacttctattttagaaatctaataatatggatgaatgggaacatgatgtacaattatggaatcttaattttcctaacggattgaatgttgattctctttaagtgttaattctagaatttgaatgttgtgcataaattcagatggtatcttgaattatacttccatcggtgaattaatagacctaaaggataaataagtaattagaagggtaaacagtattttgaccaaaactaattatgaaccaatgcatggagggctaatcactggaattgattatatcaatggacactgtagttaagctcaataaatataattctacaattactaaaagtgcaattccatacttacagtggagtaaccatggaattaataaagaagggattatttgattgatgagacttaataaataatctaatttattagagcttagaattataggtccatggtcctcgaatttccaccttgaaacattgtcaagggtaggggataaagagttgtataaagatgttcgaaaaaatctattttaaattggcaaatagtaattatttatttttgtaataaataaataattttttcaaattaattaaatatggaaaaaaaacaaaaaatgttaagacaaaatttatcgagacaagatttatcaggacaaaatatacaaaccttgtcctaaagacaagggtaggcgcctagtatatgtcttgcccctatggggtttgtctttttggattaattatgtatttaattaattagttcaattaggtaaatatctaatttgaaaagtgattatagatatttcaagattgttgagatattctctcaagtagttaagagattccctcataaattttagtaactgaattcgattataaatatttatttatttaaataattaaataatgatttaattaaaaggatttaactactgtaaataagagcctaatttgagaaatcagaacaattcctttacactaaaaattttgaaatatacagagaaaaaaggaaattggtttttctctctattgttctttgagaactcaacaaaaacaaaagttatacactttatcctagtagcccacacaatttcttgtgtgtggtggatcgatttggaagacactaatgtgagtccaaattataaatttctcatcatctggaataagggatacaacatatgagaagttttaagaggatactctaataagcttcaagtggtatactctaaacttattgttgttattaatgtacacacatctagagatcctaggggctatgggacaattataatcagataatacgaaactcttccactgcatacctgtttagtaccataaaaccaacagctaattcttgtgttaaagctatattattttttggtattttacaacgcatacatttattattctcttcttcaactaaacaatggacaatatcaaaaaacaatataactaatttgacagtgaaattattgtctgaaattcgttaggaaagtcaaattgaaagtgttaaggcaattatatctcaaactccaaacataagagatgctttgattgaacttgcagaaataagtgagaatccaaaaataaagagtgaaactacaagtttagtaaattatgaactagagaatttagaatttttattgggcatgaccatttgttatgatatttaatttcctttaaattcaataagtatacatttacaaagtaaaatcatggacattgacaaggatataaaatatttaaacggcctcctttcttattttgaagattgaagggaaaatagatttgtagttgctatgaattcaactgaaaaaaaaattgcaagtgaggtgggagtagagcctaaattttctgaaaaacgattaattcgtaggaaaaagtaatttgagaaaaatattgatgttgatgtaattaaatatattgaagaatcatttcgaattgattattttctttagttgattggctaaattatttgtccacttaaaaataagtatgaacaatttaaagtgtatgaaaatattttagttttttgtttagcatgaagaaactgaaaaggattggatgatgatagtttaaaagaccactctttaaatgttgagggtgttaatacagtggattatctaatattgatggtttgaatatgctttcagaatttaaagtgttcaagaattttttttaaaataaaattagtaactcaattgaaatacttgattacataaaaaaaaaaaaaaaattgattcttttctaaatgtatatgttacttgcagaatgttactaacaattccaataacagttgtttcaacagagagaaattttttaaaattaaaattgataaaatcatatttaagattaactatgttgcacgaacaactaagtgattatgttgtctatcaaaaataaattgataaataagctttattacgatgacttgattagtaaatttgtatctcaaaaagtaaaaaagatacatttttaggtgattcatctattgttatctcttctattttaatcattgtgtttaaatttatattcttattaagttttacaacttgaagattgttgcaagaaatatgaaaaaaaaaatcatttattagattaatgaatctatatatttgaatattattttttagggtttttaattattattataattatagaataatttataataggaatcttggttttgtgcttatagtatgaggacatttttttaacctttgataggtgtgacttttgagggtatatattatctaatatatacttgtctatatattaaatcaaataattaagaaattagtatttgaaagttcctcacactctaaaacaaaatatttaacacctttattataaatagttaaagagctttcaaataaatattgaactccaccaacattttacctagcaaaaaataatttaattttatatgttaaagtttaaactatatgtatatattgttgtaagaaaaaggcataaactactttatataactattaagttaagaaagtaaaaagaatcaaaattagaaaataataattcaaaaatactaaaattatttatcactaatagatgactttttcttttctcaaaaaaaaagtacatacaaggtattaaatagacatatttatttctaaatgggagatatttctt

SEQ ID NO: 311835 - DNA, 2128 bp, Cannabis indica
taacatagaaaaaaactaacataaaatttagtatacgtgcctcgcacgtaatttttgctagtaaatataaaaaatcataaaatttataattttctcatttttatttaataatgttttaaaatatcatctatttttatataatatatataaagttccaacaaatttatttattatataagacacaatacatccatgtatgtatattaatatgatcacaatttctccaacagcgaaattggaaatttggaatcatgtgtagccgactgattagtatgaatatataattactaactcttaattaattaaggaataattaatccatttttctactcaagtctaaaacactgcatctttgactttgaagtcaacagatatagttgtattattaaacatatatccatgatctataattctatattttattttcatatatacattaatatataatgtaatattatatatgtacgtatagtcttttaattggtcatcatactctgaaattttgtgtagtattatatttatttattcatttttctgaaaaaaaaaaatgtatatatctctcgatctctttggtcttggtcaacatcaagatttattaaaataattataaaccaattagcaaattaattataatgttgactttcctaaccaaattaaaaaggcctctgtaacctattctttgggtgttatatttatttattatagacataattgtggtataagtacttaattttttaagtttgtaattagtataatataaatcaatcattttttagtagtaaaagtatctactatttataaaattgttttgattttgttagtacatattccattttgatgacaaaattaggtaaatattacaagtttacttaaaatttaaggtacttatattattatttactattttattatataaataataaaggttaggaaaattatacaatatatgcatcctttaaaaaacgcaaaaagatgcactgatgtactccctatctatttcagtatttaggagaatgttttagtctatctttttttcatagtagtctatattgtagttatttaagacatctcgtaaaattttgaaaaattcaaaaaaaattaacataccaaaaacatggttcaagtgtattttatacaagtataaaataaaagagtcacgcgtgcgacaaactgtttgaaccatgtttttagcatgttattttttttctttcaaatttctcaaaattttataagatgtcttaaatgattacaatgtatacgactatgaagaaatacatagattataaaattctttcggataccgaaacaaacaagggttcattaatggaacccttttagtttattacagattttatttgaaaaatttggtttaacatacttaaatataaaacataaccttttaatataccacccaattaaaaataaaacacacttatacttttaatatcttttcttcttaaaaatacatttacatttcaaaaaagcacatctctctaactctcccactctaactaagtcttgttgtctccacacagaagccccaaaattcacgagctcaaccaccccaaaattccctaaatccctacccatcgctggagttctcaacttgcttgtgttttgattttttttctttctagttttcatgatgtcgcgaaatatcgttaaatttcactgtatcatgaaacattgctaaatgtttctaattcacaatatcgccaaacacatcactaaatgttacgaaatcacactcaatgtttcacgatgattagcaatatttaatgatgtgctttgtattttttagtctcatatcagaaatatatcgttaatattatcgctaaacatcgctaaatacgcaaaatattgccaaatatctttaatcatcactaaacttcatccctaactttagatttagtttattataatacatcgctaaatatcgttaactattgcaatattgcaaaatattagaatactagaagtaaaaatgcaaaaaaggagagaggacgtaagagaaaacgacgacgggggcttgcaaccagagttttgggtttgtgtgttcaacgacagggattctgggtcgggattcaacgcttgagagtgagagggttagagtgagagagttagagag

SEQ ID NO: 311836 - DNA, 879 bp, Cannabis indica
ataaaatagattacattgaaatggagttttatttagggcataaaacttaacagacgctactttggatcctcatcgtcatataattagtgttggcgcgattgctcgcgattcccttggccaagtcattggtgccttgtctaagccaattattggcaatcttgcatcgcatgaaatgaaggctaaaactttgttccacaacataaattggattttacacatggacgtgccgattacacatattgaaaacggattaacttttagtttctaatgatttgactgctccttatcttgcaatttcctcttgcaaaggtttaattgtaggcataacttgtcttctattttctctccctaatgtgtctatttctcatgttaagcgtaatgccaatatgacggctcatgggttggctagacatgttttagggttggatgaagcttgttttttgttggagaatatctctccaccgatttactctgttagtattttctctcaaaaagaaaaataattaatcttttgtaataaaaatgtatgtatgtattaaatagttttaattaagtcaagtttaaaatatttagagagttataagaaattaattaaattttataagagcattagaagatagggctcaaactagttgtagacgagactgagattcgataactcccacgtattttttttatgaaactttaatttatattatatatgattttaaataaccacacacaaatgcggaatgtctctaataagttaattaattaaaaatgattatttattaagtttaaaataataaaaaataaagactataatattttttttattaagaataagaaatagtaaaataattatttatattattaaaaaaaatataatcaaaattttaa

SEQ ID NO: 311837 - DNA, 2188 bp, Cannabis indica
cgtacgagaagacccattgacttaatagccaacggaagacccttacacttgtcaacaattttttccccaacttgtttgagatccaagtaatcatttgagtccacaacaagtgaagcatgttttgcaaataattgccagccagcagcctcatctattcttcccagttgataagttgacccagttttcataatcgatgcaacatctgtgctccgtgttgtcacaattatcttgcttccatgttttcccgatttgaaacaattgtttagaacgtcccacttggaaggattctcatcccaaacatcatcaacaacaaacagaaacttcttcccagtcaaagccttctttacttcttcttgaaggtcatatggatcctgaatttcacatgttttagaagtgatcttctccacaattagtttcatcacttttgtgcagtcaactttgtcttcccccactgtaatccatactttcgtatcgaacatattgttgactctatcgtccatgtatacaagttgagcaagagtagtctttccaataccacccatccccacaatggggatcacagacaattcaccaccggcaccggttgtttcatccggtagaagaaacttgataatctcttctttttcatgatcccttccataaatatcagactcttctagcgatggagcacataccctctccggaagcttatgattcttcacatgtttcaaaccgagatctttattttctagaagacgtttcaatttcccaagcgtctcttctatctcaagttttatggccttatcaaaagaagttaaaggagttgggatgagtttcaagagccccttcttataccggctgctatgagattcgtgaggaccaccacctttcagcttttttcgcgatgcttcagtgtcgatcttgtaaaccacgtcgtctacatgataaatggtgtccttgaaatcatcaagccacttcctgactctgggttctttgataagcttctcctcagcatcaatgagcagcagatcagccgaggacagcaaagttttcagctccgtcaccagtttgagaatggcatcgtttcctttgaagaagtccttcaccacagaagctaacttttgcaccaacggatcgaggaaagcagagagaagcgctcctccaaccaattcagcagccatcagatcagatcttccaacaaatagtaattgcagaagagagaataactaagagaaattgtagctaacaatgcttgtgcttgagattgagagtagcagtgttgtgttgcagtagtgatatctaattatgaaatgtagaggtggtcaattatgaagacaatattcctgggacctacgttatcacaattatatatggccaaagataatctcacactttaatctttagtattaagttatttatggtctattgaactttgctgcatattgtttatgagtttgactattcattcagctgccataactgactgatgagaagtctttttctaaaatcacaatatgactcagtcaaaaacagttccttccaagcaattattgttttagttacaaagtagcacaaaagaaatttcatcataagaaaaagtgaggttggaattacacatcttatcatcttcatatatatatatggcctacattatcactataatgattaatgtcctgtgataagagataatccataaataaaagtttttttttaaataataaatcaaaaccatgcttaaacattacatggctattttcattacatggtgggctagcatatactaaataaaaagggtagtagagtaattgtctgagggttgggttgtgagtgagaataggttctatatatatagctaagtatagaaaatttcttaattatgcagctagctaatacgagattaaaagaataatccattatctttctattaattaaggaaattaaatacaggaagttaatgtgagatcaatatggcatggcaaagaggaagaaaataatcaaaccgcacagctcaaaacactttacgcggttaaagtatttgaatgtcattttaatgcaatgtcttttgactattttagcgaaataactatttcatttttaaatgaatggaaaagtcattctaatataacatgagaaaaaatttaaggatttttttcattaatttttttttatgtattttaaattttatttcattttattcttattcctattc

SEQ ID NO: 311838 - DNA, 811 bp, Cannabis indica
gtaaataaattgtgtaatatatgctttattttacctaaaaattgtaacctacactttgtaacatagagaggagttacaaaattaattgcttttgtaacttatattagttgatcacattttggtgtaataaaaaagatgttatacaaaattgatgataagattcaaaagttatgaaatatagttgttacaaaatagattaatattcatttatatgagagaaatgaggtggtgtgtgtgaatcctaagtgtgatcacctaaaacactatgtaaaggagtctaatgtgctcatttgtgtgagaatgtgagaactaagtttctataattcttaaaattatttctatgagagttctcttagtgcttagagataggggaaataagcatttaaacaaaggtataatatcttgtttaagtcatgttgatccacgttaatttacacttaaagttgagtgagtgtatatataatggctaaagaatgtaactatgattaaggctgtgcatttaacccagtaggctgaccaacccggccaacccaaactgaaaatgagaagatcagcacgtttaatagtgggccgaaactagaatgggtcataaatattacaatcagtacatattgggtcggaattgagttggcctctttggggccaatcaacccaacccaggtcgtggtgacttaataaaaaaaaacttttatacagatatataaacatattttactctcttccccctaaccctaacagtttcaattgcctccctctttcttttaaaaaaaaaaaaaaaaaaaataactaatcgcctccctcaacttctcac

SEQ ID NO: 311839 - DNA, 1512 bp, Cannabis indica
cagcttccacctgaaataccaagtaggaagacatcaactctgtaacagaaaaaactgtgaaaagatgatatccattaaaaaagagaatgacttaattgccaaaaatttaaataataaaaatctcttttcttggcaggaagaaacaagtatattcatttcaatgaacaaagaagaaaaaattgaaacctcttgccagctactataatgattgtctgcacttaatatgtgactgtatctctgcaaagcttgtttcatgtgcatgacctaaccatccaaaaatattatggacaaacaaaatattaaatgttatgcaactgaataaacatgtttagaaactagtcatgccagaatacaataaagcaaagatcagcaagcattctgtaatataaaaaagaacctcattggtaattggatcacttttaggcaggtggcagctgcacatggtgagaacatccaaggcagcatcaagctcccatctatgcatatacctggaatacatatatgagggatctaattaatattaatatccagaggtacaagctttcaacaaagtttatgatcagaaattaggtcatgcaaaatttttttatgagatcaagatgcaaaactgcaaattgaacctatataaagtgagcagaattcaactaagataaaagtacataattttccacaaatgttaagaaaatttggcaaataatgttgtgtcttccagaattatcaggtaaatcaaacagccatagcattcaccacaagtaagtaaacaagacataatttacttacttgagggcaactctagcagccaactgcttatccttcaaccgcagacaatactgccaactattgctccaaatgccgtggcctccataactttggttttgcccagatattgacttgttctcttccccgcgttcaataagtagctgcagcagttgatctgaggctcccttacgtagaaagcgatcagaaagtgcaagagcatccattagttttccttcatcaatcaatctgaaaggaaggccaattgatcacatccatcagcatgtgaaattccatcatcattgcaatgctaaatacgtatgtcttaaatcatcatacttggacacttcagttagaaattcagaaagaagacgtctttagcaatatactaacacctagaaattacatgcggctaaatatggttattctttcatattgtgtgagtttcggatgtcagactaatgaaaaattagatcctaaagttttccttttatcaaattgctaatgcagatattaacatacctttaagatacaaagcaggttttataacttactagtaccattacaattttttaccagagaatgtatatgcaattagcaatactctttcagattgctaatagcaaaatttatgttaattagactctagctcagattgacaataacccttgtactggaagatatccaaatatctattttacagaagaaactttttgacagcaattttatacatgagtagaaagccaaacaagctaa

SEQ ID NO: 311840 - DNA, 1057 bp, Cannabis indica
tgtaacttttgtaaaacacagattatttaccatttccttttttatatcatcatcatcataacatttcaattttcaggcaggtaaaggtagaacaggcttaatggtatgttcctaccttgtgtacagtggaatgtctgcagaggaggctcttcaattatatgctcataaaagaaccacaaacaatgaaggagtaagcacttagcattaacaaagtataatattaagatacaaggaatcattacataaccaattggatagaaataaagcattggatcgaacttttctttacaggtatcgataccaagccagcgtcgctacgtgagttattggtcaaattcattgtcatttccaaaaggggttggaaatggaccaccagttgtgaacttacctcaaccatgtagcagagaattgcgtcgaattcgtctctacgacacactcaacatggactcagtttactttgtggtgtctgagctgcaacaggtttgtttttctaccaaaaaacaaaacccaattcattagagaattgataacaatttacatccaaattatgttaatgcatgtatttagatagctggtcagctctaccgtccaccagtagaagttgctaggagttgctgcagacaaataagaaaaggttaccaaaggactgaaagtcttaagtatttcctcaatttcattggaagtaatgaagaacaagaagagaagccacaagaaaaagaagaagaagaagaagaagtagaagaccagcaaaagcctcctcaagttgtacaaatggatacagagagtcctgttctataccaaaaggcttgtcttgaatgttatctacaaaaacctgtgcaagtaagtattgcacaccaattaataatgttaaagatcaacacctactctacaagtatctagaactttctatcattttggtaatattatagaattttctagaatcatagagagtaatagtcattagaagtttcaagaatattttagtaacacaattagttagaattatctagaatattatagttggtttctttttgagtagtataaataggggtcatgg

SEQ ID NO: 311841 - DNA, 1695 bp, Cannabis indica
acatatatatatatatatacacagttgtactaattaatgttttgcactaacaacgtttgtccaatccaaaagatgtgttctttgttaccaaaatcccaacatgcccacatgtttctaaacatcaaaaattcagttataaatccctagtataatccaacatatagttacttattattatttaaggaaatatgttaaatttgcaaaaaaggagaagaaaaaaaaaatgtaaatttgcaaaaatgacaatataattttttaagacatataagtatataactaaccgaagtaggagttttattttattttttattacaattatattaatttgttgaacaagtgaccaataaagaaaaatcacatgttaactaattaatttgtcttcaaaataaataactaaactatgaaaaatcaaaatataaattatcacatgctaactaactaataatgtctcttcaaaattttgattttaaaaaaattgtcttcatataataaataactaaattatgaaaaatcacatgttcactaattagtttgtcttcaaaataaataactatattatgtaatataaataaaataaataaaataaactcaccatgttgtctaagcgatcaagttttgagagaataggttcgccagtgagagccacagtagtactcattgccctaatagataccaacttaattttctttctcgggaaacaaacagaaaatcctctctctttttctctttcaactaataattaaaacttttagctactagttagtaaccaatgctgagagagctttttcttgaaagggaaatatatttatagagaaatgaaaataatatttgtataccaatccatttcaatgattaagatcatatcaagattgacacgtgtcagttttgtagagtgaaagcgtgtaaatatgtgacacgtggatgattatgtaacggagagggttatgagttatgatcatgtagtgacacgtcataaggtaacatgcagagagatggggagttgttaccacgtgtgagtcgcacgtgatctggccatgctcgttgtgtcagaagtgatagtagtttagattatctctacatacatattaaggataggataagtttcaatcttctttcttgttttttttgcaagaaatgttaaaaatgagaataaatagtggtataattacacaatatctataaaattataattttttttttcagttttatcagtataaattattcttgaatttattaaaaaaatatttaaaaataacttctatttagatttaataatttagaatcttgactgtgatttgtttaagaaaataacagaatttttactaaggttgtttaaaaaattggttttttgatgaagaaatcactgaaaaatcaaccaaaaacttagtttttaatgtttcttcatcaagaaactagtttctaagaaacatcaaagaacttagttttaggtgatttttctggcgactatgccaattctaacgattttttcgaaattttctatcagtgccgtaaaaattgctggagtagctgccggtgtcagacaagtcgtcggcagcaactccaacgacttttccagtaccgacagttactccagtaatttttttagcaccgcagtaaactctgatgacttttctaacattagtgacaaataaatatacttaaataaataaaaacattaaatatgagatttaaaaa

SEQ ID NO: 311842 - DNA, 3333 bp, Cannabis indica
gcctaaaattatccaagaagactatcagtctcgtcgtccccaggataaaacaacccaatcgaactactatatcagagctctattgcaagatagagaaccgtcaaataccacacccaacaaaacactactactaggaatacgatatgtaatataattgtatgtaatgtatatatattttttgtgagaaaaagatgtgtttcctattcgttcgaatgcattatacaaagaatgcacataaggtaataataggaagaaatatgtttctgatcatgagaacgttaaaacttgaaattgtgggaacgatattgaaaattaggacgagaaaacgtctttaattactaatcaattaaaacatttaaaaactgttttaattaattaaataaaaataataatttaatatataaattttctttaaaaatataatgtgcacaccagccagctcagtcagacgacagcaacggcgcgcctgtgtggtgttcaagtgtctttgtgtgactctttcctctttaacaaaagtgggtacccattagggcccaacctaattgctcatatttacactatatatacacttataaatagggttcccgacaatttgtttatgcttttcatcatccttagcagtatcacaaacaacaagtttatcagtagttagaacataagcaacttctttcatagtgaaaaaaaaaataaccactatatctgagctctattacaggatagagaaccatcaaaataccacatctaacaaaatattactgcttggaatacataatatagtataatcatatataacaatatatatatatatgtatatattttctgtgagaaaaatatgtatttctcttattggttctaataaattatataggaaatgcacaaaaggtagtaaaagatagtaataggaagaaagccatttctagtcatgggaacattagaacgtgagattgtgggaatgatgttgaaaataaagatacaaaagtgtcgttgtttactaattaattaagcacatttaaaaacttttttaattaattaaataaaaataataatttaataaataaattttctctaaaaaataaggtgtgtaccagctacctcagtcaaacaacggtggcaacgcatgtatgtagtgttcaggtgagcctttgtgtgactcctctctcttccacaatagtgggtaccccttgggaccgaacccaattgctcatatttacactatatatacacttataaggaagtgttccttacagtttgcttatgctttcatcatccttaacagtataacaatcaacaggtttattagtggtcagaacataagcaacatttttcatagtgaggaaaaataacattttttgtctccatcttttaaaatagtttccctcaaaatgaaaagttttattaatatcaacaacaccataattctaatcagtagtcatggcagaaacaaatcgtcttaaaattattgaaatagttgctgtagaaaataaagaggaacaaaattaccaaataaaaacctaggttgagtcgcagactaggttgctctctttaagacgttcgcgacactacccagaattgtgcaagtagactatcagcctcgtcattctcaggatgaaacatcccaatcgaaccattatatcggagctctattgcatggtagagaaccgtcaaaatatcccacacaacaaaatactactgctaaaaatacatgatgtaatataattgtatataactgtatatatatatatatttctatgagaaaaagatatatttctcttgttggttccgatacattatatagagaatgcacataaggtagtaacgggaataaagaaatttttatcatgggaacattagaacgtgggattgtggaacaatgctaaaaataaggacaagaaaacatctctatttactaattaattaaacacgtttaaagatagttttaatttattaaataaaaataataatttagtaaataaattttttccaaaaaataaggtgcacaccagccaactcggttagacgggggtggcggtgcgcgtgtgtggtgttcagctgagcatttgtgtgactcatctctcttctacgaaagtggatactccttgaggtacaacccaattccgcttatttacactatatatacacttataaataagtgttcccaatagtttgcttctacttttcatcatccttagcagtgtaacaaataacagttttattagtggttagaacataagcaacttttttcatagtaaggaaaagtaatattttttgtctccatcttttaaaatggttttcctcaaaatgaaaaagtttattaatatcaataacactagaattctcattggtagtcatggcagaaacaaaattactaaatagttgctgcataaaataaagaggaacaaaattactgaataaaaatatgggtttaagtcgcagacaaggtcgctctctttaagacttcgcggcattgtccgaaattgtgcaaccagactattagcctcatcgttcccaggataaaacaacacaatcgaaccattgtatcagagctctattacacgatagagaacgcttgaaatattgcacccaacaaaacactattgttcagaatacataatgcaatacaattgtatgtaattgtatacatatatatatattctgtgagaaaaatatatatttttctcagtggttctaatgcatcatatagggaatatacctaagatagtaacagaaagaaagacgtttctgatcatgggaacgttagaacgtgagattgtaggaatgattttgaaaaataggacgagaaaacatctttacttactaattaagtaaacacatttaaaaactgttttaattaattaaataaaaatattaatttaataaataaattttctccaagaaataaagtgcactacaaccagcaatgacggtgtgcgtggtattcaggtgagctttttgtgcaactccttcttccacaaaaataggtaccacttagagcatctctaatggagtgctaaaaaagtggtgtattgctatattttagaacacttaagaaaactatacttcaataatgttataaaaagtgtgctaaatttggcacatgctaaaagttgtgctaaatttggcacaaaatattgtattgtgccaaatttagcccacaataaatgttacttttttatttactataatgtcactaattattataatgtcactaattattatgatccattgacttttactaaactttatttacttaatttactatattactattatttaaataataaaagataaaaaataataaatttgtatattctcaatataatcaattattttttc

SEQ ID NO: 311843 - DNA, 2123 bp, Cannabis indica
tcaaccctaaccctattgaagataatataaaaggaaggctatggtctcttcatccaactaatgcctccaaagctaaaaacctagctttctgattagacctcttcctcttcaatttcaaaaaacactaagcctttcttcacaaatattattcagccattcgtgatagagtgagtgcccacacacatcaagttggtcctcaatcatagtatttaagactgtgaagaatccaatcaacaagaaggagaattggcctcagattttcgtgataccctgctacaaaaaggatacaagggttctggtaaaataattccaacacaggcccccttcgaggttgttggcgtggtcttggtgccacactaaacatgggccagtgttgctgcttcaccagtattttctcgacgtcgctatttacttttagatgtgcctaacacagctcatgtcaaagagcataaagtatctctcgatgattttcgtcttgtatagggagctaggctggcctccgcctaccccttacaagattgagtactattttgatctatagtagagcaggactggatatttttatttcagctagatttgtcattaatggcttggtgacactaattgcatatccatgtcgaaggttggtgggtacttcaaaaagtattttattgcacatggtcttcataggattgggcaccacaacttaagtatgtgccactcgttagatgtttcatccctacttcgcaaataaaagataaggcaaatcacatcctttctttatcggccgagcaaagaaatattatccagttgaccaatgtagacaatttttggaggtatggcttgtatcctccagctcctggcgttgtaagagtaccaactacagatggggcctaccctattgatggataaggcgctggcttggatgatgacaaagtacctttgtctcgtattgcacgaaatttagagaggagagagaaggctcttcatcgctgcctggctagcgagggtctagtaggtgatgcttctcttcatattgggcctagaggccagatttctgggagacctacacgccccgtgcatgcatctaggggcaagggaaaggctataattgaggactctgatagtcctttttctgatgatgatggtatttgatagttgataacatcatgcttttgttcttgtattgaaagtttatgatcgcattatgactttgctactttctttatgcagacatgtcttccaagttgagaggtcggtcttacaggaggaacttcgaatgagcctactagacgggtgagggccaaggtggctaagacttcccatggtgaggatgttgtcgggccatcactgcctccccctccacagaggcctgcaccagccagatagcctatgacacgacctgtcggccaaggtactccgaggcccagtagaggagaggggtcagttactggatagaaggctactgaagcagccaaccggtgcatagagagggcccttcatttcatggatgaggatgtaaaggagctaggtgacggtggacctaacaggctttactctaccgggctttgggatctttctctggtaagttatactttcagctctattcatcctcttggcactatataggctggatagccatgtggctggtaagccttggaagcttatgtggggggctggctaaccatagcagtctcgaggggggactggtcggccagtgttgtggtctttaacactgatgttgttttggtatgtttttcaggtcgtgatgaaactgagctcaactcgtgattgctctcagagatcttcaaatgctttttaggagcacgtgaagaccttggagaattcttttgtggcaaaggaaaaagtcaattctaaggtggaggtcctcctggcggagagatagaggatggtttctgggttagagactgttgacttcgcttttagccaatgacaatgagtctattttataagcgataaacgacatgtagtaacagatatatgataaagcaataataagacacatgaattttatagaggtccagccctgagcagttcggtaatagcctaatcctcattatttgtattgacttaagatcaaggagaaagattacttttctcatagctcttacaacagtatctct

SEQ ID NO: 311844 - DNA, 2788 bp, Cannabis indica
aagaaatttggaaacaattaatatattgttgctaatatcgctaatgttatctctatatgtcgcgttaaattgcaaagttctcaaactttgataaaacaaaaaaaattatgttttcttatgtcataaaaacaatcgctaaatgtcgcaatatgttgatatactatttcttgctaatatcgccaacattattgccatatgttgtgttatatcacgaagttctcaaaagactttgcgaaaatagaaaactatttatgtttctatatgtcacaaaaatcatcgtgtaatgtcgctatatctcgataacatcataaaacagttatatttaaatattaacattggcacatatcgctaaatgtttccctaataataaaaaacctacacattttttcattctttttgttgctatatcggtaacgtcattgactgtcgcaaaaatatcgtcaaaacatgcctagaaattaaaaaaaactacaaaatagaattcctaaaccatactaatgcatgcaattaaaataataaaataatgctaaaaacctagccttgcatgaagcttggttgtgacctaagctgccacagtttgaacaatggtgatgttccacactttttgactgttagatggatattggttactccgattcttcctgcattgctcttccttggataacctacgagtttcttctccactagtaccttgactctcatattctgcatgtgttccagaagcaccaaatcatcttcctcactaacaagattaattgttacatcgtaagtattcttccacgtctcttttgtgtaataggggaggacagagcgtacaagctgacaatctgagtaatcaccgcagcacatgcatgggcacaaggaatttttcaataattagaacataccgcatgtgcatgttttctcaactaaattcacatcaccacctttctgaccttcagaacttctaccaaaaaataaaaggtcaagtcggttcacagaaccatcatctcccttagagatatcaaaaccaaaaggtcgagccaattcacagaaccatcatctcccttaaaatattacaagaaaaataagaattgaatacgactctgagagggacgcctctctaaaagcagtaccgattttctagcacctaaaatatgctataagtatcggtgatacaatgtaaggggttgagcattgtctaaaaggttgcaagctcccccaacatggccttaaatttataaaaaaaaaaaaagagttgaccgcgacctaaggaattataagcacccttatgcccagcaagtaacccataagaggttgaggaagcgcggcgagctcacactccctcattgcggtaagtgcaaaccttaaaaggggtcgagataaatcatagagcctatgctccttacgaagggtaacaaaaaagagaagagaagaaaaattaagtcgtaaagagaacctcatcgcacttagtctataagaacacttgaaagaattcttatagactagggggcaagtgttgacccctaaagattacgaagcgtaatatttagagccactagcgcaccgcccgcagcgcttgcccacgtctacctatagtgctcgtgcccacccgcgcctgcctgcagcacccgcgctcgcctgcagcgcccgtgcctgcacccattcgcaacgcccgcatcggcccgtgagctcgcactcgcccgcgtgcctacgctcgcctgcgcgcccacgcctgccgccacctgtgtgcctgcccgtgagcctgcgcccactcgcgtgcctatgttcacctgtgcgcccacgcctgccgccacatgtgtgcttgcctgtacccgctcttcgtgtctgacctcttgacacacacagcctaagcaaggaaaccacgcgatcaggtacatcagaccacttaggaaatcacgctattaggtgtgaaaatgacttagaatttcatgattttaagatttggtgaagttgtaaaatgttaaaatagggcccttcaattcattgtatgaggactattttggtgaataaaacactaagatttttggtgagaaaaaatattgaaagatttttatttcatgcatttttcaatcaagatctccaaacaccaattttaatccacgttgtattgttgacgaattcttactctcaacagcaacctttgattcttcctaaatggaaatgggaggatgtcaccatgtatttcgtggttggattacctagacccatgggtatgtttgattccatataggtaattgtggatcgatttatcaactcagcacactttctactcatggaaatagcatacacagtaaatcagtatgcagaatagtatgtaaaggaaatagtaagattacatgggtctccaaagtccattgtatcaaatagggatctgaagtttactttcaagttttaggcaagtctcctctgagccatgggtacgaagctgaagttcagtacaactttccatccccagacagatggtcagtctaagaggataatccaaatattggaagatatataacgagcttgtgtgatggattttgaaggttcttggagtaagtatttgccattgatggagttttcatacaataatagctatcaaagtactatacagatggctccctatgagatgttgtatggcaggaagtgtagatctccaattcactacgataaaactggagaaaggaagtacttgggtttggaatcagtttgacggaccaacgagccaatagaaaagatcaaggctaggatgctcgcctctcagagtaggcaaaagagttatgcagatccgaaatgtagaaat

SEQ ID NO: 311845 - DNA, 980 bp, Cannabis indica
ttcctgcgagagtaagatcgattctttactcggcgaggttgtttggatgacctaaagtacttgataacccgataaggactcacacattctaagttatcaactgttgcaggatatctgtatacgcgactcagataggacacaaatatcttaaacacacagactcgattaaacttgtacgcatcttaagcccgcgagattatgtgaggatatgaacagaaaactcgcaccacttaggtcgcatacgttgctgtagttagtgagttgaggtgaaactgttcttcatttattacatttacgttcttattgatttaatgttgatattctatgtaaaaacagtttgataattaagtcaggcttttgtataatgaaaggacacttgctttgtatataaagaagtgatccaatatcaaatggacgagacagaaatccttgcaacagtggactaagcagaccgtaatctgagtgaaccactatacttcccttgtgttatttatattttccagtacgtttgagtacctattatttgaatacttgttattctatattttttattcataataattttttaagattttatttgatgttgtctaaattcttccaataacaaatagtgacagagagagaatcatggcaatgcatgaatgtgtagtcgaaaaagcgaactcggtgggtccttaattaagcagcaactaaaatgatcaaagtggaggcaatacattcgtggagattatgaatttttaaattgattccgtattatataatattatataaatttatatctatatctatatatttgggtgactattcaatggttacatttttattgtacccatatggttacatttttctctaacctgtaatagcagtttactaataggtagactttccttttttagatttaattaattataattaactattttcttaaaataattaattaaatagacattccttttttagaattatttaattataattaa

SEQ ID NO: 311846 - DNA, 2418 bp, Cannabis indica
tttcagcttcatgtctaataattcttagaaagcacaaacaatactaataagattaaaattttgaatcccttattagaaaccaatcaaatattaaaagaataagatttaagacacattttcttttcaaggacttgataaaattcaaaaaccaaacttacaatcacatagatgactttaatagtgcagctagcaattgttctcattcttctcatcactctgaataacagtgtctctaggagcacgaagagcaacatggaaaactgatctattctctgtgctatttatctataacaagaacagaaaataatcaaacaatatcaaaaaagaaacagcttcgtttaaaaaataaaaatcatcaaatgaatattctgtgctatttcataaactatagggcaccaatgatgaattgcgaaattgacactgaatgcatcaaaactatcaatgaattcttgctttctaataagcacaacgaacttattaaacacaattataaaacaagtaaaccctttatccaattacttcatttagttaaaagatgaacttgaacttacatgttccccaccaaacatttgattaatgttctgtttgagatttgttgtctgcatcatcaataccaacactcagataagctaatgcatgaacatagcagcaagtgcagtctaaataaaagaagtggtgaacagaggctacctctgctaatttaaagatcttttcaatagttgcaagtgtagcattctactgtgagtagtccctttaagaatgtttgttaacctgaattttaagtcttagagatagcaactttattttaaaactagtgttaggatttctagcccatctcaatgcaggttccatgactagttctttctcattagttttacacacttgcatacctagaaaagttagaaagtttggctttaaaacttaaacactttcagtattaaaaagagtaacaaagatgatccaagaagtaataaactcaccataaagtttgggtggaagggtaccaagacttaaactctcgaactcgattgcttcaatgtgaaactttccaatgtgtactatttgaatataggttctgctattctcttatagtgccacaaattccctgcagattaagccaaactcaatctaaactcaagtacattttaacatttttcttccaaatataacctttagtatctcaccttattgaggtaaggtcacatttccaagatgaacttgtttaaccagtctacctgaatttagaagccatggaacaaacataatcatgcaaatcataataacagggtatatgagctttataaaatatgccacacactactaatacgccattttcaccaaccttaagcaaaccctgaaaatcaaggaaaaccaaaaattatttaaattcttgaattaaaaataaaaaagtgatctttctctaccttttctgtatcacatacaagaagatcaccttctttgaaaaggaattctacaatatcttaaaaaggaagtttaagtgagtcatgagatattggagagaacagaaaaacttgaattgtaaaagctagcaaacaagctaacagaaagcttgaaaattcttgcacaattatttttgaggtcagcaaagccatgaccgactgtggtggtacgaccacaatgatcaagttgtggaaaaactattcattttaaaaaatatgactaaatagaattaaaatctctacgattttctagtgtatgttttctatgtaacttgtaataataacattgagtatcattaaggaaacccaagaataacatataacaacatatatataaatatatatagtaccaaagagagagatccacaaaggagagacaagtggtcggcgaagcgagctaaggttcatcaacatccttgcgtacggtcgaacttatgctgaacaaagagagatctaagaaagagaagaaatccatgaaatttgaagagaatagaatcctgttgggatttttgttgaaacccatcaaagaagagaagagaaagggggaaagacaagagacttaccgatggggttttcatcgaatcccgttgggtttttgccgaatgggttggggttggatagatcgaagagaaggagaataatcgccagagcatatgagaggcttcagaggttgaagacaatgtgaagtgtgtgaatcactttgggggttagggtaaaatattgaacattagctagaaaagttagcttcaaatgtaaactggcgcaacaaacaaaaaaaaatgaaaatttgctattaacgtcgggtattttattagcgacatgcaaataaccgacgttaattattgactttctacgtctgtttaaaaatgacgctgcaatgttcccttatactattaacgtcggtcaacgcaatgaacagtagcgttgaccgacgtaaatagtgatttttgtagtagtg

SEQ ID NO: 311847 - DNA, 3385 bp, Cannabis indica
ttagggcataaaacccaatagggtatccatttgcatgagaacggagtagagggactcccaaatggatagaagtgaggcttgatcgggtgcttatttctgatgcttggcttgacttatttctaaattgtaagttatttaatcttaagctttctagttctgatcattatcccatatttttagtgcctaagaatgaggtggctatctttaataagaagaattttagatttgaaaatgcttggttaagagaacctttttgtttctaaattattaaagatagttgggatctttgtattggtaaggggatacaagagaaaattttgtattgcggggagctgttgagtgagtggagtaaggattatattgacaattttaaggtgagaattaaaaattgtaaggccgagattaataaatggaagtatggttgagatgctctttctattcaaaatttaaaaaaaaaatacaaaaaagaatatgtttgaggtgtttactcagagagagattttttggagacagcgatccaagcaattatggctacaagcgggagacaacaatagtaagtttttccataaatcagcctcttccagtcgctgtaacaatttaatttccaagcttaaagattcgaataggatttggcatgtgggacacgggtatggctgagttaatgatgcattattttcgaaacttgttttcttccagcggctctgattggtctcataattctaattatatttctccttgtatctcggttgctcaaaatgaggattttcttagacctgttgaagcagatgaagttagaaaagctctttttcaaatgtattctgacaagtctccaggttcggatggcatggcaccaggtttctaccaaaaatgttgggacctagttggaggggatgccgttgcacaagtacaaaacttcttcttgacaggggttctcacagatggtctcaataatacaaatatggttcttatccccaagaaaaaaaacctagcaacatggatgatttaagacctattttgctttgtaatgtgctactcaaggtcataacaaaagtcatagaaaataggttgaagattgtgcttccctctgtaatatcttaaacccaaagttctttttttcaaggccgacttatctcaaacaatatcatggtttcttttgaaatcatgcattatttaaaaagaaaactcaagggagaaaaggagtgatggctttaaagctcgacatgagtaacgcttatgatagaatggagtggggttatcttcgtgcggttcttttacggatgggctttgatgggagatgggtgaacttgattatgcactgtggggaatcagtatcttatacttttatgcatgctggttgtgagatgggtccagttcttcttatgcgtggtattcgttagggggatcctatatctccttatctcttcattctttgtgctgaaggctttcgggtctcttgaggaaatatgaggttgatggcaagattcatggttgcaaagtggctcgtagagctttggtgattttccatatgcttttcgctgatgatagttatgttttttatagagcaaatactcgagaagctgattctattatggggttactacatctttatgagctagcttcgggtcaaagagtgaattttgagaaattatctgttttcttcagttctaatactgaagtttctgtgagagattcgatctgtggacagatggggatttatgaagtcgatgataacatcacctatctaggtctaccaaatatcatgggtcgaaagaaaactaccattttaggtttttttaaggataaattgcaaaagcgtattcaagggtgggaaggtcgcatactctctcgtgcaaggaaggaggtcttactaaaaactattgcgcaagctattcccaactatgcaatgagtgtctttctgctttcagtggaaacctgcaaggaattaaaaggtcttatggctaaattctggtggagaacaggctcttcaaatacaaggaatattagttagatgagctagggtcgaatgtgtagacacaagcatgcgggtggattgggttttaggagccttcatgattttaatttatctttactgggaaagcaagggtggcggctccttacaaatgaatcttctttgattggaaaggtgtttaaggctcgttactacccaaatggatttttttttttggatactggtttgggtaataatctgagctttgtttggcaaagtgtgcatgaggtgcaagctattgttcgggcgggtgcttgaaggactgtgggagatggttctacgatctcaattttacatgatccttggttatcttgccctgtagatccgtatgtccattcggaccatcctggtttacaagacaaaacagttcacagtctttttcgtttggatgataaggtgtggaacatagaaatcatcaatgacttattctctgcccatgacagtgctcttatcacatctattcatctgagctcaaactatcatagagattgctggtcttggaaatttgagaataatggcttgtttaccgtaaaaagtgtgtatcgcttcttggaaaatctcaaagacggttagttggaagatgaaaccactagtttttggaggaaaatttggaagttaaagattccccaaaaggttagtaaatttatttggagagcaacttcgagtatcctcccaacttgtttgcaacttctcaagcgccatgtggttattagccccatttgtccaatatgtcatgaggctgagcaatctatttttcatgctctagtgagttgttcttttgctagagcctattggaatagatctatggttaatatttctagttggtcaattgctagttttggctcttggtttcaatctctttcgacaggagtcaatcttcaagcattggaggaagcagtgatggtcgcatggggtatctggaaggcccgtaatgaggttgtttggaaacaaaaatctcctactgctgcatcaattgttttgtcagcaagatcactccttgatcaatttctttttgcacaatcacggacgacgaatttgttgtctaacagttcagtgggattgtcttcgcgtgtgcattggactacaccagccactgatcagatcaaggtcaatgctgacggagctttgtttaatgatgttagctattttgggatgggttgcttagacgtaaccatgctggtaagttcttgaggccttcactactagcagaaggggaactgttaggccagagactgcataaatcattaggattaaggaagctttaagctggattcagggacataattggcaaaatgttttgttagaaactgatagcttggtctatgttcaggctatccagagtgagttgcatatgccgtctgagttcggtttactggt

SEQ ID NO: 311848 - DNA, 1341 bp, Cannabis indica
gagatatcatgtgactcatcacgtccgagatatgagagtcatcccatttgagatatgttactcatctcgtctgagatatgagagtttggactgactgagataggccatatctcataatgaccatgataggtcatatctcaaactcgtccgagataaaataaattttgaattgaattaagataagaagagtacaaggctgaattgagatagacgcttttcgatccaagataatatcttcctcatcacagtctgagatgagaaatatctcagattgataggtcgtatctcgattcttgatttaaactttctttttatatcttctcaatcttttataagttttacctgtatttctttcactactacaatttatatatttagtgatgcgcacaaaaagtgtatgtcattaaatattttaatcaattttcagtgatccacattgctagacagtaattaatttacatttatgttctataaagcaggtcaatatacatttgaagggtcactaaaaacttattcatttacctatttattttgaaatatataaataaataaaaagcgacacgcactgtctaactctgaaaatgttcagagtctcacaatgcgggtcactataggctcaataaaaaattataaaacaaaaaaaaaattgaaacacacggctggttccataaaaagctttcttatctctcttaatttattatttatgaaagaaaattaaaataaataaataaataaataaataagagtataaaagaaatatattgaaacctaaaatctcattcaccatctattcaaactctctctcccatatctatctttctctccctatctgatctccctttgtttattttgcgtggctccggaatgaccaccactgggttgtcatggtccagccatggcttcctcaacccaagaaagcctaaagccccaacatctatctttatttcccttttcctagcgcgataatgctacctgggtacgatggcctctctccgactatggtggtccaaatggaccacataataatactcgcagcatatggaaacccgaacaatggtggttccccttacgtttctcgcaaccaaagcagatgcccttttgttcgcaccccatcgacgaggactagctaatcagaatgaaaactctttctctcccactggtttcttcacgtggcctaggctttgcacgactcattggtctttggtcttcttcccaaatgacagacgacccagcatcgtcgacgagccaaacggaggtcattgccacctagatttttactgggatttaatattaggcattttacaatttttgtatttttttgtttaaagatttagatttttt

SEQ ID NO: 311849 - DNA, 3138 bp, Cannabis indica
cagcaaaccgagtagcacattatgttgttagacattctcgatatcaatctaatcatagtatttttgatatttctaattctggtgaactcttacatcttttgtattcagaatgctaaattattcaataaagttaacatttcatctcaaaaaaattctctaatatgtttttctatgtcgaaaatagaatttaattatatttttgtttttataaacttacgaaatattatgtatataatgtactattaattattaattaattatttattataaataattaatcattattttagaatatttatttagatttggaatcaaaattaatatcatagttatttatttgaatttcaaattcaaaataatagctatcttaattatttaataataaataataaaatagttttattattttacataattaagacaaaataatagaattttgagggatatttataatcaattataatttagaattaaataaatataattaattttaggtttgaaattcaaactcaaacctaaaaccatattaaaaccaaaattgtcttaacccaaaataaataataaatgttccaaattttaagaaaaaatttaatgataataatattatcttaaataaagggtttattcaagaataaattaattaaaattattttaattaattaaagggttatagtaatgtcttaaataaaatctttatttaagaataattaattcaaattattttaattaattgtaaggcttatgaggatcatacaaaattataaaaatgcccttgcaaaagtagaaattatttttgtaatttattttctttttctttttctaaaggttataaaattagaaatactcaattattacccagttcatcattctttatttattgtgttttaaataaatattcatttatagtagattaatagcatgctcatgcattagtgaataacatgtcatacatagaattccacacagttatattatcacgcatttcataatagaaacatgttatattaggattgtcctatgtgtttatgtatttaccatttttgaaactgaaagcatgtaaattggctcagattaatttataattaacttggtaatttaaaattaacctattaatttaaatagttttgaattatgaatgaaagagttaatccagattaatgattatgatgaaaaatttatttataatttgaggtttttattatagataaattaatcataattattaaagtagttaatatgtattaattctgagaattaataaaacaaaaacatgaacctaaaatagtgagtgggagaaggagtacatgtcaatgtaacctacgacctttattattggtcaacaccgaaggagtatagactgacctcgagaaaacatagtttttgtccccaaggaaggtatgtgtctatactatttttcaagattgattacttgactaagataagaggaagtaatatgttttagtgcaataccgacccttaaggcgacatactaagttaagtcatagaatttgaaataatgggttacactcacaaagtccaactaagcttcgtgcgattacttgttaacttggtaagatagtaatactttatattttgaaaaagaaatatgagatatttaggtttcaaaataataaagatgagaattgtcgcataggctcaatgaaattgactcaataccgatcctaaggtggcgatcaattgttaaagagttttatcgtggaataacttaaataatatttatgtgttttacttgtatgcggtcatgcatcacattatagtaaattttgaaaagatatttactattcttgtataatcattatgtcactttatttatttcagtcatgtctactatgccaaatccccttactactttacaaacacttgaaaaaataaatggtgataacttttataaatagaaaccgaatattaatttaatgctggtttgtgagaatcacaaatttttcctaattgaggagcgtcctgaggagctcgctgccaatgccccaaaaatgttcaggaaagatatgatgcttggattcaatctaacaacaaggctaaatgtttcatgcttgtaagcatggacgatgttctatgtaagacgcatgaagatatggagaatgcatctgtgataataaattatctgcaggccatgtttgggcagtagtctaatcaaacaagatatgatgcttcttgtagttacaagaattgtaagatgaagaatggtgtccctgttagaactcatgtattgcacatgattaagcgtatgcatgagcaaagatacacagggctatcattgatgagaggactcaagtgagtatgatccttgagtcgctgtctccttgcttcaaggctttcaccacaaactatgtgatgaataatctagagttcaacatgactgaatttttgaacgagcttaccgtgtttgaaaaccttaataaggataagcctaaggaaggtgaataaaatattattgaagcaaactctagctctgcttcttctcttgataagaaaaggaagtgaaacagtaaggataacagcggtggcaagcccaaaggaaaaaaattacccaaggccaagaagaaaaaatccaatcccaagtccaaggacaagaaggctaaaggaatgtgtttccattgtagcataatgcgatactggaagcgaaacagtaacaagtacctctctgagcttaagaaaggtaaatccaatttatttttccttaaagctaacttagtggaggatgataaatctttatagattgttgattttggagccactaattatattttttctatgcagatacttgaatcgtcaagggagctggccgatggggagatgactattcacgtggggaatggagcacaagtgtctgccaagagttttgacacatataaagtttgagaaaccttccagtggttgcagcggaattaaaatgactccttccgctcaaatctctaacccttgtatcctttctgtagcagagtatcaccaagatctgagccagaatctccttccttgtgtttggattcttcacagtcttacacactatgattgaggacttacttgatatgtgtgggcatgcactcaatcactaaagcttgaaattatttgtgaagaaaggctatagtgttttgaaaattg

SEQ ID NO: 311850 - DNA, 4015 bp, Cannabis indica
tttagtgtaacttaggatgtctggtacatcagactacctgagatactatgttatcaagtatgaaagagacttgacatcctgtgatttcgggatctggtaaggtcgtaaagtttgaagggctcactataaatagagacattgaactcattttaagggggactctctagtagaaaaagtattaatgaaactatagtttttctaaatagtgaagagattaatatttattttgagtattcttctattaagatcttgaaacatcatcttaagttcttgttatttcattgacgaattcttaatgtcaacactagtagaatcccttggaaaaataaaagaaagaagagaccaatccaacttaaacctgtaagcctactagaaaaaagttgccagctacttcaataaataagtcaaggaaaggaaatttatcataggagacttagtactttaaagaatattccctaataccaaggatcctgcagaaagtatgtttggaccaaactgaaaaggtccacaccaagttacaagataacaagtaaaggtgcatgcaagcttggtgagtataataagaacatggagttagttctcctaccaagatactagaatagaaaacatctcggtaagaactaccagtagcccacttatacaaaacactactcttcagtagtggttcctgtaacgcttcactatacaggaattcagaaaagagctaagtttccatcactctttattgatggactttgctcaatatgtcgtgcagaggtagccaaaaactaaagagctatatgaccatcagtcttcagtgatggcccttgtgcggtatgctgcccaactaaacttaagcaaaatttaaagcattgttaagccaaaaaaattgaaagataattaagtgagaatggcatatttcagattacacgtaagctgcccagacacctgcttgtcagcaaaagaagttaaagccaagaataaagaccgcaaggccgatcgcctattcaaaagtaaaaggccctaaggccatacacgaaaaaaaaattgtcatatgttcaaaagtaacgggcctaaaggccatacaaggacaaaagatgaagtaacgggcctaaaggcataaaaataaaaaaaaataaaaaaaaagtcctcaaatgtctttagaataataattggagtcggtgagttcaaagttgtattagaaggactagttgtctagaatgataagtcttcattaatctggttttcacctccccaaatgtcatgcaggtgcatccctaaaaagggcagagggaggtgaacaatcggagaacataaaaaaacatagacaaaagataagttaattggccaaaacctaagggtattacccagacagccttgaaatacaaagttttaatcagaaaagtataaaatcaagaatcatgaattggatagcctatgaaaggtcattgacaggttaggaagatttggcctgagacataccaaatagagctcctaaaaaggagctaagtactgaacgaggctatatgggatctaagtcattcacagagttcctatataggatctaagtcatggagagagttcctatacaggatctaagtcatggacagagttcctaaacaagatctaagagtcaaacagggtctctaacaagataccaatccaagactcaatcttgtttataaaaaagtcaaacattatgcattctaaagctatcaagtgaattataatgtgagaagactactttaaaatgtgacaattaaaaattttctaaaagctttcaaaagcttgaaactcatcattggtagattgaaagaaaaaaagatatgttgaagaagtgaagatgaggcatatatggagagagaagatcaaaggtttaaaaagcacattattcaaaaagctcaatacttagccagataaggttgtttgataagggctcctacagtcaaggaaagagctggaaagtctctatccgtacaatgtacgaacaaggacttgtgagcaaatgttatcccaaattttgtctacttgacgtggcatgtccacatagtcaagactaaggacacgtgaaatatagctcatcgattatagaataaagtcatcttacacagcatgtcaattgtcaagggttctaaagtaatcaagcaataagcgaaaggagttaagcaagtcgttaagaccctggccaaccatgtatggctcgccaaacgaagcatgtttgagcggccaaaggaaggttataggctagctagctcttaagaataagctagagtgctaaaaatgcttgttagatcaaaaaggcatgttcaaccacgaaggtctggccctttcaagaaaagctaaccaataaagctatatggaaaaggttggtaggcacatagaaaggctggcaagcacattgaaaggttggcaagcacatagaaaggctggtaggaacatacttaggctggcaagaacatactttgctggccatagaaggtcataggctagccagcccctaaaaaaaggattggccggcaaactggtgcaaacaactctgaacatgctaatgaagtgcaggacaggcctatcaagcccacaaaaataggaatattccctcgagatattagtcctatattctaggaatttagttatccattttgtaatttaaataatagatagaaaaggtgttattatccctattttgaaaggatatcttgacctattattaggatcttttgtaatccctacactatatatagggcatcagatcactctctaaaggctaagtactccacatgcactagaaggcctccatcaagcctaagctacatgtaaagaaaaatatttctctaattctcatgcatgacctatctccctttaagtctctcatatgcctccaaggcttcctagactctaaacctctcttttcttcataagttcttcatagaaacttatcagttcttgatccataacacattgttctcacaattgtaatactaaacagagccatagctagaaatcgcaaggttttaacctaatatctgcatggtattatctcaatagtgagtacaactaaaaggagagtaggtcattacccgctaatcaagggggctaaatctctataaatcgctatgtcaactttattatttgcttctacaatttgcacttggtgattgtaaataataaataaggttctgctgtcaattgaccaaattctgagttaacacactatcaactaaaaataaaatcaaatatcttataagatggaaaataaaatgaaataaatatgactaaatgcaaagcataaaaaacttacatttttagcaaacaatcttataacctcttccttgtcgagtatgcgcttctccttactgtcccagttgatcgttcttggaatgcaatgcaacatcctaattgcgtattcattacccagctccaagatggcctcataggcccattactgcaatgttgcagtataaccgtatgatgagtattttgccttcttctgagaaactcccttctcaatcttctaatgcatcgtattcttcacctctataaagtctttgtttcaagttttcatcaacttgttgaggaaaatctttctcctaatatactcgtagaagaattcaaggttgtcaaccattcttatcacaaaaggaggaacaacagtcttctcctccttaccagtgagtacaccaataacaaacaaggtcatccccaacttatagacatcatcaacttctgctcaactctcgaaatctttgcacaattggccaaagctaatggatggatcaccgtttaattactctacaatcaactagtttgaacttcctttctctttaagttattgttcagtaggcccaggtaacaagtttaatcccgtcaccaatgcaaactcggcccaaatgaattatatctcttcttcgcgtgataaaagtgtacctcatttggcttctcaaatttgatattgtgcacgaataaatgatggatcaatgatcccaaaatgtttagttgttttctctcaaagaattacttgaaaggggattccttcacc

SEQ ID NO: 311851 - DNA, 630 bp, Cannabis indica
atgtgagccatgcaacattaaaacaattttttatcttttattaattagtaaatctgattatattgaaatgggttttatttagggcacaaaatccaacagtgaattcactttcaaaaggagaaatagttcgagcaaaaaattaaagagccggagttgaactactaattgttattgatggtgccagaggtactccataggcattgacataagcctcttccaaatttatgaagccttaagctctagacgaaatttgacaaagtattagaccttttttttttgcaaagctccccacaacatggattcggtagatattcctgaagttaagccaccaacttcatgtcatcgttgaccttggttttggccactgatccatcatcttttggaaatacttttcgagactctattctgattgttgtttaatattggtcaacgaactgacctctatgtcataatcttttgcagctatgaactattttttgaaaattgtttgcagatcttgttagactataatatagtgaatgaaatatagcatatatataaacgatatgcaatacggaaaaactatataaacatatcgatattatatatacaatgaaggatcgatatacctccagccattgatctttgagc

SEQ ID NO: 311852 - DNA, 1570 bp, Cannabis indica
aatattatactacttcaataatagaaccaataattaaataataaaacaattactactaagaaaagttggttgtaaattaaaatcatatcattcagactatatatatatataggccatataaatttatgtatagatatttataaatatagtaatgaaagtgggtgacctataaatataatctcatgcatactcttaataatttcttttatccccacataattaataataaatattggaaactatttaggtaggataacttttgtttcaaccggtggagttatttttttttatttttagtatatatatgaaaacattatattcaaatttatttttatgtatattatagttagagtaggtgttgtatttatttttgaattttaataatttatagtaatattaatgaaaaataatattaaaaatattaataatcacagtttctcttaattattttgaattttatttttgaaaacttaaattatttacagtttctcaaaaataaataaatattattttataactacaatacataaacgcaacaaaaaagctagaaatataattttttaggtattaaaaatagaaaaaattcaatgataagaataaaaattcaatgttaaaagcaactagcagtgtaatatatatgtgaatatcgctacaaatgtcaatattactattggtataattaaatatcatgtattatataatttaatataataatactttcatggagtatcgctaattaattataagatgacatgtaagcaccattatatatacctaataacaatgttttaaaaataactccatcccaattatatatgagaaatgttaaaagatatcactagtgtttagtactctcatcgatttcatactactattagtgtaattaagtatatcaggtcttgtataatttaaaaaaataatttttaaagaataatcaatcgtatgacgccacctgtcgaaagtattgggcagcactgatgcctaataactatatgtatttgtattttaatttatttattttgaaatatatatttttatatataaaaatatattcttattccctcatttattagacatagttctctcatttcccaagtgtataaaattcagttgatgaggtcggtaaaacagttcgaatgaagtatttcgaagtaatctaatattattattattctaaattaaattaattaattaattaatcataatccaaattaataatagcatgttaggggcactgcacctggcgcaaccaaagccctgcatgtggcactctctcattttttcttatttaaattattaattactttttattattaaaattattaattaattaattaattcaaattaattttgtgccccatccttctctttaacctaggtgcccccctatcatatattggattaatatttctttttatatataaaatatttatgtgtacacatttttagtctcccaagttgatgagtatatatatttgaatattttcttaaaatgaggattagagatgaacatgtggaaaaacttaatatatgagatcatgtgtatatgttatatacatatatatattat

SEQ ID NO: 311853 - DNA, 563 bp, Cannabis indica
ggcttccggatgagccaaaattgaagttgtgaatttggttgatttgacttcatgaatcatctcactagtgaaaaacttgacaaatggtcgaagcgacatcaaattcgtataagcaaaacccaacgaaccaagccaaatattgacatgggcactagggcctttacaccgagctcccgagattctatttttacttccaaggcttctaaacttgaaggggcctctcccccaatttttaaccttgccagattcaatggttgtatcaaatttggcattcgagcaatcaaacgtagcatcccaggttaattttcaacttgggtcctatttccaaggactcaggtttgtggttttctctctgagtttacttgaatcttcattatttttgataaaagtgaagatgctcgaagcactttttgctgaactaaattggaacatgccaatttgacaaatgtcaacatgggcacagggccgagtcccaagtctcaacctgggcagtgggtccctcttctgccctttcgaaagttctgttggtccccaaaatatttgattctcaatattttttgaag

SEQ ID NO: 311854 - DNA, 2053 bp, Cannabis indica
aatcgaacaccaaattctgggagcatcctgtgcaactattgtaagaaaccaagccacaccaagtttgagtgtaagaagttacagttcaaaaatcaacaaagaaattctactaatattgaagcacaagtgatacatctgacaaatcaatccttatttgtgctgatgaatttgccaagttctcgaggtatcaagaatcacttaagtcttcatctccttttgtcactgtgttagctaattcaagtaactttattgcatgccttctttccacatcctcaaaatgggtcattgattttcgtgccacacatcatatgacaagtaattccaatctcttttctactttttcagtcttatagtcccacttttactgttgctttagctaattcaggtaactttaatgcatgtcttctttccacaacctcaaaatgggtcattgattctcgtgccacaaatcatatgacaagtaattccaatctcttttccactttttcagtcttatagtcccacttctactattactttagatgatggaacatcatcttctgttcttggatcaggtactattgctcccacaactttgctcactttgtcatcaatcttacggttagctaatttgtccttaaatttgctttctgttagtcaactaactcgtaatctaaattattcaatctcattgttttccaatcattgtttgttttaggatcttatgacgaaaaaaattattggtaaaaggcttgaatctaacagcttatatgcttttaactcacttccaccagtctctattgcttgtctgagtgttgattctgcttttgaggcccattgtcgtttgggccatccatcccaacctctgcttaagaaattctatccccagtacagtaagatattttcattaaattgtgagtcatgtcagtttgccaaacatcattgtgttagtttgagtcctaaagtcaataaacatgctagtgttccttttttgagttagtttattcttatgtttggggtcctttttctgttttgtttgaattcaagtattttgttatttttgtaggtgattattctcgtgtatcttggttgaatttaataaaaaatcattcagagttattttctatagtctgtgctttttgtgctgagattcaaattcaatttaatgtgtaagtccatacattgcaaagtgataatgccaaagagtacacatctgctcaatttcaatcttacatgacactctaatggcatacttcatgagacttcttgtgttgatactgcacctcaaaatggtgtagcaaaacgtaaaaacagacatcttcttgaaattgcatgtgccctcttagttcaaatgaaagttccttaaccctttcgggccgatgtagtttccacagcatgctttcttattaattgcatgccatcccctgtacttaatggtgagatcccatctaaaattctttcttcctagtaagtcattgtttccagttactcttggtatatgacaatgtttggtatctgtcctttctccttccctgtcaagatgaacaatgcggttaagcgtgcagattgttggtttggcgcgaagtgagcttggccgctctaaggcattaaagtgtgtttttcttggttattctcgtcttccaaaagggtatagattttattatcttgatctcaacaaatatcttgtttctattgatgttactttagtggaaattacacctcatttttcattttcacctactcttcctcgttagggggaggataatgatttgttggtatattttgtcacattctctgtgcctgatacatgttttgaagaatctcttattccttcaccccccttcggtcataactcccacaaggcctacacctccaccacttcctaggcctcctataatgtacaccaggcgtccaccttctccacctcccttttcatgtcctgcacctgcatcttcgtcatcagattcgaaactcaaagatgacctacccattacattacgtaaaggtaaatgtcaatgaacttttcctatttcttcttttgtttcttatattcatctctcctcttcttcttgct

SEQ ID NO: 311855 - DNA, 1492 bp, Cannabis indica
gtaaaataattccaacagtttgccctcagaaattctatcaatattgatttaatttctggagctaagcttatccttatctttagtcctcttgtcagtaaagtgggatcaacatccacttcctccaactcttatacaggtctcaagcttcctacaagatccccaaagtgaggatctatgtcagtgttcttgccttgggctagacttcattgccccttactgggctcctttttttggcttttggcaggcatcttctcttttttggccttggacagggccaagttgttatcgccttcaggtccttgagggcctgtcggcctatcatggcattgaaagttgaaggaatgtcgatcaccacaaactgtgccatcagtgttgtggtggttggattttttccaactgtgaggggtaatcttatttacccgacaggtgcaatgccttggtcaaagaagccattctctacttggttgcaaggtggcaagtcgatgagttggagccccatctgttgatattttgatttgaaaagaatgttgggggaggctctgtcgtccaccatgcatcttgctatggtcatgttctcgatctgtacagtattgaccagggggtcattgtgtagaaaactcacctgagcagcatcttcttctctgaagaagattgtgggctttatgggtttttgttgcttagagctctgatcttcgatagataggatatcacttttgggctcgtgacgaagtgtccaagcatagcgctccctagccttgctagtcttgcctgcaatgtggggtccgccaatgaagacccctaggtgtcctgccacatgtggtggcattagatctccgttctgggctccttatgcctgggttttgtcgtcttgcatataagaattcaggtggggatttttacgccttatgaggtattcaatctccctcttcagatattgactttcattggtgtcatggcctaggtcattgtgatagcattagaactttgacatgtccctcttcccatctcctttctaataggaaagggcttttggtacaggaatgttccctgagtggccatgaagatagcctaaggtttctctatcaagagggtgaagcaggtgtacttctcctccttattcttctgtggcgtgggggaagtgttaatgtaatatcccaataagtctaatggtaaataattagggtttatatttacattatgagttaaacaggtaagtgagattatgatcctactaatttatttcagcataaaatttaaattttgctataagtgagtaaataatcgtaatttgttaaattacggagatttatatagtatgtgtgaatgtaatatgagctatatgtagaataaaaatattttcaggtttggggacactgaaaactcgataagtggatatataagcgtaatttgtgaattacagagatttatttaaaatacatggatataatatgagttatttgtgaaataaaatattttcatgttcggcgaccct

SEQ ID NO: 311856 - DNA, 604 bp, Cannabis indica
ggttgcaatgagtaacaaccttttgcctcatctaaaaggaagtcttgtccttagttaaagagacaatttacaatttactttttgaaattgatgagagtctatttggatctcttcgaattgtatcattttttcaatcactactacaaaatggacttttaccattgacttacaattgtcatttatactatttcccaacggttcttaaaatcgttggctatgtgggtgtcataaaaatgtgtaactttaaatgacggtttataacagttgcaaaaagactttaaatgacggttaagaactgttagaaaaaagtcactttaaataacggtttataactgttgggaaagactttcatcgagtagtaactgataaaaaaaatctctttaaatgacggtttacaaccattgagaaaaatcactttaattaaatgacagtttacaactattgggaaagactttagtcaaactacaactaacaaaatacactacttaaaatgatagttataattcgatggataatatgaagtaagggagaaattacaaatattattgcgattctccccctgcatttttattatttagatttccaatatacaatgatgaaaaaa

SEQ ID NO: 311857 - DNA, 1805 bp, Cannabis indica
gggcacaaacccaacataatccccacggtccaaatctccagagttgtttaagcaaaaacatattgagaaaacaagtgaaggggagagtgatcactatcattacaaagaacacaagtcttaccattaacgaaaatttgttgagttctgcttccaaatagaagaatatccttagcaagttttcaatgaaaatatttcaccctttcatgcaccttaaacttccaaataagacccaacaagtcatccacaacaccataacgagcacagatacatgccatataagcattcttgaccgtaaaggagccatcaatagatgccttccaaatcaattcatcctcatcatcaatagccagccgcggtatattcataacattcttgcaaagaggaggagtgaaccactccccaacagcttcagccaccgagtccccattctcacttgcgaacaaagaatttaccatcactcctctctcccgaattcttcgattgaaggaagcttcgtactaatcctaagacaacaatggaacccaaggagaatgtgatatatcaactgacaagccattccccactaaatagtaggcttcattacggatgagttctctagtgcacatgatacctttcgccctaaagggtattgaatttcgagaaggggcagaccagaaagtaaggccacgcttaaaatacttgtcacaaaaaaactggcaccacagagagttggtctcagaggcaagtttccaactaagtttaaagaccaaggccatatgaaactcttcaaatttcttaaagttcagcccgccccacttccttggcacacaaagggaatcccaattaataagggcaacaaaatgactcttatctgctgaacctatccaccaaaaacgacaaattattttatccagttctagacaaatggatcttaggaccaaaaaagtagacatagtgtagatcatggtgctcaaagccaccgattaaatcaaggtagattgccccacctgggaaaggagcttcgtcttccacccctcaatacgcctagtcattttatcaatgagaaaattaaagtcaatgactttgcttcctaagaaaagaatcgggttccccaagaatctatcacttcccaccatctcgcgaaacccctaaaactccttgatctcaagtgtaacatctgtgtccacattggaggagaaaactagagccgatttgttaaccgctgtcctgacatgttgtagtaaaggttcaggcaccactgaacttccgtaacattctccaagttagcttcacaaaagataaaggtgtcatccacattcattaggtgagagagggaaacaccatttttggagaatctaaaaccatttaacaagccatcttgttcaaacttcatcaataaactgcgagagcatttcactacacattataaacaaaaatagggagagcaaatccccttgtctaagtcccctagccggttgaaattgcttcaaaggacccccatttaagagaatagagaagaacactaaggacacacacttagccactaattgccaaaacttatcccaaaatccaaaagtctccatagttcattccaggaaactccactcaattcggtcatataccttagatatccaactttaggccaatgtagcctttacgacctttcatcctcttaaaagaatccaaaacctcgtgagcaatgatgccatttccacaatccaccttcccagaataaacgccgattggacaagtgtaacgtcctcgcttcaagcctccattgggtccttacacccacgaaataatggctcttatacacgagtacgtca

SEQ ID NO: 311858 - DNA, 608 bp, Cannabis indica
taagtatttatatattatatatttttatatgtatatatattaattttaattttttcgggacctccaaaattgtggggcctggggccgaggccccagctgccccaccctctagccggccctgagacagatcaaagtaatgggatttggaatatgtagggaaataaccttttataactaatagactacaacaaattacacttcttttattaaaaaaaaaattctacactacgtatttttatcaatattattaatgattggttgtaaatatacatgttggtgtatttgtattaaaggtgactgactggagacattaaagcttttaaaagtactaaaagggtgaattcagagctgagagcttagtgtgaattgagagctaaaagctcttagaaaggaaatttcttaaatatatttttgtaattcaattaattttgtgtaatgtctttaagactatttatatttaaattgtattatatagtgtaaagatcatttctcaataaatttaatgttcaatattatgtttattattatgaaatattataatttagagaaagaaatagagaatcgatgagaatttctgagtgtttattccaataggtgatctcctattt

SEQ ID NO: 311859 - DNA, 1408 bp, Cannabis indica
tatttttgtgggttgttaaggtcaaaactaccacttagcttaatgtccacagatgaaggctacacaccaaaggcttgctaggaaaaggctggccggccatgttcctgctagggtctagctggccatgttcctgccagggtctggatggccatgtgcctgctagggtctgcaaattgcacatcaagtgcctgccagcctagaggctatacatcgagtgcctgccaaccctaacaagtgttggtcagcctttgtaggtgatggccaacctttgtaggtgatggccaacttttttaggtgatggccaacctttgtaggggatgaccagcctttgtaggtattggctagcctttgaaagtgatggccaccttttgtagatgatggccagcctttgtacaactttctttgcaaaggtcaagcttccttgttcgaacgagccctctcttggtctaataatcaccttttaggaatctaacttgtgctcaaactctggctggccacacaagctcttcctggccgacttatgtactccctttgcctggctagacatgcttgtgcagcttcttgacagcttgctaagctgctcttgcttgttacttgaaagttctgtgatgccttgtaaatagacttggtcttgttgttgataatgttgtattccacgtgtcctcagtcttggattatgttgacatgccatgtcaggtacacaaattttgaaataacattttcttcccaagtccctattcaaacatctggtcggatagggaattcctcattctcatctttcttgtagtagcctttgttgagcaaccttgtcaagccaagtattggctttttgcatggcatgtttttagatattctctctccataaattcctcatcttcaattgtttgaaatctcttctttgaaccttccattcataagtttcaagcttttagaaactttttgattctcacattagattgtaatctttttggtattttgatctgcatgatagttttagaatgcataatgtatgatttcttgatgaataagatttgattttggccttcgttgtgtttcttgactctttgagtcatgaagaacaagtttgagttttgaaaaacacacaatttgatccaaaactaaccttggccggccctagggggtcttatttgagacctggctgaccttaggatttaatcatgggagttagccaactctatggtttcaccctaagaagctagctacttcatgcccaagtttggtgatcctgggcagttcttggctgagtcatgagaccttggccgaccctctcaaagcttgggaaccctgggtgatctatgccttggttccatggaagtggctagttttatgtccttttttgacctcaacaagaatcttgtcatggccttgtaggcatatacaaccttag

SEQ ID NO: 311860 - DNA, 1204 bp, Cannabis indica
tgtatcagataatcatgaagcacggataagaaaacatacttctagacaaaagacttatttttatttatgagtagtgagggaacatgggataaccataattcatgcgtataaaaaataataaaattcaaaaacaaataaaacataacgaaattcaacaactgatggttgtataacacaaactttttccaatagttgaagaaatcacagtttcaaagctcgcccctacactttaaaacacgttttatttaatatgataagaatagaaaaccagaaatgaactttcatatatgaactaaacgaaattggcgtctacccagattgcatatgaatgattagaatgaaacccaagtatcgaaaaggaaaggtaacctttaggtcctaaggtaagagaaacagcatcggctagcttatcaatcccagcttgtaaggcttccctacattcagagccgaataatatccttttcgggccagctctgagcacaagagttctccttctttgtagatttttccaaaacccaggagatagtctttgctttctgccatggccttgtgcttgtaactgcaaaattactcatcattagtccaaaaacaccattgtacaaatacccaatttacaaactaaaaccgcccgagaggaaaattactaacggagaacaatggtgtctgagggtagagctgagaatatgagaaggcaataggcatttccctttccgttggggctatcagttttcagctatctgaacatgcttacgaggtttttgcttttcaagggtttaagcatgtaaggtaaggtggtgtttggttcagtgggatttaattgtaattgtaaaggtaataggaatagtaatagaatgtcatggtaatattaatgaaattactaaaattatgtttggtttattttgcatgagtattgtaatcaatttttttatttggtttagtataaaaataaaattgaataattagtatattgattaaaatgttcttattttatttattgtcaactatatttggtaaagaggtaagagagagacgggtagaaaagttattttgtagtaaattggtaattataatcctcatttatgagttatactcatgtaatgtaatgagaattcatccaagtaatgtaatactcattacaatgtaaaaggattataaaagttaaaaatcccaaccaaatattataattgtaatctccattctattc

SEQ ID NO: 311861 - DNA, 801 bp, Cannabis indica
agagtatcgctagtcaatcgcaagacgacacatctcaaaggtgctagacaatactattgtttaatagcaatactcaaaaaatgttaagtttaaggtagagagaaaaataaaataactgttaaatacatattttcgatacagtataaaaaggaagaaattttttaattaaataataaaattaagaaaaaaaaaactctaagtttcttttattatcgattattaaagtaaaattttatttttaaaatttaatatgtttaaaattaatatttaaatataaatattttttaaaagttcccatcaatcggataataatccttatttatatataaatataacctgatattttggatccaaatgttgcccttaattaatgtgctactctttgtataaagatttaaatattggcatctttgaccaattattaattaaaaaagtatatacattaatgattattagattagattaaggctttttatctatgaataactttaccaatcaaaaagaaacatattttgtagatcccaccacatataacacatcatactaataaatgttcctaaggttcccaacaacaaggtaacctttttatttaattaatttatatttcaatgtgaggatagtaatatttatgttaaaaaaataagaagaaatgatataaaacagtttgtttttttttattatcttttaaaacaatttttttattatttattttttaagaaaatccatttaacaactaacaaaataacttaaatcacaatcaaaattcatataataacttacataaaaattactaaaacaact

SEQ ID NO: 311862 - DNA, 1187 bp, Cannabis indica
aaaaaaaaatatttagcataatcaattgcttttctctttgctagaatacatcaaattaatttgcccaaaattaaaacattaaagaagcctttttctttagacaaaaaaaagaagagaaaagcattaaagaaggttggtcctaactcataacgccaactacccaaaataagcagccaccgacccattcggaacttcgaatcaattcgatgtcgcatacggccacaaccgtcgtcgagttcggatccttctaacacttcgcatttcgatcagagtagtttcattgggtcgtagttatgagtactggagatcttctcaatgtccacccttcggagctcagattcccttgtaagttttatttttgctttaaatactaatttaggcaaagaaaagaaatttggcaactttcggtgtcgtttctgtcttgcattgagttttgaagggtttaggttacgttaatttcgatcaagatggtttgaaattgactatggaggtaaatcactaccaaagttttcttttttattttgtaagtctgatataaggtaaggttagtcattggtattttatcgttatattttcaatttgtttggtttatatatacgtattgcttatagtgattagattgaacaacatttggttagctgtatgagattttttttaagtattaacatgtatgtattgattgtctatttgggtttttctttttgggtggtaaagttgaattgaagaagcagagctcatgttctatgcagttgatcaacaagacagataagcatgtggctttcaaggttattatctgagactgagaatacatcactccattaataattcatttctgcttgttagcttgtctatgcatttttttttaatgtagaacaaaaggagtttgtattatgcataatatattttgaacatttgattggtatataggttaaaacaaccaatcctaagaaatactgtgttcgacccaatgctggaatcgttttgcctggtgattcatgcaatgtaactggtaaatagtatagctctcagtaccaagtggaactacttcttgtgttgtgcatataattgtgtatgtgtgtgtatttccttataaacctaaagttaagttagtgaattgttttctctttttggtagtttctttctttgtttttttgtttttatctatatgattagttttattattgttt

SEQ ID NO: 311863 - DNA, 1481 bp, Cannabis indica
gtacgtacgtacgtactactactactactactactatatattattacaaaatttacagagataatactgtaactataacgaataccgctataaaaaaatacttcaacatatgatttcaaatattaaaattgactaaaagattgtaattagcactcctccattattaattcaatttctaaaactctactacccaattaatgcttaactacgagtgtaatatactttctcacacaattgttgtatattttctcacacaattgttaacttttctttattgtcaaaaaaaaaattgttaacttttctttgttcattaaaatattgttgactttctttaatttgcactcattaatctcttagccaccgccctattatatttgctacactattccaattgccaagctcgctagtcgctactctacctacacaatttattttcccttttgaaaaataagactagctagctagcaaccacctctaattaaggtaattaagggtaaatatgatcttatattttataaaaattatagattaaactttttattatattaaatgacaaaataaatcttgtattttttaaaattataaaatagcgaacttaattttcgataatttttttaatataattaacataaagacaattgctaagtacaaaaaatataagcagttttgtcataaatacatttagatcagattattattaaattttattttgataaaaaatcagttaaaggtcttgtactattttaaaaaatacaaacaaaacagaagatttaattaataatttttacaaaatacagaaaattcaaaataaaatttaccctcaaattaatttttaaatatttctgttagaaaaaacaattaatattttgagcattattattattattatgataattattttgtatatatatattatataaaaaaagatagtgtagtcgtaattagtaaaatggagaagtttttgtaagcgtacggcgatgaataaccatattcatgcaattttctccttcatgatttatggagaggcagattatatgaaccgctgatttcttttcttatgatctgtttgttatctcttcagaaattaattatgatatatatatattttaagagtagaaaaaaacagaaaaatgggtaatggatattttcgaaatggaagccttcccttatccacatcaacctggccacattattgtacacgtggagcttatctacgaaccttgcttttctccgccgtcggctatttttctcagggatgatgtcacagcggtcactccccccttcttcattatccactttccctgaaatgtcaattctaccctttttatgcttatttatttttacccttctatttatgatacatatatattaataataatttctaaaaatctgatattgatggacataaccacaaatgatatgggaaatttgattttttatgcttacatttagttaattttttttttttaaacaaataataa

SEQ ID NO: 311864 - DNA, 786 bp, Cannabis indica
aactttaataaaaaaaattagaaaaaatgagaacgtacaagattaggtatatatatatttattagttttaattaaattcaaaataggatagtaaatttatggtttaaataatatcacatgagaacaatatataataatatatggacctggacctgtgagagagaatagactaactaccctaactaaccggagcagatctcaacaaacgtaactaatttattacttatccctaataacaaatgttcttatcaggagcgtaaaccactcttgagttaaggctaatgtctagaaatatttataaagtaaaaagaataactgatgtaactaatgcatttaatcaatattccataaaaagaacatgtatttgatcaataactcttgtacacctattacataaaagtatacatataggtgaactaaaaactaaacaaaattagtcacacttaggccttaattggttcgaaccatattacaaatttttagtacgtatatttgagtctccacatatattttacttcgacttctagtgctattgaaactcgatctattctggtgctcgcatgatgttgttatcaaaacacagcaggattactaaaaaaatagtctataacattttgctaggttttactttatttttattcttgttgatctgattaaagtacgtacagtcacaaagcctcctcttttttttttttcttttgtaaatcagaaaacagtcacagatcctttgtgtgtggccgcaaatacaaaaacaatagtgattaaaaagaaaaaagaaagaaaaaa

SEQ ID NO: 311865 - DNA, 2826 bp, Cannabis indica
aacctttgtacaccttttccttatgaaggtcaggcttccttggtcgaacaaatcctcccttgtctgaaagtcacgttttgagtggctaaattgtgttcaaatcttggccagccatgtaagctcatcctggctggcctatggactccccttggctagccagacatggtggtacaactctttgacaactctcttaactcctttcgcttgctgcttgatagtttttccatatcttgtaaggagactttatcattctattggcaaggtattacacatgtactctgtcttggcttacatggacatgccacgtcaggtggacaaaagttgggataacattttccccttaagtccctattcaaacatctggtcagatagggacgttccagctctcatcttgcttgtagtagcctttgtcgagcaaccttttctagccaagtattgcctttttgaattgcatgattttagatctttgatcttctctctccatatatgcctcattaactctgctttgatatctcttctttgaaactgtcattgataagtttcaagctttttaagcttttggaaactttttaattctcacgttagattataatctttttggtattttgatccacatgatagttttagaatgcataatgtgttatctcttgatgaaattgaatcaatattggcctttgttgtgattcttaattgtttgattcatgaagaacatgaggcacgtattcaagttttgaaaaaacacacacttggattcaaaactaaccttgcttagccctaggggtctttttctagacttggccagtcctaggattcaatcatgggagttggccagctttagggttcaccctagataacttagccagttcatgcctgggtatggtgaccctggccggttcttggctgagtcatgggaccctggccgaccctcttgaagcttgggaacccttgccggcctaagccttggttccaagcaggtggccaactttttgtcctcttttcacttcagcaagaatcatgtcacgaccttgtaggcatatacaaccttagtgtcatacatggtttccttaaaaactctacatgaaacttaatggtgagtctattatattataatggtcaacttaaaactcaacctttgtccaagctgttacacttgatattatactccactaaaacccaaccttttacagtgaccttatttggcaagtacccttgggtacggttgcccagagttttgtctatggcttggaacttgcaaggaactctgccttttggcttggaacctgccaggaactttgccttgccttagcgcggtatgtgattcctataggaactctgtccggttcttctctagctatacgattctcatgaggctttatccgttttgaactgcacggttcttgcatgtcctcggccttatgcatttgaatctatttttacatatttagccttgaggctttcatgttcttgtttttggcctataggcactttgctttcgaacactactattgcttagcctctaagcatggacacatgattgtcatggctatcttcttaatgccttgacatgtaagtatatgaatttacttttctttatggcaacctgaagtatggctgcacttgaattagaggcaggtttagtagcttatacttagcgttaaaatttctctacacaagttcttcatgctagtttgctattgtatgttgtgggtgcccccaagtgagcacacagacttgcggtctcttggtcacttgcaattcaccaagtttcatagaccttgcttgggaattttcttgggggtgctaccgggtgtatacatgtggaactaaaaaagactaactttacgaagttatctttgttagcaagtagtttagacacaatcggtcttacgtgtcacaaaagcttacaacttagtttctgctttcgaaatcatactttggctactcctgtacggcttactatgcaacgactatcactaaagagtgatgggaggcgatactgaaaagtgataggtattagttcttttatatttggctacctctgcaggggttaccgtgcaaaggccattactgaagagtgatgggaggccatcgctgaagaacaatgggtactagctcttttatggattcatgcatagtgaaatgttagaggaaccaatatacaagttggctagtgagatgacttaccgaaatgttctctactttagtattttggtagaagagccaactctaagtttttgttgtactttctaggcttaaatgcacctttattgttatcttgtaactcgatccaaacctttttcagttgtgtccaagcatgcttgctacaagatcattgttgtaaatgaatacttatcagggattaagtgtcttacgaagaatttctttcctcaatatatttgttgaagggcctgataactctttgtgagaagacatgctgcgttgagttggcctcttatttttcccttttgtgaagggattttacttgcaatatgtggtttacttctcggtcatagtaaaatagaagtgtgagagtagaatgttagcggatcgggctaacccgggtacaaactaggtggccagccatgttggatcattgcctagctgtttggataaagctattgtcgactaacttatggaggtagtggccgaccagcttgttgattccattgttgggttttgtgccctaaataaaacccatttcaatataaccagatttacttattaataaagatcagaaataatattttatgttgcatggttcacatgatttatttcatgattatatatataatgtatgaattccatttaagtctagaacatatgaat

SEQ ID NO: 311866 - DNA, 1218 bp, Cannabis indica
aagatgtcttaaataacaataacatatatgaccaagataaaaaatttgactaaaaatttatttcggatgctaaaacagataagggtatatcaatatatctatttgaagggggtatattgtagaatttttataaaatatataaggttttgtatgtaatcttgtaaaagtatatatttgtaactttgttttttttaacatacagattcctaaaattaacacgacgtattccataaaattatgggtgacaaattatcaataatttttaatgttttatcttattgagttgtaatttttgggctaaagaaagagagtaagtcattttttaatactaaaatttacataattatcgtctactatctagtatttataatgggaataaattaattaaaaaatgtaatggaataaatgaaaaataattggaattaatatttgtaaaatgttatttactaaaattatttgaaaataaaatgatagtgatttatcttgtttactttaacaaaaaaaatgtaattgagatgtttaaattgactaaattacccttttaagttaaactatagtatatgttagttattttgtaaaacatattttaaggaataaaattgtctttataactttaatattaaaaaataaaataaaaataaataaaagtcattgcccttaatgacattccttagaaaattggtgggaaaaattcttcttttcttttcttccttatttaatcaagttctaccttttttaaatttaataaattaaataaacaaatgtaaaggagtaattttcattacttaatagtaaacatgccaaagagtttatgactattaaagggatttttaaaaaatactgaattttgagcaaaaattttcaattttattgtcacatggaatttttttacaaaaatactgtctttttataaaataaccgtaaaataacaaaacagaacaattaaacaatagtggaaacaactaaaaaacaactgtggaacaaccgtaaaaacttaatacaatacatagtatttttgaaaaaaaaaatcactctataataaaaaagtaaaacaattaaaaatttgagctgtaaaaatctttatattaaaagttacaataatttttaatgttttatcttattcagttgtaatttttgggctaatagagaaaaattacgtcactttttactcttttttatatataactagtgagatagcacgtgcttcgcacgtgagtg

SEQ ID NO: 311867 - DNA, 1160 bp, Cannabis indica
tttaaaataatcgatctaatttgtaatacgctcttgtattatgattagttgattacattttttttctattaaattaaatgaagtatatttttttttatatagaaaatatagaaataaaaaaaaaaaagtttaatacgtagctatttcatgtcatctcttccaaaaggaaaaaactatttttggtgattctatttttgcacaatgaatataaatatgtgcttgttattagtgagtggtgtctattattttttataaataatatttcacaataaattagcgatatattttagaatttattttttaaaattatatagaattaaatatttaattacattaataataattttgtaataacaaaaataataataaatatatattgttatatataaaaaataaataataattaaaaaaataagcatatttataattttgcatacgtaattttttcgttattttggcagttggatttgtcggtacgtaattgccaagttcaatttaataatgcaaaatgatacaaaattgatcatttttttttatataaaataataataataataataataataataataaatttcattatttatttattaattttaattgatttttcaataaaaggaaaatgctcggacactagtagaatattcctcttaaatgataagaagttgtgccctagatccgatctaatataatttaaattataaatataaatattctatttttctctttatgggcaaaaatatatacatatatgattttcaataaatttaacaaatacgtgcatattaaattaagcaaaactataatgattatcaatttttttttttaaatggtaaaatgcaactttaataaccatcaaaatccgctaccaaagagggtagcaagtcgaatggaacagactccatatcgaaaatacaaccaggatataatatagaagctcttgcacagttatgagctaccatattagctgatcgcttaacaaataaaacggaaacagttttcaaatcagataacaactttttacactccaaaatgacttgaccaaaggagaaaatcatgtccattgagcttctaagtgcttgaactaccgtaagacaatcggtttccactgtagcatgttgtcacccatgactttttatccaactcaatgcttcccgtat

SEQ ID NO: 311868 - DNA, 1100 bp, Cannabis indica
tagaaaatattaggttttctttgattcaatttttgctgaaaagagagtcttaggtcatcatctgaatcaaattctttaatgttatattcatagggattcattagatttagagttagagctaaacggagtaagatgaaagatccaatgtacttaaaaaagactactcatggttcgaacccctatatggcccgtgagttagtatttttgtcattattttgctttcttaatgaagccaacttatatttcttcaataatgccatttttctggtctagttatttaaatactaatctatttaataattataattaattatcaaataaaattgttgtagtctgatttataaaaaaaattatatacacttatgtgtagtctgaaaccttaataattttctcaaatattattaaaaatatttgttactgtcatttttacactcaaacactttattttatttgttactaaaataccaaatcaaatttttgaaactaggttagaattaaattaattttggttagataagtttatcttaaactttacgcaattcttatgggtttgacctcgttcttcacaatctctaaactacaataaggatttgtgcgcgtgcttgcaagttgataaatgtaaaacttactatttttataccaataagtttttgacgccattaccagaaaactacaagaagaagaaactattttaatccaaattagtacaatttttctactaattatatatattataataattacaaataatttttatattatacatattatatagcaatgtttcttaattgtgaattaattttttttctatatatatacaaattattattattattattattataaatttacaataacttaaaaaaattagaatatattatcattattattataaacttattattatctataattattatatctaataaactttacatattattaattataattaatgttaatatatatacttctattaaatatttaaaaacttagttttaatattttggcacttataatatggtaaacaccaccttctaattttttatttatttataattttctctttatttttagatatatattaatattagtattta

SEQ ID NO: 311869 - DNA, 827 bp, Cannabis indica
tatcatgtagctaaatccagtaaactgaaaaatcatgagaattaaacttttgaacatataatcatgaggtcaagcactccattggcccttcccccacacgctctgcgggaaaacttcccaggaggtcacccatcctagcaattgttttcttgtggcccataacctaagaactccaaagttaagcgtgcttgatctagagtaatcttaggacgagtgacatcttgggaagttttcccagggagcatgtgagtgaggacaaagcatgttagaaacactcgtgttagtttacagggttagtcgtcgtttcaaaaagcaactagagtgacgcacttgtgtataagagccataagtttgtagggaaggcccgatggaggcttgaagcgaaggtgttacactatgtacttctactacagatcaaagttaatcaacctaaaagcttcatcgacaaacgaatgtcataaacacttccctacacgatggggcatgcaacaaaaattcactaaaaccctaaactacatggcaagcttcctatgatttcttctcagaatgtaatgaccccaaaaagtttaaattgcaaacttgaagttaccaatacttatgtaaggaaattacaactagggttatctaattgaggagcctaggcattgcctaaaaatctcaaaagtgcaataacagtttgtcaactactgcctaaaaatcaaacaacctcgatggatcttggggatccatgatgagaactgggggtggtgcatatggatgtagcctcgatcgtactcaaagaagaaggtggagaattttagctggaatattgtgttaggttttatgcc

SEQ ID NO: 311870 - DNA, 1740 bp, Cannabis indica
tttctcagatgggtggccaagcctattgtgccacagatcatagtcagaaatctgagttttattacagttattacaaacagaagtgggaggctctatattagaagacatggaagctgttagcacccttggagcagcaacagagttggaaggttgcacatgaaattgagaggagttaaaagtataaaggccattctggtgtgtcccagtgagaaggatggcttgagtttcctgatccttaacaaagcatttatcagcatgaaactcaaaaaagacattgttatcatgtgcaaaatgagagacactgagtaaattctttgtaatttttggtacatgaggtaaattgttcaagataagggggtgtgaggactgagtttgaatgaaagactgacctatatgttgaatgggcagtccagaaccttcaccaacatagagttgctcctctccctcatattcgatgttggtgttcagattctgcatgttgggagtgcagtgattcgaggcactagaatctggataccagcttatgtcatccatttgtgttgtttgagcaacattttcttaggcattttgagtgttagagccggtgaaaactccagtgaagcttttatcaaaatgatagaagcaatcaagaacggtatgcccaagtttgtgacaaagttggcattgaacacgattcaagggagtgggaaatctattgcctctgctactggaattaaaaccaccacgaccagtagtgctattaaaagaaggcagattagtattgttacctccagtgtgagctcctcgattgttgaatccacggccagaccctcttgaggatgagggagggattctgttttgattgtagaatctgttggtgcgatttggataattctggtatgccatgttgacttcagagtattgatccagatccagatccagatccatagtagcaaggttggcactgagctcagtttctggttcaagatcagtcttttctattcgagattctgaggcaagcaaaagtgctttgatttcagcaactgaatactcttcaacacgagtattagtggagatgatgaatgtgtcatactcaggagacagtcctttgaaaatggcagctatgtggtctctagcgcttagaatttctccaactgaagctagcagatctacatgttgtttaatcttcagaagatattcattcaatgacatagaacctttttgaattttctgcagtttggttcgaaactccaggatcttggaagagacttgcagagtgaagtgtttttccagggcattccaaatctgcctcgctgtgttgcatccaaccatgcgtgttagaaggctttctctcattgaagatagtaaccaggacactaagagttgatcttgaacctcccagtcaagaaaatctgggttgaagatgttcgatgcttgatcatcatcattcaagaatcgaggtggaggagctcgatcttgaatgaatctttgcaatctgtttccacgaattgcagcaagaacctgttgtttccatgagagaaaattgtgatcatttagtctaatagacagattacgattgaaataaactggattgaactcatctaagttatttctcgatcagtttgggttcgaagctccattcagttgattcacagatctgttggtgttggagttgttctgaattgcattagtgttggcaccaacatttgccatgttagctgactatgggggaaataactctgataccatgttaaacctctt

SEQ ID NO: 311871 - DNA, 849 bp, Cannabis indica
attataaaagtatcataatgaagtgataatttttgagacatttttgccttttaaaaattaagtattggtaattttacccttttaactggtcaatatcaataactctctcttgttctctttctctctctgcccaaagtatcaaaaaaaaaatatcatcaaatcgatctttcatttcttcttagttattattattttaccaattatttttgttttatttatttgaaaaataaagatttggttgggacgaatccagaataagcttaagcttttaggatttgttgaagttgtttgaatggaaccccaaaaggtggagtggtgagtggtacaaaataaacatatggacaatttttagtgaattgaagagtaatgaaattcatcaaagaaaatagtggttaagatactccatgagtggtatagcaaagccttcaaagtatgttattttcaaatgctatatataactcaaatttatttattttcaggttgactttactttttggtcctcttggatctggaaaaacaataatgctaaaagcatttgcggcaaaacttgattatgatttaagggtttgtgctattctcttctcatattagtcaacataattaaccttcattatgatgagatgacagtatgtgaaacattggctttttggggcagtgcttgggaattggaacaagttacaacttgctggtagagttgtctagagtaccagatgctgagattgatgccttcatgatcaacctggttattattttggcttgtgtattttatacaagtaataatattgtagattattgatagcttggcccaattgaaaagtccaatttatttagagcccaagggagtagaga

SEQ ID NO: 311872 - DNA, 1776 bp, Cannabis indica
aaaaagatatgtcaaggaaataaaaaatgagcagtcagtttttgctccagaatcatgtaagaaagtcaagaatgaagaacctccaattgtgtttttggaggaagacacaaagcacgtgaggtgtccacacattgacgaactcgtaattacaatccagctcaccaacaaaagaataaaaagcgtgttggtggataatggaagctcagtgaatatcctttataaggatacactgaagaaaatgggattgcaaaatgcaaaattgaaaccttgcatggtgaatctgtgcagatttgacggagataatgtcatcagttaaggcattattgaactcccatcgaccgtaggcgagccacctttatccacaaccttaatggaagattttctaattgttgacctaccatcgccctataatatacttttgggtcgtcctgcactaattggactaggggcagttagttcaattaaacatctatctttaaaattttaaacaccgacaggagtaggtgttgtgcgaggtgaccaactactggctcgtgaatgctattgtatataaatacaaaataaaaaagccagccatcagttaatgggagtcatagcggaggaaggcgagaaacaagatgaggatctagatccttgaattcaagacgaaaggaactagttgaaaccaatcgaggaattggaggaagtttttttagatctagaaaaacccactaagtgtgtatttattgggaaaaatctagatgaaaaactaaaatagcagttaataagttttctgaaggcaaaccaagatcagtttgcctagagccattcagatatgatagggattgaccctaaagttatttgccaccacttgaatatcgagcctaattacccaactaagagataaaaaaggcgaccattggattctaaaagacaaggaacactcaaagaagaagtagacaagttactgactaacaacttgatacgtgaggcattgtaccccttgtggatatctaatcatgtacttatcgcaaaacaaaatggaacttcgagaacttgtatcgacttttcagatttaaacaaagcatgtccaaaggattgctttccactaccaaggatcgactagttggtggacactactggtggacacgagctgatgacattcatggacgcatattatggatataaccagatcaagatgcatgtccctaatcaagagcatacaagtttcgtaaccaacatgagactttcttgttataatgtcatgcctttttgtttgaagaatgctgggacaacgtatcagcgactagtaaatgaaatgtttgaaaagcaaatagggaggaacatggaagtctacatcgatgatatgttggtaaagttggtaaagagtgaagatcaaacaaaagacctcgtagagtgctttgagatactcagaaagtaaaacatgaaactcaacccaaagaagtgttccttttgtctccttagggaagtttttaggattcatagtcaatgtgaggggcattgaagggaatcctaaaaaaaattaaggcttttttagaaatgccatcgcccacaaagccgaaggaagtccaagccttaacaagaagaatggcagctctaaacagattcatcttgaaatcaaccgacaagtgcttaccattcttcaatgtgttgcgaggcaacaaagagtttgaatggacacacgagtgcgaggaagccttcaaaaacataaagaaacatctatcaacacctccagttttggctaaaccagtaactagagagactttactcctctac

SEQ ID NO: 311873 - DNA, 1256 bp, Cannabis indica
attattaaataaatagttttggcgtttaagtggttgaattggaaaaataacatttttgagaaaataagataaattgttgaaaaatggcaaaattgcaaagtgggggcccacatcctatggccagccacttgaagggattttaccatttatttttttaatattttaatgccaaataattcaaatctaaacctaggtggttgcctttaaatagatagtgatggcctcaaatcaaaagatgatgaaaacacttgccttcattcaaaattttgagcaatctactctatgccattcgaacctctcttctctctacttctcttcataatttcaaaccccatagtgatagagtaagtgccccaaattcaagagaaggagatttgggctcagatcttggggatactctgctacagacaggatacaagggttagagatctgagcggaaggagccattatgattccgctgcacccactataaggtttctcaaactttatatgtgtttatttacattgtttcagaaattcatatttaggttgttaaataacatacatggtagtaaatctagatcctggtaaaacatattccaacaatggtcggccagactaagggagcatcgtctggtcatcttgaggagattgtggcaggccaacccatggaggtggtggccggccaggttcctgagcccatggcgagccagcctgatgaggccatggccgaccaactttttagagatcaggtcgatgttacagctcatggtccagacagctcgatcccacctacgcctacacatgattagacactttttctttatctttaatgcttatcttttgcattacttttatgttattgtatggcttgctagctctttacttttgaacagtacttgtatttgggcttaggaccttttattttggacatatgactgaccatgcagtctttaatccttgatttcttcttatttagacatgtaagtatccaaatttacttttttttatgtctaacagaagtatgtcttctgcacttacttaactttcaattttttgcgtatattaatcattaaatttctctgcttaagtttactgtgcttgttcgatgcttgtacggtgtgggtgtcccccaagcgagcaagcagacttatggtctcttggtcccttgcaactcaccaagtttcgtagaccttgcctgtgaattttcttggggggccaattgtatgcttgtggaactgaaaataaataataactttaagaagttatcttgttag

SEQ ID NO: 311874 - DNA, 1729 bp, Cannabis indica
tctcttgatcaataattggctaatacacaaaagaatgccacaattttaggatatatcatgagagctcgcagaattcaatattgacagcacaccaaaatggggctgtgatctggtgcggcatacactattgtttaatttaacagtttctgactaataaggagaaacaaaatctcttgaagaagaacagcatagaagaaaagtaagttaatatttttactgtgatatctcagttgttattcgttcttggtctctagccatgatttttgtaaccattttaataagctaggaagtttgagtgaagtttcaaagagtgtgatagtaacctttatctcagagtcttagacttagttaacatgttaattaatctgattcctttgctaaagtcatatatcaagttcaagttaagatcacatgtttttagaaatttcactttggtttcaaatgattttgattctgcaccacaatttttgtagttctattttgaggtcgttccattccttgtttctgtggacttgttttgtttatatcttcatctttattttggtgatttttgtataggcaatttgaaagaggagagttattgttggatgatagttggctaagagcagcgcaatgggtgatcgtccatatgagtttgggagattggcccatccaaacttgctccctcagtggctttattactgtagaaaagaagagaagctcttggtttatgactttgtggagaatgggagcttggcctttcatcttcattgtaagatcattaattaaatactggctctatatgtgagtatcgcattaccttacatattgttttacatatgttaatttaaaatagaatatgtaaatctaatactaaatcagactaactaattattaatcagtataaagtagtgttagacactataaatgtataaactacaacaatatgacaatcaatatattaagatattatatatgaatgtacctatccatgcatggtatactacttcttgtatataagatttgtttatttaaaatgacaacttaatactaaccatgcagcagttttgactaagttgatatgttaatataaatatgtataggaaatcatcgtaattcaaagcaatcagtgattggccaacgaggcttagaatcataaaaggcacaatgaaaggcttgcaataccagaagatacaattccaaaacaagaagccaacttctacatctgctcatgtgtacacttaaagatgtgactcaatatttatgaattgatgcctgtacaaatttaataactttaaccatttgttatttttatttattagaaaataataatttgttgtacttaaagattatactataatatatatttcaatattattttaccattcatgtcaatatatcattattatataactattttatataattttactaccaaaaactaatactagatagttttattggacattataatttattagtttgtctactaatttttggtagcaaaataattttattggatattaaaagctaataattttactactagaataaaaatgatttgctaccaaaaagttagtagctaaaaaaatagcatcaactatcaaatatttgatagcaaaaaactttcagcgaccatgatacaattaccaatttactaccaaaaaaatttgtagcaaaaaagtattagctaccaaatatagattatttgttactaattttttagtagctaaaacttatatttcttgta

SEQ ID NO: 311875 - DNA, 2137 bp, Cannabis indica
aaggagattaacacagtctgagaaggatgcatgctcaagaaacaatatcgacaaccttttccatgcgacaaagcttggtgagccaaaaagccactggagctcattcatacagacgtttgcagagcaatgcgaactccattacatgatcaaaacaagtaattcattctcttcatcgatgacttttctagaatgacatttttattttatgcaacaaaaattgcaagtctttgatatttttaaaaaatttaaaacccgtgtcgaaaaacaaagaagccactacatcaagacaattagaagtgatagaggaaaataatacacttctaatgaattcaacacattttgtgaaaataaaggcatggagtaccaactcacggttgaatacacaccaggaaaaaatgatccatctaagagaaaaaaaaaagaccatgatgatgctacccaaaaagattttgggcaaaagcaattagcattgcagtctacttgctcaatagatgcccaaccaaagctgtgtagaataagacgttgattgatgcttggagaggatgtaagcctttaccaaaacatcttatagactttggcttcatgtgctacactcacattccaaaccaagaaaagaattttctttggctataataatcaatcaaaaggttattgattctacaacttagaatcaaataagcttataatcaaccaagatgtaaaatttgataaagatgttatatacaattgggagaaagaagaagttgaaagaaagacaatcaatattcctctactgccaagatgacaacctaatcaaaaatgaagtttcaactcaggcaaccatatggaaccaacacatgtttttcactccctaccatactcactagtaaggtgaacaagatcactagctgagatctatgagacatgcaacgtagtgattatggaaccagaaagctttgaagttgcacacaagtaagaagtatggagaaattctatgaatgatgagataaagatgattgagaagaatgagacctacgagcttgtagatcgaccactagacaaagacactttaggagtcaagtaagtctataagacaatgctcgacgtagatagctctatccaaaaacacaaagcaaaactagttgcaaaaggatacgcaacaatgtggagtcaactacaataaaaaaatttctccagttgcttgccttgacacaatcagggcattgattgctctagccgcacagaagaaatggaagattttttaactcgatgtaaagtcgacatttcttagtgtctatcttgaagaagaaatctatgtggagtaacctcaagggttcgtggtgcaagaacaaaacgataattattagattaaaaaattctttatatgggctaaagaaagctctacgagcctggtgaagtagatttgacaactatttaacaaagcaaggatttaagaggagcaagagtgagccaacactctacatcaagactcaaggtatgaatgaaacacttattcactctttatacgttgatgatctcatctacatacgaaataatgaggatatgatcaataaatttaaagaggatatgatgaagaatttcgagatgatctctttataagtcgtaaagatgaagctcaccaaacttagtctacaagaacccttaaaagaattcttataggctagtgccacattatgagcttgagatatagcgggagaagaaccaaaggaatatacgataaatgacaagtccctcagtcgaccctctgttaattggtcgtccattagctagtcatcccttatgtgattgtccctcaactggttctccgtcagctggttgtccctcaactggccatccctcagctagtcatctaaaagctagccttttgtcagctggtcgtcacttaactggccctctgtcagctagccgtcaatcagctggtcatccgtcagctggccctctttcagctggttaaccctaagctgattgtcccacaactggccctaagtcaactgatccgtcccccacctagcccctccaccaattggtcatccctcagctggtcatccctcagccaattgtccattagttaatcctccttcagcttgttgtttgtcaactggccgtccaccagctggtcgtgcctgtcaattggttg

SEQ ID NO: 311876 - DNA, 605 bp, Cannabis indica
aaacttttatatgggccttttaagtggcatttgaaaaattaactccattaatgtaaaagaaaaaaaaaagctcctttctgtttgtctcggcaaagcaagaacctaactgaaactgaaagtgtggaactaacagggctgttgccgaagacgacgactgtggatactttgaaatggttaagacgaagcatcaaaagtccaaacccaagaggcaaactcacgtaagtctctctctcgctcttctcttctcttctcttctccagtccattcatgttcttattaaatgtttatggttttgatcgtacgaaaagaattgttccttcttatgagtttaatgtatactaattttccttttgatttttttactctgctcttaagattttggatttctaattggatcgatgcaattagagttgggttgtggaaatggttactttcatgtaattgattaattgtggatacagaaaaaaatttcaagcctgaatttcatatggcagatattggcgagacgtggaacatggtgatagaagttgtgctagtaggattttggactttgtggtatgatatagttagggcctagaaagcctagtagtactttatttgaagca

SEQ ID NO: 311877 - DNA, 1369 bp, Cannabis indica
gggtcccacatagtttaatataatagcttttagggaatatcgctagccaatcgcgacgtaacatatcaagaaaatgctaagcactactggtaactaatagcaatgctcttatataaatacccctaatttaacttcttttggaaattaaaacttatgctcatttttctatacataataattgtaactatattacttaataattatataattgtagagttttaataattgagtaaatactatatagtgtggatttatataaaaaacccaaaacaataattacataattttttgaaataagtccattatgtgtaattaacacactaaattgaataagcatctggaattacattcaaattagatgcccaatgaaataaaacaaaaccactttaaagggttaattggaaattttcaaagtagacccattaaagggtcgttttagtagaacctcttatttgtttcagcatttaggagagtttttaagttcaattattttcatgattgcatatattgtaactatttaagataacttgtaaactttcaaaaaattcaaaatagtttacagtgctaaaaataagatttaaacagttacttaccacacttataacaaaacagttatgcatacaataaaatatataaatcttatttttggcattgtaaactaattaaaattttctaaaaatttaacagatagtcctaaataactataatgtacacgatcataaaaaaattaaactaaaaatctatcttgtatgtcgaaaaatataaaagatctatcaaaacatctatttagacctatttaagaaattcaatataaacttacccaaaacaataaacccatcatgaaacatagtacaataataattatgcgtatactaaataattatgggaaatttgattttctatacttaaaaaactaaaatattttattcttaaaccaatacattttaaactaacaaaaatatgacacttttctcaaaaccccaaaaataccctcaaactctcacagcatctctctttctctctctatctcggcatcccacaccccaggtccgatggtcggaccatggggtccgaccaatcggacccatcggaccgggcttttttttttttttttcttcattcgatttgagagagacgaagagaaaggggtccgatggtcggaccatggggtccgaccaatcggacccatcggaccggtttctttttttttttttcttcattcgatttgagagagacgaagagagaggggtccgaccatcggacctggggctttttttttttttgtttttcgaactgatggaccaacggtgaagagggggcctgggattcgtgggaccggcggtgacctgggcttcgaccgtcgtttggg

SEQ ID NO: 311878 - DNA, 733 bp, Cannabis indica
aaaaaaaaaaaaaaatcaaaatagatgggattatacaaagctatgctcatacgaacacgcatcttcatatacactttattgaaattaagaatacatcatcttcagactaactaatcagatgaagataaacaataccattcgaaatacaaagtatatttctgaaacgaacaaagcaatattatatcatggcgtgggaataattgaaaaaccagtactaaccattactgttcaaaaaataaataaaagaaaacagaaatcgaatgagagaaaccacacaattatgaatcgggaaaaagaaatctctacataattacaacgaaatatagacccttcgtttcatgtcgactccttagattcctcaaatcaaaccaaaaaaaattatatatagcaaaaaaacaatcagaaatgaagaaaagatgcaacgaatcaaagacccattgttccgaaacaaatcctcattatcagcgccccagattcatacctgcgagtgaagtaaagattgtttatcaaaccaatctaaacggaattcctcttctccgatttagagagagatttgattaagttggagacgggggttatggtaaccctgagaaagagaaagggtttgagagtaagactataaaccctaaagaaataggaagatatgaaaccctaataataaaatgggtttgggcttatgattatactgagttgggcttcttcaaaaaatacatgcgaccaggtcatggatata

SEQ ID NO: 311879 - DNA, 978 bp, Cannabis indica
tgtgtgtggggggcgggggcttgcatgcgaactgtgtgtgcatgtgggggtgttgagtgatgtgtgtgagtgtgagggctcgcatgcgagttgtgcatacaagtgtgtgagagaggttactcaggggttataagcataaaatgaggggtaagtacacatcaacaaggatgatgtcgggcaaggactcaagggacaaggcatgtaagggaaagcgtacaaccatgccttttgaagcctttgaatgcgaggaagtatgagtagcagcgacaatagaccagcaaggtctaaggacccgacgtcatccagggatcactctcctgcaatcggggaccactagcctgcatccagggaccacctgataccagaaaaaagtacgaggtgtaaggccacctccaatacctgtggcctacagcttgaaagcaacgttttgtcccctagggaccaccttgcatcccaagtcgttagagcctatcatatgtgaaaggggttggaaaatcacttggtgtaactcagatcttaaattaaatagagagcaatattcatagatcttttcacctttattttcattacatttgagggtacctttgtgttttccaaccactaacttagttgacgagttcttaccgtcaacaaaaagacaaagaatttttacgtggtttaaatattaatgaaccctagtacacgagacagtcttttagcctctaagggcagtgtttgtgtgtttacagtattgttgtaggaaaccctaactctttaccctaaatttctcttgaagaagaagacctagagtagtatcggtagagtttgtgctatgaaagttgttctctgtcctttcgtatgagaatggaggggtatttataggttaattggtggatatggactagggccggcaaactgggtcagacacgatgacacgactcgaaacccgcacgagagttagcgggtttgggtttgccttaaatgttgggttttatgccc

SEQ ID NO: 311880 - DNA, 3083 bp, Cannabis indica
aacatctaataatttgttattttttttatttaaaaaaaagtcacccaataatttctcataaatcaacaattctgttatatagccatagaatatatattgtgtgaattgtgtttgcgttttattattgagatattttttaaatttaaaaaaaataaagaaaatatgtttagttatagaattatagaatgtcatgttgtaagtttttgaagatgtggagatttcgaaagatttttgaaaaatgattaaatctcagagctaagtttttcttcttttttcgattattattttaatattttattttttaattttatttattattatttagaaagaagatatattcttacctctatttattttattgtgtgtttttcaggttgttcatcatgttgcaatttgctaatgttagagttggaggaaaaatttgttggggcccaaactatctttgagcagaatttgtggatccatcttcgtctccattttattttaaagtgtttgcttgtctagcgttgaatgttttctccaatcattatattattttgttttttcaagttggctatccaattttcctgaagtatccctagtccatgtcatctcatggattagttgtgcatacactcatagtggattagaaacttgtttgatgggtttggtccatcttttttgtacactctatttatttattttaatgatatgttcattattcaaaaaaaaattattaattttattttattttaaataaaaaatatattagttttttttatttattgtggtaattaaaatcatatatgatttgtttaaaaaaagaaatcatacatgattaatgatgcaacaatctacaatcagcgatggcacctcctcgaattaggatagctcatcatctacaatcagcgatggcacctcctcgaattaggatagctcatcatctaaccgaaaggcatgctataacaccctacttgcttaggtacgctgcagtatttttctacttactgtggacacctttgctaatcaaagggtttcttgaaaatcatgtcaatttaaatttttatttaaacttttataaatatataactatttataaaaactgggatctcgtttgtaaagtttactacattactcaatatacattttacaaaattgtccctctacgactacaaaatgaaggcccaagtcgtctctagaccaaattctccaggtttaatcatcctgatatgtataataatcctcaatcccaagactcattggtgttcgacctttgtcttatccttacttacacatgtaaacaatatctgtgagtcgacagactcagtaagaaaaacatataacgtataaaaggcttcacagatgatcaagaacattcataacagaagtacaacctctgtaccacatgcactaagtactcatcctgtactagtactggtagggctgaattgtaccttgagtaccattaagtgttataccacatgcactacgtactcgtctcgtactagtgttggtaatacttgatcgtactctttgaacatcatatattgtaccaatgcacttcgtaccgctaccgtactggtgttggtagtatacgaatcacattacacagcatgcaatttacatacatacacatatacatatacatatacatatatatatacatatacatatacatatacatgttttatactaatcttacctcatttcctaatttaagtgttttggtcaacctgaatagaaattcacgtgctgaacggaggtcccatgtcataatgcaaaactaataagtgtttactctagaacacttctctaatacccaaatagaacctagggtttttctaccaaactataaagtcaaaacactcttaaataaatacataattcgactctaaattatattccatatggtagagctcttcgcaagctttaaaatggtgtatagaacgtctaaaacagacatttgagtgaaaagttatggccaaaatacaaaaactgctctccttggtaaagtcctcaatggaagtctcccattctggaagctctcgaattctagaagctcaccaattctagaagctctcccattttggaagctcacccattccggagctcaccaatccagaagctcatcaatttcggaagctctcctttggaggctcaccaattctagaagctcttactgggcaacaagggctagaaaattctcaatttttaagcccccaaaactagctcccaacctaaccaaaaactaccaaactttccagaatagtaatttggagtattctaaacataacccacaattcaaaagcatctaaaacaacatgcaatgaaattcaccatgaatgagcaaagcttgagttcacaaaactcaaacttcctcaaatctttctacagctactactacttccaaaaacaagtcataaataactaaaatcaagctttaaaatagtctctaacacaaatcaatctcaaataaaactaaactctctaaattcctaaaatcataaaatagaaccaagcttaaaacttcaaaaacaacaaagaataaagtatcaagggcttacctttgatcttggcttaaggtttctcctcaatccttcctaacaatggcttgaatttggtagcctaacctctggtttttccttggttcaaagagggtcacgagaaagagaaagagaaggataaggtttatttaattttcttattttctataaatgaataaaacccttaattccatttgttttactttagttgcacaaattagaataagtgagattattctacaatatcccactaaaagacaacatctaaataaatagtaaaattctaattttgcttttacttcacccttaagaaatcttaaggcttagggataaaatggtccacaactataatcctgcctaaaacttaaaaatttcaaataccacttataatggtctcaataaaacaaaggttccaaactaacctgtgtgactctaatggctatctgtcacattttctatcattactgtgcaaaaatcatacaaataataaatttcacatgcaacataaataatacacttagagtttaataaaatctccgaaattgagaaattataacccta

SEQ ID NO: 311881 - DNA, 2998 bp, Cannabis indica
atattttaatagttgccgaaaatctcggtcaacaccttttgttattaataaaaatggtattcaatgcaaggaatgcaaagggtataatcatatttaatcgaaatgtgctaataccttgatgaaaaataaaaagggcttcaatgttacttggagtcatgattctgaaagtagtgaggatgaaaatgaaaaagttacattaacaagtattttgtcaagggatttgctagaaaaaggaaaaatcaaatgtttgaacaatacattgactgatgacaatgacaaagaagttggatcagattcagatgagtcagaacttgatgagaactctttggcagaatcgtataaggtaatatttggtaagtggttagaaatctatgctgaaaattattctttagttaaaatcaataaagatttgtctcacaacatcagagagcttgaagagaaaaataaatgttgtgaatctgaattgatttcaaaaaattatttttataactaagaaacttgaaaatcttaaaagaaatatcaaaaatgctaaatccaagttccaatatttttgaaaaaattcaaaattttggtcaaacaagtcatgttggtttgggttttgttaaggcttaatctaaatcaaataccaaatttgttagattagaagattttgttcctagatgttctgtttctaccttgcatggttctattgattcaataaaatacattgttgatacagataaagcagcatggtaagatagataatttcaaagggaatagaagacgattcattcctatttactatttttgtggaataaaagctcatattcaacctaaatgtgttacaatgtaaaacatattttattataattattttagaaataaatatatttctcaaaaacaaaaataggatgtcaaaaataaatacttggttggttcattctgttttaaagctattgcttctcacatgtggtattttgacagtggttgtttcagacacatgacaggtgaaaaaaactatcttgacaacattagaccaatgcagtgtggagaagttaccttcggtaacggtctagttaaaagagtgataggaatgggaactctcaacattgaaggtcttcctagacttaagaatgtcatgttggttgaagggctaaaggctaatcttctttgtattagccaaatttgtgatcagggttacactgttaactttgatagtaactattgttatatttataatatctgtgatgaaattttcttgcaaggactcagatctagttataattgttacactctcactacctatgctacttgtcattctattgatttatggcataaaaaacttagacatattaatttcaaaattttaaaaagattgacaaatacagaaattgtttgaggattacctatattaggtaaaaaaaaattgtgggaaaatgtggaccatgtcagtttggtaaacaatcaaaaatttctcacaaaagtgttcctaatgtcaatacttctagagtccttaaacttcttcacatggatttaatgggatcaatctaggttgaaatatttaatggtaagagatatatttttgtgtgtgttgatgatttttctcgttttttatgggtagattttttgagagaaaagtctaacacttttaaggctttcaaatctttatgtttgaaattaatagttgaaaaagattgcaacatcggtaagattgttcgtattaagaatgatcatggaaaagaatttgaaaatactgtatatgatgatttttgtaaatctaatggtatttctcatgaatttttttctcctaaaactcctgaacaaaaaggaatagttgaaagaaagaactgaattctaacataaatggctagagtgatgttaaatagtaagaagcttactaggcatctttgggccgaagcaatcaacattgcttgctatactatcaatagagtgttcttacgtctaggtactcacaagacaccatatgaaatttggaaaggtaagaaacaaaatgtaagtcattttcatgtatttagttgtgtttgttatattttgagaggtcgtgattacaatggaaaatttgatgaaaaaagtgatgaaggtattttataggatattccattaatagtagggcttatcatgtgtaaaacatgagaacccaaactgtaatagaatatgctaatgttgttgttgatgatctaaaggatttctctggtttttaataaaagaatagattgaagagttgtggaaacaccttttgtcgtgacaaaggaaattgacagagccacagaagttgttgctaagaatcatcgcaggactctgtagctacagatgttgtttttctagaatcttcaatagaaaaaaatttaagtgtccttcaaatatgatcactgatccaatctggaggaaactatcctcaagggttaaaaagaaccatccttctgatctcgtccttggtaacttggatgaaatcatggtaacaagaagaaaaattgctaatataatttaattcttgtgttttgtttcttctttagagttgaaaactattaaagaagccttgatggatgaagattggttcttagcaatgcaagaagagctacatcagttcattcaaaacaatgtgtggacaatgattccaagaccgctgtttgtgaatatcattagaacgaattggattttcaaaaacaagtgtgatgattttggcactatcatttgaaacaaagcaagattggttgcccaaggatacactcagattgaggttattgattttgataaaacttttgctctggtagcaagactggaatccattaggttaattctttccatagcttatattcttggctttaaattgtatcaaatagatgttaaatctgccttcttgaatggttttttttttttgaaagaagaagggtatgttgaacaacccaaagggtttgaggatcctcattatcacgatcatgtatataggttagacaaggctttgtatgttagactttttatttgggcttacattaaattt

SEQ ID NO: 311882 - DNA, 2495 bp, Cannabis indica
ttctacttttaacactttcaatgattctttttcaaagtatactcaatcgtgttaattttttagaccacaaaactacattgagagttctatacaaatggtacactaaggaagccaagataactgaaaaaaagctcactacaagaaatgagacttttgccagtatatttttatgctgacaaaagttgggtattccgctggcaaaatatattctactttaatttacattggtattgaaacttttgccagcataaaacaaaaagtattggcaaaaatgactttttccagagcgtatatgcactggtaaaagttagacttttgccagcgcaaatgtatgcttgcaaaagtctaacttttacaagcaaaaatatacgctgggaaaagttttacttttacccacacttaacgcactaagaaaagtcacttttgatagatggatatttgactttttccaacacaataatgagttggtaaaactttgtaatttatttaatttcaatttttatcagttattttaaaattaaaaaataggaaagcttcattataaataattaagcaataaacatatttttaattgttctaattatacatttataatataattataattgtctaaaagttagtaaataaacatagattaaaataccaacataaacataattttctcaactaaattaataaaatactactacaaattggttgcatcatcatcaatatcatcattgctaaagccatcattatctaccacctctgacctgactaggtccagcatcatcaaactgcagtggcaggaagtctatctaaaatcccaaaatactcgcactcaattgcaaactttatttctacaacaccaacctaagatatagcagtgcacaatagttaattgattgtccataacatatgatgtaatacaaatttatatacagggccggtcctaaggtatatggggcctatgacgaaatcaaattttggggcccctacatatatagtttaactattataaaaattatagttctaatgcttagtttaatggtaaagcttttaaaaactcttaagagctctaaggttcaatccctcataagtcataactacacattaaatatttttttaaaaaaaataaaatgtaaaggttaggaattgatcccatgacctcatagagggaagttaaacattttaccactacaccaaataatttttattatattttcttcttatttaaaattttatctagatattaatattttttttttcacaatttcgggaccttgagcgttcgggggcccgaggcgcacgcctagcctgcctaccctcaggagcggccctgtttatataataaactaaagttataaagtaatattacttcataagttacacaaagaagacaattaaaaacaatacaagttatacctactttactttacttgttttaatttttacctttgtttctatattatttaagatatacctacttttatagatgataccctcattatacccttaggttaatgtaaattatatgctaaacttaagtgcagggtgagagtattgggcaatccagtcacaaaattggatatatcttaataaaatatcatataaagatatttttgattaatggacacaaaaaaagtggtatttctcaacttatcctaaaaatattagaattgggccatagtttgtatttagattgggccataattagtatttgaagtgggctttacaaaatatgtatatacatattttatctaattatttattggagataaagatctgattgttacaatttaattaagattgataaattatttttagtgagcaattacggatagataaatgataaaagagaattaattaggttggagaccatttttgtctgttgtgggccttgtgattataggtggaaatagatagggataattacaccacatactgaaattgttaatttttttacttttatactgtggggcggaatttttttcaaaaatactgtgtaagtttcatactatatactgtgttaaattttcattgttgttttacggttattttttagctgttctactgttatttttaactgttttgttttgttgttttacagttgttttataaaaagatagtacttttgtaaaaaaatccgtgtgacagtaaaattgtaaactttgaccccaaatctagtatttttgtaacaattccaataaataagagcttgagagaaactatatatataggatgattattttgaaaatgaaagtttagtaactatttaattagttttattgatagcttaaccatggttagtttttagtaccattgcatggttaagcgtaggggtgttcgcggtgcgggtggtgtggtttttgaccattttttcaaaccaacccgcacatgcagtttttctaatttcccaaaccgcacccgcaccgcgaaactaaaaaaccgcaaaaaccgcaccgcaaaaataggtgcggtgcggtgcggtgcggtgcggtgcggtttttgcagtt

SEQ ID NO: 311883 - DNA, 1109 bp, Cannabis indica
caatacgcattgataatttattagcgtttagagatgagaattaatattttagatcttaagatttttttctttaatcttatgtgttaaatatatattaaatcaattaatatatattttaaataaaatatatcaaacatataaaattataaatgtattttaaaaatatataaatataattagatgataattggatcggtttggtaggttatccattgaatcggatgtcccatctaacaaccgatccgatccgattggattttcaaaatttacatctaatccaatccaattatgattagatatccgatcctataggatcgtttgggattggatcggtcggttgtaattgaattggatgagtttctgcacacccctaggccatacaggccttgtacaaggcttttgagttgttccacctgtggttgcactacaggatcaacttttgtcgtcctttgtctatccaactcctctcttgggttgacaaggggttggtcatatgggtcgacaagaattgacctatcttgtgcccttggttgatcattttggggcgggatgtatccgtcttgattatttcttctgcgatttaagttattccaaagatcttctcctactcgggggcccattttatcaaacacagaattcttgggccttaggtcagaatgtgtttgagcattctggggaagaacgtcgttattacacccagtgttattatgagttctctagttggtgaacccattaatagggtggctagttgcaccatcctcattgaggttggggtaagattccccactacgagacctaatttaaccttgcctaggtgggatatcttccatccttcattcatctctaggaaaatcttggaactagtcagtcctactgtatgtcctttcgggcaagatatgtttatcattcgaccgtatgggaggcatgcttatttgggaagcatttgggcccactgggcgtgaggctttcccatgatccctagggtgtttagttttttctggcacaaaagggtgttggaaatattttaccaggatctagatttactaacaagtatgtttcattaacaccctaatatgaattctaaaacaatgaaataaacacataagagt

SEQ ID NO: 311884 - DNA, 1259 bp, Cannabis indica
attttttacttttttactgtattttttttataagtttcatactgcagtatactgtgttaagtttcaatggtgtttattggtgttttttagctgttctactgttgttttgagttgttctgttttgtgttttactggtgttttataaaaacacagtatttttgaaaacttttccgtgtgacagtatttttgtaaaagttaactcaaattccagtatttttgtaagtttcccaatataaatcaaaacttttgaattcaactcatgatgtacaatttcaagagtcgtaaccaaatttaaaatggttgagctgaatataaaatggaacatatttcggtacagcaattgtaaaattggtctcaaagttaaagattgaattgaaagaaaccctaacctcaatgaaaatggaagaaaactctaatttgaatcagttagggtaccaacctaagtccttagaagaatagacaacttgaacgtaagtgttcattagtataatacattttgggaggatactcaaagataatccgtgagggcttagatccaaatcggataatatcatgctaatataagagttaaggtgagcttttagtccaacaaagtgaaagaacaaggcccaactaatgacattatagctaaagtttcatgagttgggctataatgggctacatttgcgttgtgtgagagaaaccctcaatatgaccttatgattcaatatactgaattaatggtgtcttgcatcaaaagtctacatgatattatggtggttagacgacgtatcccgttggtgattacagcagtcccagatggaaatttacgtttagtgccttctgtcgaaggtcttcataacaatgttaatgttcagacgacaaaatctattggtgattacattagtacaagagggtttcgctggaggggaggccacaagtacgtggtttgagggaataattattggcgtaccaacccaagtcctacattagaataatatataaattttttttttgaatataaatgttcacctactccatcagtatgagtcattttgagaaaatatctaaattcaaagctgatagcctgataatattatgctagacttctccaataatccttaattggttagtgagtaaaaaataaaataactaaaccttgaataatgtacatccaatattacacatttttctttcaatcaatataaaaaatgagtttttatttttatattttaaaactagtttttttttttttttttatttttttttttttttcgttt

SEQ ID NO: 311885 - DNA, 873 bp, Cannabis indica
ataatttatatgtgtaaaataaatagttttaaccttagttttgtattgtaaatttattacaaaaagcaagtttttaccaacacatttttgtgttggtaaaagttgggtattgcggtagaaaataaaattctttttaccaatgcatttttacgctcacaaaagaagtttataaatcagcgttggtactaaaaatgttacacgcgcaaaaagaaaagcgccagtaaaaatgattattattactgatgtactattgcgttaggcagtggcggaactatgttgatggatgctggggccatggcacccctaatttcaactttgtggtttatatacaattaaatgtataatattcttttcagtaaaaaaatatatatggcattaattattgtacatatatttaaaagttaattatttgaagtttttatattattctttctaaaaatttattacttggcaaatttgaataggtcagcaattatttaaattatcttagactagtccattttgttatgtaatataactttaaatactattttttaaatactattgtttattttatttttttttaaataataaaaattaaaaattctttttttttttaattttaattttaagtatttaaaacaaatcaaaaccaaaaattactactatataattataagaagaaatacgaaatcttttaggaagaatcaatgagaaattcttaaaggggtattttggtagaccccttatctatttaggtattcacgagagctttttaagtctattttttttttatgtatagtgtacattgtagatatttaggatcacttgtaaatttttaaaattttaaattagtttgtattgtcgaaataaagttcaaacagttatttacta

SEQ ID NO: 311886 - DNA, 1778 bp, Cannabis indica
acattcttgttagtaaatctagattctggtaaaatattcccaacagtttggacatgcaaatcagtcaccatgggatctgtagaatcaataggttgagttcttcgaattgttactgccatttgaattaaacataatcaatccaattgtgttcttgagttttgctctcaaagaaagcaccaaaatattgacctcacttttggccaacaacactaagttctaaaagcgataaggaatcaataagattcacagagaatataattaatattaagagaaactaagaacatgatatattatagaggtttatccccatttttcggtaatagtttacttccctttttgttgtatttaacttatgagtagagaagcaaaaatggcttgatctccctcgaaagctttacaaagaaaatgagcagagtaatagctctcccaaataaatgatttcagatcccattacaatggaattgctctactattaataggagaagtttacaacaaatattggttttccaaaagctgttagtccacgaaaatagggaataaatgactttcctaaatcaggagaaatatatatgtggaattccctttaaattaggatttgattacatataaaatgaagaactatattaaatatattctgtcacgcgttttccccttggttggttcgtatgaggttcagaccgcttctctccaatcaggtcagcttatgcttattttatgcggtaaactatacttggtcatctattattacatccgattgagtgtatatcttgggcagacattttgtgaggctcttttctctgcccaaactttgatgcgatgatacaggtcacacgaagaaatgtgctacgtcatccggattaaattcaggataacaaatagtattttcatggtcataagaatcagatggtgcgccaatatctagtgggtgtctttgatggaagaagagtgaagataaaatctttcctcgagtctggcactagggtcaagtctgagtccgggtccaatgtctatgtttgggtttgggtccagataggggtacgggttttaggtctggggtttagtttcaggtcagggttagggtctggggctcgacaccgacactgggaccgaggtttgggtccaaggtggggatggggctggggtctaggtccaggtctggggttggggtctgaatcttggtctagggtcggggtttgggtctaggtcggggttggggtctggggttggggtttgggttcggggttcgggtctggtgtttgggtttgggtccacagtctgggtccgagtctgagtcggggttcggattcagggtcggggtccgagtctgagtcagggtttgggttcggggtcggggttcgagttcgggttgacgcttgagtttgggtctgggtcggtgtcggagtctgggttccaaggtctaggttggggttagagtctaaaatattgactatgaaaaaaaaaactgtttgaaaaaattttgaaagtaatttttttttgttttcaaaattttcaaaatttgattctgaatttaaaaattgaaaagtgaaaacaattttatagaatataattttggaaaaataattttacttttctaatttaaaggacaaaaatttaattaaaaaagtgttaagagacgctccctaaaacattcaacaattaaatttttgagttttttcagtattatacctaaaattaatgttatttacaaaaatacttttaaaaaaattatttgcacaaataccaatgtagcatgtcagcatacatatcgaaattcaaaa

SEQ ID NO: 311887 - DNA, 2623 bp, Cannabis indica
tttacccccaagcctcatttagtcaagaataaatgaggcttgtttggtgcctctggttggcttattggtttaatggcacatccttcaagcgcgtggcttgcatttatgatggccatcattaatattgatttccttttgcaggcaacgatttgcttcccatccattgagaaatcgacgcatttaatccgagtgtctgtaaagtactcaaatgttttcaactgccctggcgtccatttgtctccaccgtaggatttgtagaatgcgaatcgattacaattcccaccgtacgatggcgcctgatcacagcagccttgcaccctttctggtctataaaagccatcctttttacttcactgggttactttcaccacttcgtcatttcgccccaagaacaccttcgagaaaaattttagaaactatagattttttactgctattcctccgacgttgccaatcagcattctaccgtcgatcactaccagcccccaattcacaacctttgtgtaagttttctgggtactttatacttttgttgttcacttgcatgctagggtagaatttttttttggttaagtgttgatttctaggaaatgactttgacaaaaactatcgtgtggtgtatacatcctcttttatttgtgttgtgctactttctttctcttttaatttgcaatcaacctttctattgcgagattgcttcagaatatgagacagctttcgtgcccgtgttctgtttcttttatttttcctttccttttcctctacttttgttgcctttgagagatgtgcactcgatgtttgcctaggggaatccctggaatttccatgtttggcaagcatccggagggggcctctttctaacggttagaccccattccctcttttcatattagggtttggtttgggggctaactgctggattttccttttttctgaattttattattcttcaagaatttctgtctctacatccgaagctaaatcctcaaaccaaggcgcggttacccaagccaccttggaagaagtgatgaagggacccgttgtccaggagaagtacacgtgtcgatccaacagttgggaggcggatgagcttcactcaaccttgacctgcacccatcaattggagaagatcgtgattgtggccgggatgaagccttccgcctcttgggtcttccaccgcttgccctaggacgaggagacgcccaatcgtaactgcggtggttttggagcttggagccagacccacctgatatccggagccatgcttccacttcaggactactttataaattttcaagtttttgttggccttgcgccttatcaacttattccccaagcataccgcctgctttcaggcttgtacattttttatgtagccagaggctgggcttcacctagcccaatcgagattttatacttttacgaacttgtgtctgtccccaagaagggggataggcttaaagacagttttttcacactctgggcccatcctgctaatgagggtctggttccttttaatttttaaaagaatgtaaaagagcaccgtcaccgatttttcttttcttctggcttctaagtcgtggaacgccctgaattgctcacggagtgggttagggttcctccgatgcaccgcaccgcccctacccaactcttcctccagcacgccaaggtcttctccacatatgacaaggacggactgaatgtgggggacttagtcacatctgcaaactgcaggagggataagctcatcacacagagccagtctgtggatgatttcaacttatccaaggttctttgtcccaacattctcagtccagactctgaaaaggcactccgggcagacattattgcctcagcagaagaccggtaccaaaaatacctctttaggagggtgctagagttggcttatattaaggctcaggccgctgccaggagggcccttcggatagaacctggtaaagagcgggcaccttcccggcctaagctgtcgttcccggttcctaacacttgggctcctggcgcaagcacctctagatcaggtaagtctcccttagttgttcatcatgtcccttctgctcaagattattctcgatgtaggcgtatagagtttgatgaacgtctttatagatttagaatgcccctacctgatggggcgatcatgccaagagttttcatttttccaacttaggtcatgttttaggccggtcccggatggggtccagaccccctagacatatccctctggaccattcagcctacctgttgtaatatcccgataagactaatggtaaataattagagtttatatttatactatgggttaattaggtaattagtgggattatgatcttactaatctatttcagtataaaattaaaattttgctataaatgagtaaataagcgtaatttgttaattacagatatttatttaaaatacatggatataatatgagttatttgtgaaataaaaatattttcatgttcggcgaccttggagacccgattggaggccaaaaatgtcacaccagttttagttggaaatattgataggattattaaaataagttgattttagaaatatcatggtattttagggtactcgaaattggccaaatacctta

SEQ ID NO: 311888 - DNA, 2475 bp, Cannabis indica
tcaaaatatataaaatactaaaatactaaaaacaggttcttccatcaaagtaagcaaaaatcaaatcaaatcaaatcaggtatgaaataccacacaatcttcttctttttttctttacaatctttacatagcaatactcttatatatacagagatatatcctccatgaaatatatattcaataataataataaattcttttaaaaaaatattattattttatttttaaaaagatatatttagggttagtagtacatataaatgataaattgtgtatgttgattgataattttatagtgttatgataggctgaattgctcaaataaattatttaattgattgtgttgttctgatattttgattttatagtttattttttttgattagtcctactatataaaggcctaaattttagattttaatgtatagtgaataaactatatatagtaggactaatccacttctaatatgcttgtggttgatttgtgtaataataaaaattagtgtaaatgtcctataatttttataaaccgattttattgggttggctcattcatactgcgcggtctcaagaatttagtattgggtggtttcaatgagtagatttgaaataccacattttatttttatgatttaactaatagtgtgaaacataatatttgtaggttttcacaaggaagtggatacttttttttaaaaaaaaatgggagcaaactataacactgtgactttcaacactacattcgaaaatatgagtgtgggatattaccaaacgttcattcaatctctacgaagagaattgtttagcggaactacaagctatgacataccgttattgcgtacaaaatcaacagcaatcaaagacaaacaatttgtgtatgtgaaacttttcaatcaaagtttcacaatcacatttgcaatatcaactctcaactcgtatgtgattggctatcaagtagacgcagaaaggcgttgttacttctttaaagaagctcctgaatcgaaaacttcactttttagagaaagtactcgaagagtcgatgttgatctcaaaacaaattatgatattttaggaaatagagagaatgttaatttgggatttaagtcgttaaataagtctctcgaaaaatttagaaattttgatagcgagaatcctactgaagagcttcgtcataatcttatacttgttatccaaatgattgccgaggctgcgagatccaaaatatattcaacaaaaattggaggtgaaaggctttgaagctggatttttccctaaagctgatattattagctatgagaataaatgggaagatctttctaaagctatccaaaattctaaaaatggaacatttcctaaaattcaactacaaaatgaagattatagtatttattatgtgtctacagtggcagaagtgaaaaaggacttggccttcttgttgaatattgcaccataagcaaattatgaagttttattgtctaaatttccggaagcagtcttatgtgattggcgttaagaatttagtaactcataatttgacaaagcatgcttttcggttagacaatgagctatcataattcgaggagggtcctgccttgattacgaatatctgcattacaaagttatgagtgattctaatcactatgttaaaaaaaattatgaagctttgtctaagattttagttaatattatcaatgttgccaaaaaataaatgacatcaatcttttgatgatgtcctatgtattttattatgcatgtgtggtttttttctgtaatgtttctcttcaattatcatctctattttgttcaataataataattcagatcaaactgatataacgagcttgattttagtaaaattgtttttcatgtgtaaccactaagaactttatttggacataattttttttttgattgaattcttttcttgatcatatatacaacttattggctattcatttccaatctctcttctactgatgatttaacaacaaatgcagtaaaattagactcatgtctctactttctccatatctttatgaatgaagatcatcttctccaaaaatttattgtgtgaagtaggctaagaattagtaaaatgaatatgataattatatatattatagctatataatatatttgtggtgaatcctcaccctcaaaacaagttgttacagcagtaacaatgttcaagaaacacaaatcaaaactaaaaccaatcacaaaacctaaacttgaacttaaatgaaataagacaaagaaaacttaactcaataatggatgaatgatggatctttattgaataggaatagtcagtagtacacaacagattgagcccaagattacaactcaacacagtaagtaattacaaagaaatgcctcacattttgagagaaatcacttcaagagtgatactctctttttacatccatccacacacactcactatgatcttggactctctctctctaaactgaa

SEQ ID NO: 311889 - DNA, 1488 bp, Cannabis indica
ttacaatttcattagagagatactttccccaattttgaacactatttttgccagagaatgattatggccattgccctgctttggtatcgatctatcttgatttctccattaggaagaagccttttcgattcatttctacgtggatagaggctaaggagtttaaggtatttattttgtcgtgttgggagcattggttcaaggtgctcctatgtaaaagcttgtgcctaagctaaattttttgaagcaagagcttaaaaagctcaatggctggagttgttttagtgatattgatgcgcttggaatgctcgagccttagagatttttcaagatgtttaggctagattacatccagatgttaattcatgtgttgaattatgacttgattagagatgaaaaagctactcggttgagaccgttatctttcaactcataaagcttttcaattgtttatgagtcaaaaagctaaaatggattggatttgtgatggtgatgaaaataccaaaaaaaaaaaacataaaagcttaaaggctagaagattgcaaaataatgtgttgacgtaaaaatttggacacagatttctgagccacacccgctcgttagattagccaaaataaactataaggtaattatatatatgagagacacaaagatttatagtagttcacttcctgtatcgcgatagtaatgaagttaggtctacttcgagttttatttctcacgagatggattacagaaaaatagctaagtttggatactctaatttctagagagataaactagagagagatgctctgaccttaagggtatttttttaacataaaaaatgagcttgtggagctctcattttttagagaaggaggtcccatcaaaatgacaataaaataatccaataaaatgtagaaaaatacatttaggctatttttaaccgttgatgatgatttaatggtaaaattgactctagaggttggttgttaatttttggagcttgagtcgcgttcgtaggacccacttcgggtaagctgcagtttacacttataactttcttgagggtaagattttgagtcaataacttcagaattgagattgtagtatgagacctaacttgatagagcaatgaaatacttaaaactccaagttgaatcgcgttaatcagattaatattgagtgagttatggccattttactaaagactgttgagggcccaacgcccatgttgacatccagtgcccaagttggcatgtgacattaacctagaagttggttaagttggaaaacgtgtcggcaatgtaattttttatgcctgagtgatattttaacatcacttagcaaatttttgcgttttggtgaaaccggttaccagttctcaaagattttgttttgtagaaacgggagactcaaaactctcgatttctaagtaagtcactttcccaaataagtgaaaatataaagttgttattaatgttggaatatattttaccaggacctaaa

SEQ ID NO: 311890 - DNA, 1884 bp, Cannabis indica
aaaagcattagtatctccaatagagaaagaaaaaaactttctagccgaatcaaggtgatggcgatcccaaagagcatgatgagttgtctctaattcattagaacacattaggcaaagattatcattgagaaactagagggagatgctcagtagatggtattatagaaaaaggttaagtatcagaagctccaatttctagagagagaatttatgaccttgtgtgtagttttttgaatgtgaaaaatgagctaatggaactctcattttataaggtaaaagaggcccacaaaaataggaaaaaaatacaaataagttattttccaccgttgatgatgatcgaacaacgaaaattaacttttgtggtgatggccaatttttagtgcctggcgagtcccaatacgggttacccaaaatttattttcgtaactctcttagggtgaattttgatgacaatagcttcaaaattgcgactagagtgtgagacatgacttgatagagcatttaaatatctttaaaatgcaagttgaatcacatcaatcaaataaaaattgagtgagttatggccattttactaaagtcagttcaggtcccaccacccaggttgacatatgacgttaacttggacactgggtaagtgtataaacatccaagggatgtcctttaagacgcttaagtgatattttgacaccacctagtctatttatatgttctggcgtagttggtcaccgattctcaaagatattactattttacataaatgagagactcgaaactctttatttttgggtgtgatggaaatgagaaatacaatgtaacgccttaaattgtaagggtgccacgtgtgtgcttttattaattaatttataataataaactaacagtttaaaaaaaagtaaagtttaattaaaacttttagtagaaattatttaaattataactgaacttttcattcaaaatactagttgatttaaggattcccttgattataaacttgtacaaaatattacaaaatagtttattacaaaatgccatcacatttttaaaatacaataaaagaagaatcatgtccactgagagccaaaacatggcggctgatatgtatattatctggagtaagaatggcaatttgggccatttttgtgggtcgggtcgggcccccagcctaacggagcgactttggcccgaatgattcgggtcccagccccgcccagctcgatacatattatttgggtcgggcccgacctggcccagtttcagatattaaaaaaaaaataccaaatagaagcttaaataacatcattttaaacatcattataattgaaagtaaaacaataaaattggtataaatgtatcaagaaattaaaaagtggagaaacctaaagcagaaagaggttgcagaaggagaagttggcagaccaagacgaaatgtagtatgaaccctgcgtaagctaatcctctctaagctactgccttcattcgattctccaccattcacactcaaaatttgtatacgtattttacatatattagagtatatatatattaattaatcctcgaatcgaaaaagaagatgaacaaatgacaaaatatataataagtaacatcacatacaattttgctggtttatttgtagtgtttgagccaggattctcaatgtcattccacgttactctcaccaatcaattaattacacgtggattagactttgacgccctatccatatgcatgccttatccactcaaccatccaactgattcacgctagcatcacgcccttctggctcccacgctgtacttgttgggttttatgccctaaataaaactcatttcaatatatataatcagatttacttattaatatagatcagaaataacatttaatgtt

SEQ ID NO: 311891 - DNA, 759 bp, Cannabis indica
aatatctcaaacgcactcctgaataatgcttatttttttcatgtcactacttctccaacagtatctacatatgcagaaactagtctctccccatcaaattttctagtgtccttcttttgctgatgtagattggagaacttaccaagacaccagacactctatttcaggctattgtgtgttccttggtcaatcaattatttcctgaaaatctaaaaaacaataggttgtttcccgtttttctgctgaagttaagtatcgcgccatagcaaaccccacatctgaggttacttgggtcattgcactcctcaaagactttgacatttctcacattatcctgcgtatctctactgcgatgatattgctgcaaatcacattagtgagaatccagtgtaccatgaacgaaccaaatacgtcaagatttcatttgggaaaaaaatcagcaagggacacacaagctcctccatgtccgatctcaacaaaacttagttgatatttatactagagctttactttcattactcttttcaaacattgtctctaagttagtgtaatcaatatttacattccacttgaagggaggctattaagattacgtagttaattactttagttatccttcagttaaagtttgttgtcgattagttaattacgttctttaactaactcagctcctctctcctctttatctatatattggtaatcactataatttcatttttgaaaaaatgagttaataatcttttctctttctctctctct

SEQ ID NO: 311892 - DNA, 1321 bp, Cannabis indica
acagtctcgctaaacatcgctacattgctaaatgtcactaaatatcgctaaataacaacatcactaaacacatcgctaaatattgctaaatcacactcatgttttcacgatgattagcgatgtttagcgatatgctttgcattttatagtctcatatcgcaaatacatcactaaaataatcgcaaaatacactaaatattgttaaacttcatctctaatcttaaatttgatcgatcattacaaatacatcactaaatatcacaaaatatattgcaaaaaactagaaaaatagaaaagaaaacgtaaaaatgagcgatggtggagattttaggggtttcatggatttcgtggctttgggtggagagacgacgagactttaagaaagagattgtgagggaagacgacgacgagggcttgtgacgtactgggattctgagtctgggttcgacggtgaggggttttgagtcgcggttcaacgtcgtagagtgagagagttagagagagaattttttgaaatataagagcatttttagaatggaaaaaaattaaaagtatagataccatatttctaattgggtggtatattaaaagaccatattttatatttaagcatgttagctaaatttttcttttctattatggttatgtttctaatttttttttttggtttgttttagttgcttttggtttctaattgtagattgtggcttgtttttagccaatctcaggtcacaactgttggtgctaatggcagattcaatgcttcaaatctatataattgcactatgtcgcagtagcaggtgttttattctaggatattttggagtaagctaagtctacataagcataaattaatgttgtggcaagttgtcaattctcaacttttcacaagagatcagttgacaaggttctgtatccatatggattcaatgctctatcctatttgtggtctctttaattagagccatgaccgtctgttttttgagtgctacctatctcaatgggtggttgtgttagggtttattatgccctgaaaagcttgtaaagatatttctctttataaataaaagttgaacattttcatatatatatatatatatatatatatatatttgaatgtcaaattattgattttcaatattggagatcgacataactttctaaagactttgaacaccttaagtcactcttcggactactacaaaatgccttttagtgacactattagtgacacacataaaactagcacgtcactaaagagttagaagtaattttagtgacacgcacaattagaactctaaatattcagtgttagtctctt

SEQ ID NO: 311893 - DNA, 1425 bp, Cannabis indica
tagaattttcttcagaagcttctcttccccctaagattgagaattttatctagaaaatatgtcttaattttatttcattccactataaaaacacagctactcttagtgacaaacttttctacacatatgataaaaatttattagggttcgattgacataattgggttggactagattgaataatgtcactaattcagtgttaggccatgctgaaagacgagataactaatccagttaaattccatttatgtgagatagcagtgtgagattaataattctaacatgcaagattatttttttttttttatctttttttaatttttgattttgtaaatatattttagatttgaaaataatttaaatggaagaatgaaaaatttattgtcaaaaacttatttattaaaattggtaaaaatatataattttgagttattatatttttcttcttcagggccatcatagtagtagaattttcttcagaagcttcttttccccctaagatcaagaattttgtctagaaaatatatcttaattttatttcattatgctacaaaaaatagctactcttagtgataaacttttagttacaacataaactttttgtgactaaatgtgacttttagtcacaacaaaaagttatcttgtgactaaaatatagtttttagatacaagttgtcactaatttaaatattactaccattttaattgataaataaatattcatcattgttattattatcaaattattggacattttactgtgctgtgctttcgagctaatttattcgtatttatgtgccgtattttcgggtttttcgttccgtgtcgtgtctaaattcatattttttcgtgccctgtcatgtctaagcctatattttttcatgtcgtgttgtgtcgtgtcgtacttaagcgcatatttttttttcgtgtcgggttgttctcgtacctcttgggctcgtgctgacttcgtgccgtgtcaaaaaatcccacctatatttacagcactataagatacattttatccattttctgtttgttatactaaattttgaaaatagccattttaattcaaaaacaaatacaaataaaaattaaacctctcatttgtccttggtgcctgggctgttgaggggtccggtcgggccaactcggtgactttgggttcatgggtcactatatcgtctttgtgggcttcacttgtttctttcttctaagtttttttctggtagaaattactccctatacctttttttgttaatcaatttcatttttacttttattttctatatatttattttggggagttctatttgaaccccataatattataaatacagctattattaaaaaaatataaacttaaacaattttttaaaaaattactcttaatattttttaaaatattttttcctcacactattttat

SEQ ID NO: 311894 - DNA, 2812 bp, Cannabis indica
gctcggcgacgatgaaaaatgcattggatgcccgttagagtcacatcggtaagtttagaaccaatttcttagtgggacaaacatttgagatatttcgaataccggtgattggcgaagattagtaatgtatgtgattagtaaagcatgttaggaagcataatagtttataattatttatttgagtgcattgcctttaaatccataaattatggcagatagaataaatttgatcactgtctaacctgcacgatgtaagggttcgcgggctaagtcctagtgtagggacgtccaacaaaatgcaaaagtcaggatgatgaggttaagactggacgcggtcaaggaagttaaaatcatctgagcccccgtggacgcagtagaggccgtggaaggtttcaaaggggtggttatgagaatccatcactagctcctcagaactaggaacaaagattggcaggaatgcaagcccggattaattatcaagaagaggagattcagaggatgagacaataaggtcctcctacagtgccatcaccacaggtattagaaggtggcacttctagcttttcttaaaagcttgaatgatatgaaagtcaaactacaactcatagtgtttgagaggatcctaaactttatgggtatcaccgggaatgattgggtgacctgcttacgttttagttctaggaggaccatcatgtgtgctggagttggtgtccctcatccaagatgtcactactatgacctagaaagagattcatgatctgttcaatgctaggtattataacaaggcagccagggagtattttagtaactaactacacaaaaaagtttgatcgttaagtcaagtttgttacgggtgaagtatctatgaatttcagtaaggaagggaaacacttggaaaatttaaatgccacgattaaatataatctggtaatcactacaaatgacacaatgactgatgttgagatagttgaaaggctttacgatccgagagtgcagtgaaatttctttaggttccccacgagactccatgtgttggtggaacccctactctctctacttttggatatagtagggataatggtgattccactactaattagaaaagtaagactaccccatgcggtggtttgagacagaacaaaaggttccaagggaaccaaggtagaggtggatgccagggttattcttaccctgaatgcccacattgtaggaaacatcatttcagggagtgcaatcagaaaacatgcttctagtgtggcatggttgagaattttaagaaagatttccctcagccaacgaaagaagagcagaagcaggaagcaaaacccatacttgctcaggtgtttgttatcactcaagctgatgctgtagcgagtccttccatggtgagaggtcagcttcttatcaacaactcctattttattgtactgtttgactctggggctacacactcatatgtggcattgcgagtaattaatcaattgggtaggccttgtgattttattgagagagggtttggaaccctactgcctagcggggaatcagttatatccaaaaggcgaattaggactatgccagtttggtggaaaatagggagttgagtgttgacttagtagagctgaaactaacagagtttgatataatacttaagatggactttttgtccaagtattcagccaatattgatttcaagcgaaaaatggtaccttttcacacagagggcgaagatccatttgtttgtgttggatctgttcaagggtctcaaattccagttattttagctttaagggctaaagatttactacacagtggatgtgttggatttttattggttgtaatcgactcctaaggacttgaaacatttgggcctgaggtggtcagagttgtaagagattttcttcatgtttttcctgaagagttaccgagattactgccacaacgacagatagattttataattgatttggcacctgaggccgaacctgtttcgaaagtgccatacgagatggctctagtaaaacttaaggagctaataatacaactttaggggatgctcaatttagggtttacccaacccagtgtatcaccgtgagagctccagttttatttgtgaaaaagaaggatggatccctaaaatgtccattgattatcgggaattaaacacgttgacaattaagaatgagtatccgtcacccaggattgatgatttttttgataaactccaggagaggactatattctcaagggattgatttgcaatatggttaccatcagctatgtttgtctatttgttccaatcgacctactatccctgtaagattgcaattctcctctacttgaacttgcttcacgcaactcatctcgcattggtcttcttcttcaaaagagaatagtcacacatccccaacttaggtaagtgtgcatattctctctgtccatgtgaaaaggcctttgtggatgccttgccgggggggggggaccaccagacatagcttggttttcaggatttcttccatcattacgagagatttcctagtttcctggtcgctgttgtctcacctctacgttcatgcaagatgactcaagtatataagtccactcattcccttggtttgcaaatccatgggaagttcttggaacatcgcgtcgatgctcttgatttcatgtattacttgggttgggttgattttctctatccattaggacattccttgcattcccaggtttttcttcctgagcatttgtgggattcccttggttattttcctgcctccttgtaacaccctaactaacataggcgtattacgtgatt

SEQ ID NO: 311895 - DNA, 3240 bp, Cannabis indica
ggtgctgcaaggaacacttaaagatggactctaccaacttggccccttaccaggaaaatctcatgcctccacagtgcctaccagttacatttctactatttctagtcagtctagtgtgttaagtttcaattccctaaaggatacctggcatagacgcctaggtcgtccatctagttatgtgttaaatcaagtgataaaactatcccatgtaccatttaatgttatttaaaaaacacagtttttatgatgcttgccaatttggccaagcacactctctaccttttcccacaccaactagtcatgcctctcaagttttggaacttatacacactaatttatggggaccagccctagtgacctcacacaccaattatagatattacatctatttttagatgattacaaccgctatacaaggctagttccacttaaacaaaaaatttgatgccttaccagcttttgctcaatttaaaaagctagtagaaaattaatttgacaagaaaattaagcaactaagaactaataggggtggatttcaagctttctcagacatagtcagtgagcatggtatctactttcatcactcttgtccttatacttctgaacaaaatactaaaaactacactgattcattggggctttaaaaacttaagagttgactcgtctttctttctattcaaacatgctcagtttgttgttatggcattggtctatgtcgatgacatagttgttacagggaacaattcataccagataaacaagttcattacaaaattcaataagacattctcattgaaagatctagggccacttcattacttattgggcattgaagtttttagggataatacaagcatctatttgtctcaaggtaaatatatagttgaactacttcagagagtcaatttggaaaacattaaacctagtgtaactccaatcacagaagaaaaaccactatcaataacagatggaacaccactcaatgagccaacaacttacagaattgtgataggagccttgcaatatctcaactacaccataccttacatatcatttgtagtcaataagcttagccaattcctcaaacaacccactaatgtacactggggagcaaccaagagaatcctcaagtatcttaagggtacaatgcaccatggattacacataccatagagtaccaatctgaatctaattggtttctctgatgcgaattgggcatgttgtccagatgacagaaaacctgttgttggatgttgtgtattcctaggggatgccttactttcttggtcatcaaagaaacaaacagttgttgctagaagtagcacaaagtctaaatatagagctttggctcaactagttgtagagatgtcttggctacaagagctgttgagagaactcatgttcaaatgttcctctgttcctgttatttggtgtgataacttgagtgcaagcgcactggctgccaacccaatgtatcatgctcagacaaaacacattgaacttaatgtgcattttgtgaggaacaaaattcttatgaagagtttggaggtcaaatatgtaccctctcatgatcaaataattgacagcttaacaaaaggactcactccaactcgaatttagtttcaaatcaacaaactcaatgtgaccatatcaccttctcgtttgaggggtggtgttagagatattgattcccaatcatgagctgccagaggagtggtgagcgtattgaatgagagaatcccaatactgattttgtaatcattacctcattttcccttgtaataaacttttctgctaggcattgtattctgtgccctttctctgtcacgtgtaatgcctatattggtttttcattttatcgcttgtattcactttttgctatacaatgaaatgtaataacactcatgactctatgaactgagttttccattataaacttttctttacaatcttcacttacttcaggtatcttcacctttaaagttgagaaatacatcaaaattcctcagtacaattttcaaagctcaaaaggcccctctcttttctttccccgtgtgaggaagaggaccacagaatatacagatatatttcaatacaacaacttgactcgttcttgtgtatttttaagaaagccaaatggagaaattgccaaactaaccatttcaaacactaaaatttataaaattacctcactaaatttactctatgagactataatgatcgcacactgtaaatctaaagtcgttttgcgaccataatggtcgtttatagtcgcataatataattttggtcatttctatgatcataaaaaattattttactaataaaaaattttataaaaaattatgaatttctactattaataatattatttgtaaatttttataatattaaaaatataaaagctttgattagtaatgtttatacacaagattaataaaattcttacaacttattcagtagaaataaaaagcacaagactaattaagacctaacctttccagctagcataaaagctttgtaggtaacatccctgaccgaagtaagaggtccatcccaagcattctcaaagcctttaaccacctctggggataacaaatccagaccctggctcttagccacattgacaggagagaaagacctgaacagcttcaaaattccattcaaagaaagttgtttatgtatctccaagggcagtggattcccctcagaacctaacccaacactctcaaatggaaacggcaacgttttgtaaccctcatgcacgtagtctctgacttccttgggccaaaacggcagcaatgagtcgtgaaattttttgaagagggagtcgaattcggggctcacagccatgtcaaagtagcaccaaacagcaagcactcctcctggcttgcgcaaaacccgagaaacaatagaatagaagtgtgaaaggtcgaaccaatgaactgctgttgcaacggttattagatccacagaattttctcccccaatcaacgacactaattcgttgtcattcatggtttgaggagtgtggaggtatcggactcgaggatggggagtagctcgctctagctgggccatgtttacatccgttgcaatcacttgcttgtagtgctcagacacctggtcattgaaactttgttactatacatacataaaaattgaggctgttaaagatgatttagtctaacttcgttaataaattacacgtcataaaaattgaagttgttaaagacgatt

SEQ ID NO: 311896 - DNA, 974 bp, Cannabis indica
tgtacttatgttttgtggatttatctttagtgagggttaacaaggttgaataataagattgtctttattaaatttttattgaaaaatatttgactagtacttttctcactcttttaaggtttcacttttaaccatttattgatctttagttaaaaatgttgtgtggattttttttcttcttattattgttaacagtgcaattaatctatttttgttgattatacttcgtgaataatagctttatgtaatggattttttgacaaaataaaaatttatttatgggcaaatactattttagattttgtgttttgcaaaagttattaattggaccttctattttgttaaatgacaaaatggactctatatttttcaaaatgataaaaatagggccctgagttcaatttttaacaattttattttattaatataaccaactttaaaataatttttgtcacaaacagatacagaaaatataaccagttttgtcataacatctctatattagattattattaagttttatttttaaaaaaattagtttagggttctatttgtacaattttaaaaaatatatggtcttttttgtcatttaataaaataaagagtctaattaataagttttgcaaaacagaaattttaaaataatatttaccctttatttattaatggatatatctattttttttggaaaggaaatcatattattaattaaaactaaaccaaacaaaattatttgatttaaatattttggttgttatgtgtcaaatttttattggaagattataggttaatagttattgtttgactgttagtggcttattagattcttaattgaagttgttgttaggatttttttctattttctaatatacggcttggtaattctattcttgatgattttgctttttgagctatatcttgtaattaattaggggtgttcgcggtgcgagtggtgcggttttttatcatttttt

SEQ ID NO: 311897 - DNA, 1278 bp, Cannabis indica
ataatttttttattaatatttttacataaattcacaccaatggagcagcttaaatcgtaaacaaaatgtacataataatttacatagaaactactgaaccaacgcagcccataccgcaaatttaaaaagaataattaaaaaataatatataaggtaattctccttttttatattttgttgcatattataaatatcacataaatatataaatgacttccgttcttcaaacattctaaataatttataaattaaaaaacgagtaggtgtgcactgtttaaattttattatcgacaccaaaaactatttattttttttaagaaaaaagaaccaatataatactattaaaataattgaattaattatagtttcttcaaacctaaaaaatacaaaaaataataccttataataaggacaaaaatcataccccaaagcaagctaaaccattttccaaaaaagctatatatatataaacacacaacacaagatttcatttcatttcatttcaacatcatcatctaaatattaataaaatgtctttcattaagagcttgttcttcatcttccttcttaatattgtgtttatttcatcaacatatcaaaaaacgacaacaaatgcttctccacaacgtcgtcgtttcaacaccaccaccacagtccacatcatcacatcaaatccaagtagccttggagatgataataataataataataataatcaaggtaaattaattaggattagagtaagtaatacaaaacaaagtttttatagccttgaaaccacactcaaatggggagagagttacaaatttgtggctgaagaaagatgtttgtattattgtgaagccatttggggaagatttatgggttcatggcatggatttcagcccaaaagagatcttaataactctgttttttggttgatcaaacctaatggtttctttcttagttgggataattctacttgggtcaagaaagctctttgggaaactgagtaatattattattattattattttcattatgagttgttgttcttgatcatttcataatatacaaattgtttgtgatgtattatttgttgttgagtcaatggggttaaaaataagagttgatagcgagttgagattgaatctgatagtttttgctcgttgttcaagcaattcgaagtaatagtagtaatactatgttattaaacggtcagtcaaattgaaccgtttatgttattgtaaggcttattttccgtacaattgtatgttagacttttatttgggcttacat

SEQ ID NO: 311898 - DNA, 1067 bp, Cannabis indica
ggtgatgtctgaatgctgcaagtggtgctcatcatcatgatttgagccccttctttgcttcttaagtctctttgctgatcgagaacgagtagtgctggctatatggttcaagcttaaacactaatgtttgtttgattgttggttttcatggatattgctcaagacataggactttttattgtaggattttatggatattggctttagacataggactttaggttaaggtggtctctccctaatatcttaataactaggtttacatatattatacagagaaaatagaaaaaaaaaaaaaaaaatctatacaaagatataaatatatctaatataagtatgtactacatgagaatatcattagctattggattagttatccaacggccaacgaacggtgatgatttacccgttcttcgattcctaccgtgtgtgtgtcattggtagcttgactatccaaatatgaattctttgatgaatctctcatgtttgagctattataagtaatgttggttgtttctccaaacgttaagaagcttagaatttcttttatgtcatcactgcttaattttggtatctcgttgcatagttcttccggtgagaatagttgttgttctttgcatagttcttctagtgagaatagttgttgttgttgtagagatgatatatcattatttacttcatcttgacaatttacctggaatatgaatcataaacaagcaggcatataggctttttggggaaagaacaaaaactcagtattgtaaagcgtaaaaaagagcagcgttgctcaatcttaccagtgtagttgtagtagattctaataagttttcaacatcattctcaatttcactacttggactcttctcagcatcttcattttggccattctcatgatttttgagcttcaatcggcaaattacataagcaggtttctgcatatttgaacaattttattagagtaaaattttagtcatttaaacgaaattaaagctttctctatccattccaagaccaactgagattaatgatcataaaacataaacttataacgaaacaaaagaaaaaca

SEQ ID NO: 311899 - DNA, 1870 bp, Cannabis indica
atcatgattatattccactgtgctgacgacactataatcatgaacaaatatatacatatttatatatgttctggatttaatagaatttatacattaaacaatcatgaaataaatcatgtgaaccatgcaacataaaagcgaattccgatctttattaattagttaatctgattatattgaaatgagttttatttagggtacaaaacccaacagtgatgacaatattttatgccactcaatttggttagtttttaaatatttgagagtacaaattatatcctcaaattgtttattgccttttgttgagggaggtacagcatgaaaaacccaagaaagtgaattctccaatgtcttggtagttattgtttagttttattgtatgtttttattattttcatgaactaagatgttactttgtatttattttatggttttattactttttattgtttaagaacatatagtcagattcctatactgatttgagacaagttattatatgatatttttacttatatttttttttataggaaaattgtttgtcaactgcatggcaacgttacaccaacctaatttacataatttattgcttgatcaaattttccattaagctattaaatagttttttttatgaataagaaattttattactctaaaccaaacatttacatcactaatctttacaatttactattgcttacaatcaactatcaacaatgtacaaccttaaatcctcaaaatccattccttgtcttcttccttgacattcttagacagcagccctttgattctcagtttgctcagttgctaagttttctgcactgtagtgttgatgagccacacttgttgattccataatacttcatttctagccttccatatgtgatacacaagacttgcaattactgtgttcaccatacttttccttgctacagaaaatttcttcgtttgatggcaggattgcaacagtttattaatctctattgtggtgtgttccattgcaggaacaacttgatctcttgcaggcacttcctactgtactcgcactgaaaaaataaatgctcaatggattcatcttcttttccacacatcaaacatgttgaatccatgttgtggttgtatttgcttattctctcctttgtggttaaccttttctaaaatactagccaaagtataaatctatgtttgggaataatgagtctatcccaaacaagattaccccaaggcagtttagcatattcagagaagagcacctggtacccctgtttaactttacacctctgcatcataaaactgttcatgtcccctttttgctgaaacttgttcttgacagcaacgattttcttccatgcccaactgcaatccagtggagcaacataactccaccagtcttgatctttcatacaccatgtggatccatttgataaagagacagtctttcttgctggctatgtcccaaacatatctccccaaggctgtaatgttccattgatgaatattttgaaagcctagtcccccagcagatctggatccgcatacatagtcccaggccactaaaccaggaccagctccttcttgagtgcctttccaaagaaaggatctacaagttgcttcaatatcttttaagagcttcttaggcaaaacaaaaatctgtgcccaatatgtatgtattgcaagcaatacaaagttgatcaaagtgaccctacccatataagataggtttcttgtactccacattcgaattctactagtcatcttttccaacaaactttgacattcagttctagatatcttctttgagaaaatcgggataccaaagtatcgaaatggtaatgaactcctcgtgtaattagtgttggatatttatttt

SEQ ID NO: 311900 - DNA, 1057 bp, Cannabis indica
attgtaacaattaatttttttttgcacattttttgtaattaattaagaaaatgtatacatttatgtaaaatccccaaatattatttattagttgatgttactaattatcactgttgtctttaaaaattatattaatagtttattttttagttaattttttttatacatattctatataattataaaattagaaattagatttattatttattgtaaaaaaaataagaaaatgtaataaatttttttaaaaaaatatgaaacaatatatttattataaaaagtaagataaaatgtacctttttatccgagttcttttataacaagtaggataaaaagtatctttttatcacacctttctcataaaaactgggatattatgagaaaatttgggtaaaatagtacttttttatcctgatttttataaaaagtaccttttttattctgatttttgaaagaacttttattctactgtcatatatctcggttattattttagcaaaaatacgtgataaaataccttaaaagtgagattaaaggcctttgcttgtactagtaaagaaataaaatagcagccttagcaaaattatgggtcactaaattagcagatcgtttaaaaaaaaatattaatttgggaaagtaacaaacaaatttttacaatcttaaatgactaaacaaagaaagaaatcatataatatacaacaaataggcatacccaatataatacaccactttctttcactttactttcctttactcacaaaataaaaaaattaacaagaaatgaaaggtattttaaatttttttggtctatttaggagtttttccatgaattatgatttctgtattattgtactctttgaacttttcaggctattaaaaatagtccctaaactattcacaatattataaatttgtcattctatcaagttttgttagacgtgacaaagaaaataataacatagatgcttagccaattactacgtgagtgtcatgtcaatgtcatgtgtgtaattgatttgcaaaaaataatttaattttttaatttaattttacgtaa

SEQ ID NO: 311901 - DNA, 1958 bp, Cannabis indica
cgtccataaggttctgacaaaaaattagtttccaatcgaagttttgaacttctagaaattccatttctaggtgaaatcttttcttttaattcttaatcaggcctagttggcatatacaatttgttttcattcgttatcctgaccaactcttattctcttgtctcccaccttttgtagatgaaccctagtgatttctaaggatgcaagcatcatattgaccaagacttgctccaaattttgtatggagatcaaccttgtgctagtccatcttcgtctagtgacaatctttcaaattctagtttcaaagattgggaagtaagcagtgaacacacatcttccctaaaacccgaggtgcaacatcattcgtaatctcgaccaaatctgtggcgaaggatacagtcgtttcatctgggaacttaagaatggttggagacgctatcttactgccagctagacgtatagggtccatctgagcgtagttgacactttgcccgagggctgtccaatcttagctactatagaaaattctattgttgaatttgttgtgactattgcaaggcactcttctgataaaacttcgtccattcgtaaaatgatggcacgaactaagcagatttttagaaaacctttctgctgaccctcatatcgcccgtctagccactctggccaagacaagacatgcccgtcctgcaattgaggaggaggagactactagagatgttgaagtccaggaggtggaggaccagggcgaggttcatcccacaaactttttcgaggccgaaggtgatgaggaagaggggatagctcgagtgctacgttttggtggcttcaatgaaaagggggaacctgtttctgagacaggtgatgtcttggaggctagctggaactacgttgaggaggagtacaccaaggctcgtcccataagtaggagaggtccaaggggagcttggtggatttctctaccatccctcttgaccatgaagagattgactaatctttttcgaagatggtcccttggggaaggtcgaatgcttccctccctttcccagtcagctgaccaccaaccctggagagggttattgtgcttggttggggccttacgccaaacaggggcaatgttgcccttacatccgtacttcaaggagatggccaactcttaccacatcagtccgacccaattcacacccaagggccttaagtacctatctgccttgttcgtgttgtacgcctcttaaggatagggtcagccatctgcccatgacactaactagctattcgacctgaagtcaagccctaagcaaaacatgtctgtgtatttctacttctcttagattgaggagtcgtggctaactggtaccacagataccgaggtgaccaagattgttggctttgtggaggactattactttgtcaacggagtggacaccaattataccagttttcagcatattccctcttacctgtcgacctccgttcacgctggaactcaggaagagggctcaagaaattctctaacttccttcaaatgatcgaaatatctctcttcaggacaccgaagccaattttatcaattacaagctttatctgtttgactatgtacaaacgaccgagtagacagcaggggggttataatcaaatgagaggctccgagcaagaagaagaagaagaagataaggctcttccaagtgaccaagtacctattgagcgggccattaggattagagatggtctcaagaaggttgctcaatcttctgccccagtggttggaaagggaaagggcattgtaatcgagcaggaagagggggattcttcagatgaggatggcccttccttgcttgttcgagaggggcactgtaattatgaataactatatgttctaaatttattagaatttatacattaaacatataatcattaaagtgatcatgtaacataaaatgatttctgatcttttatta

SEQ ID NO: 311902 - DNA, 2034 bp, Cannabis indica
actaatcgcattttctgagacaggaaagtagaggagtaaagtttccccagttattgatttttcaaaaactggaggtgttgaaaaatgcctctttatgctcctaaaggcctcctcccaatcttctgtccactcgaactttttgttgcctctcaatacattgaagaatggtaggcacttatcagttgattttgaaatgaatctgttgagggctgtcattctcccagttaaggcctggacttcctttagtttcgttggtgatggaatttccatgaaagccttaattttcttagggtttgctttaatgcccctcgcgttgactatgaatcccataaattttcttgaggaaacttcaaaggaacactttttcgggttaagtttcatgttgtactttttcagtatctcaaagaactccgcgaggtctgttgtgtgatctccactctttattgacttcaccaacatatcatcgacatagacttccatgtttcttcctatctctctcgaaaacatttcattcactggtcgctaatatgttgccccaacagttttcaaagaaaacggcatgactttataacaataaagtcccatgttggttacgaagcttgtatgctcttgatcagggacatgcatttttacctggttgtatccagatgatgcatctatgaacgacataagctcgtctctagtagttgcatccactaactggtcgatccttggtagccgggagcaatcctttggacatgccttatttaagtctgagaagtcgatacaagttctccaagttccatttggttttgggactagaatagggttggatatccacgagggataaaatgcctcgcgtataaattcgttaaatagcaacttatccacttcttgcttgagtgtactttatctctcagaatccaagggtcgtctcttttgtctcttggctgggtatttgggtcgacattcaagtggtgacaaataatcttaaggtcaatccctatcatgtctgagtagctccaggcgaactgatcttggtttgccctaaaaaaacttattagttgctattttagtttttcatccaggccgtttgcaatgaatacacactttgcaggattccatggatctaaataccctcttccagttcctcgattggtttcaattgatttcgctcatcctgaattcgaggatcaagatcctcatcctgcttctcgccctctttagttgtgactaccattagctgatcacccgcttttctattctgtagctcgatgcggtagcattcttgagccagaagttggtcacctcgcaccactcctacacctggtggtgtctgaaactttagggataggtgcttaattaaactaattgcccctagtccaattaacgctagtcgacccagtagtatgttgtaggctgatggcagatcaataactaaaaagtcttgcattatggtggtggataaaggcacttcgcccatcgttaatgggagctcaattattccttgactggcgacattgttgcctgtaaatccgcatagatttactatgcaagatttcaattttacatttctcatcccattttcttcactatatccttataaaggatatttattgaactcccgttatccaccaatacccttttcatccttttgttggcgagctagattgtaatcactagtgggttgacatgaggatatcttacgtgctttgcatcttcctctgagaacacaattggaggttcctcagtcttagctttcttagaagattcaagagcaaaaccgattttcgttcttaacttcctttacatatctcttttgggaattgttactttctccaatgagatgttgccctccctagataaccagaatatcctctccttcaagaggaggaggttgtagtacctagttgcctaggttattgggcagatttggctggttatgtccatcacctttgcgtttcacatattgccagaagtaacgttgcgagataaggctttctatctcgtctttcaattgacgacattcttttgtcgtatgcccaatgtccttgt

SEQ ID NO: 311903 - DNA, 1054 bp, Cannabis indica
cctcttcctcaaactcaatttgatcatttcaggaacaagttaacacttcgggaaccaagtgtaacttgagggggggggggggtgttagagttagttaggcttcagttaattagttaattttctgtttagctttctgttaatgcttgcctatgtggcactgtaatattgttaagttctcaatgtatataaatacatcttctctgctccagtttaggacagagcttctcttttcaatttctctctatcttctctcttagttctgctcttacaataagtaatcaaatggtttctaaattttggaaatagcaaaaaaaaaaaaaaaaaaaaacataatgctttccatattttaaaatattcacgagtatattacaatagtattttgttaggctcaacatagtaacgatatggactaaattatttttaaacttatagagaaggtgagaaagaaaaaaggaaaatagaataagaagggaatcaaagattaaaagagaaggaaaatcaaaatagaagataggagaatctgggtttcattatcttaataagtacatatttagttacaattttttactaactttttccatatgtgtatatatatagctaatgcagattttaatattttaaaagattaattatatattaaaattattaaatttaactaaaaaaattaaaaattataatatgaatctatatacattacttatatttgggatagaattagaaaaatgctaagtatttaatacaatcgaaggagctttatcgctattgatacaattaaatatcagatttacgaaaatattagagaagtattaaaaagtatattagtggtgtctagtattattcaaggaattaattatcatttttgtttatgatattagataaaaatattaagtattgggtcttatattataataatttttatgtattattactgaccattttgaatactagccaattattgggtgccacatgataagttgatggtcaccttaccaaatagcaatatatatagaaagatagcattttatatgtctaaaattatatataaagaagaaat

SEQ ID NO: 311904 - DNA, 451 bp, Cannabis indica
attcgcactggtaatagcatcgagaaaattccgaccatacctccaagctcatagtattgaagttttgacaaactattctctgaggcaagttttagcaaaaccagaggtctcaggtagattgttgaaattgtcggtggagctaagccagttcaacttcaaatattaacctaaatccccgataaagggacaagcccatgcagattttatgctcgaatttccaagtagcgaggtggcacttatagaagaaagagttgatcttgacgtaccacacaatgaaggatggactttgaattttgatggagccttcaacagcgaagtctcagggggtggtctaatactcataagccccagtaattttaaggtacatgttgcactcagatttgaattttctgcatctaacaatgaagcagagtatgaggctttgatctcaggattgaaactcgctcttgag

SEQ ID NO: 311905 - DNA, 1055 bp, Cannabis indica
aatggaatagctcaagatatatggaacacaagagtaataaattaatagtcttaatagataaaatttattttattattaatttttaatcaacataggaaaatactcaaacttctaaggttgaaaaactatacaccaaatgaaatagctcaagatatatgaaacacaagagtaattagatggtgttaatatagataaaaattattttaaatgttattattattttgaatatttgttacaaaattataataattattatattaaatataatataatagaaattaccaactgccaaacatgataatagaaatttacatgagttgacatccaaacacattttttattttaaaatacaatgtcattaataattacacaatcttccaaatacaccgttagagatacaattcaaagaaacaaaaatttcaagataaaacgagtaacattactagggatgcatatttttcctatagggatgggctccgcagatactcacccctaatgggacaggaatttttcgtctaaatggcgaatggggcgaggatgggatcaaattttatctccgaatgttagacagggcaagagcggggatgacactccccgcctcgatggggacccgtttaatttattaattatctttttattaatattttatattttataatatttgtttgtactttttagtataatagtgttagtttttaattttttaagttgtattttttataataattagtatattatataataatttttaggtaatttaataattttatatatttaaatttttaaaataaattttattttttacaataggggatttctagtcccgtctccaccccgttctcaatgggaataaagggatgagaattaaaatccttaacaggaatagggacatggagagcactccttgtaaatttcccgctctgcatccctaaacattacataactgactcatgtttctctataaatatataagggtgcactcttaatgggtattacccatgaatgggtagtattagaaaaatttaagtttttattcttaatttttttatttaatt

SEQ ID NO: 311906 - DNA, 1600 bp, Cannabis indica
tttgactggctaggtttttattcaccctctgctcgctgaatggcttcttcaagcttaataaaaccttctgcgtagtcaagaaagtcacacttcaaatctactggtccattcttccatatgtccttccaaggttcaccaaggacttcaatgccccccagtatcgtggacaactttccgtcttcggtaactcttgcaaccttagccgcctctgtcatgagtctgctgatgtaggctcagagaggttctcctggtctttgtttcactttgaccagatatcctaggtgcaacggaagttggcaagaggaggagaattgtgcatggagctctgaggagaaagccttccgtgagttgaactttccaggcaccaacttgaaataccattgttgggcggcttctgagagggtggcacgaaaaaatctgcaacatacatctccttgtactccttccaggtccatttgcatctcaaactactttatgtgggataagggatcttccttcccagcatacatcttccaggttggcatcttaaacttgttgggaaattccaggatattaatctcgggggagaacggggttccacgtcctcggtccctcgagatcgttgttcctttgaccgcccaggccttggaacatatttttttagctcatccaactgtgcttgcatatccggactaacttgtttggcctcttggtcgatcaaagttgcatcaacatctcttggagcgggattttcagcgcagtttctggctgaacgattggtgcgtcatgctggtcatccacccttttccttctgttcagatcatcacagagatcatgaactgtccccaaacgattaaatacagaaacacacccgcctgtctaagggactagtggtttggcccatgagctggccaccaccattaacctagttcgaatttttaggtatcacctctcctgaaaaattgctagacaaggtttgcccgcctaccgcttggcccacaggtgggacctgtgaccggggattggacgactgaccgtttatagtctgtgaggtgtttaccgctggatcttcgtctgtctcgcccaggggatgatggtcgcaggttgttgcctagcagcctggtaagctgtccgtatcaacacggtggcctgctgggttcggtcgtcaatggctgtttgctgagcccttaaagtttccatctccttgtctttccattcagcgaacatgcgcttctactctttaaatgtgagattcaccgcagcacggagttccgcctgatcatgatgtagggtgttggtatgaccctacatgactccaagagcagcatggaggttctggatttcagtgtcatctccaatggttgtttaaacattggtagcaggtggagcgactgtgttaggaatgccctggttggctgctgaactggtattcccagtctcttgcacaccaggcgtgatttcaatcacaggagtcgtcacacagcgacctacagttgatggttgtccaggattcgtggctggtggaacccttgtgttccctgggttctacaatgcaggattcactgtttgtggattcgccggatcaaccacgcctctgcgagtctgtaccaccattgtattt

SEQ ID NO: 311907 - DNA, 1784 bp, Cannabis indica
atctcaaaatcaattgataagtggctcccatttttcaatgtattgtgaggcaataagagattcgaatggactgaggagtgcgaggaagcatttaaagggataaaaaagcacctttcagcacctccaattttggccaaaccaataattggggagacactatacctttatcttacaatctcgaaacatgccatcaatgtagcattagtgcgagaaaagggcacaaatcaacaatctgtttactatgtcagtctaaggttactaggggcagagttgagatacccacctctagaaaaactcgcactatgcctaattcatgcatttcgcaaattgcggccatattataaagcacatcctattaaagttctcacaaatcaaccattgcggcaagtattatcaaaaatgatgcttcaggaagattgataaaatagtcaattgaattaagaaaatttgaagtaacttatcacctgaggatttcaatcaaagggcaagctttggttgactatttgatagaaggaataaactcaaaagaagaccctaatattgaacgcgaaccagaaacatggaaattatatgttgatggggcttcaattgagaattgctttggggcaggagtaataataatgtcaccaaaaaatttcaaattccacaacgcactaaggtttcagtttgatacttcaaataacgaggcaaagtatgaggccttgttagcagggttaagaatagccgagacactaaaagtcaaaagcattacatgctttagtgacctgcagctaatagtgagcaagtcttgggagaataccaagccaagtcaaatacttagagaaagttcagaagaacttgggaaagtttgattattttaaaatagaacaaaactctaatgtagatgccttagtaaaagtagcatctcaatttgatctcgataagttgaacttggtatcggtagaggttttagatgagccaagtatatgtgaagaggaagcaatcgagatgatagatactttgccaacatgtatgacaccaatcatcaagtgtctattaagtggagaactccctacagacaaaattgaggcaagcaaactcttatattcgatccctcgctacacaatggttgaagggaaattgaggagaggttattccatgcctctattgcgatgtgtgttaccagtagaagctaatgaaataatcagagaaattcatgagggtttatgtggagatcatgcaggctggaaaagcttatccaaaaagataattcgtcgaggatactattggccagctattaacaaagacacacataattttcaagagataaatgccaaaggttttcacatatactttgtgtaccaccaaccaagctgaggatgatgaccttgccataaccatatgcaatatggggaattgacctgattgaggctttacccacaggatgaggtggagcaaagtatacagttgtggtagtcgacttcttcacaaaatggacagaagttgaacctttggtttctgtcacattcaagaaggttcttgattttgtcataaaaaacatcatatgtaggtttggcattccaatcaagatagtatctgataatggaactcgatttgatggaaaattattcactgagttctatgaaaggaataaaataattaagagcttctcatcaaaattgaggcctcagtcaaattgacaagtagaagttgttaataaaaccttgaaggatactattaagaagaagttagatgctgccaaaggaagatgggtagctactgcaagtactctgggcccatagaac

SEQ ID NO: 311908 - DNA, 1239 bp, Cannabis indica
tgggtgaatgaaactcccctaagaagatacagtggacttgcttcctcttattttgatgcgatctagaacatcttgttcctatagctcatgcaccatgcaatttatcttgccagtagatcacgagccgtctctatctaccctcgctgggactttgtcttccaaaagagatgttgggataaagctatcacttttttgggattcatccatgaaagccccatctccagattcgtagaattggctgtccgagaaatcactcatctgaaagatagaagatcttttcagcgtggtgtgagtgcgatttaaaagattagtgtcgtcaccagaataacagattttaaattcaacaaaaacaacaaaactaacatctgagcctcaacaagtggttgggtgtatctcagtgtcttaggaattatatggaaatatgaacattaagtcgttgagaaacaccccaccacttcaaaactcgattagttctaaattgcgactcaataaaaaatgatagaaaaaccaactccaaaatagaaaggagtggtttggtgtatcatagtgacctaagaattacaagaagaaataagcattaaatctctgtgatacacctaaccaatgccaatcttaaatttggagacaattgagcctaagtatgcgagtatgcaaagaagctctaatgaaaaaagttcgagcattgaaagtttgtcatgaaatatgcaagaatttaagttacatgaaataattttccagatttttttttttattttgccttaattcactcaaaatttcagttctctcagtaagtcctatcccttaccaaggaggtacacaaacattcaaagaaaataaagtaacagagaagttataaaagaaataccaaccttttatacgaagtttgttcttcagttgtcattctgagactcactaggtcttcgaaaattgtttctggaaaaagagaattcaaaattttgaggattttgaaggttaaattttttagagaaaaaaaaaacttcaaatgagaaattgagaatgggaggaaaatgaagtgtgataattttgtatttgagaaagttaaatacaaatcattcatatccgttgggatatagaaacgtggcaggtaaatatgaaaggtcacccaatccaacggttactaagagcatgcgtacacacaccctggaaggtttgatgacgtggcatgtaatatctcaaaaaatataataatatttatttaaatatattttattaaatatg

SEQ ID NO: 311909 - DNA, 840 bp, Cannabis indica
attttaaagaggttcgaccccgtgagtgtagtgatagcctactccccttgtattgtattaacttaagagaaggaacaaagtgtttttcctcttgaaagctcttacaactgatctctgagtaactctcttagatcactattttctctatagagtatatttctgcagcaattctctcgatccctttcattgtgaggctaagtcactatttatagagacttaatgcattagggatggttttctttttgcttacaatgcataaaataggaaattacaattattttataattacaatatatagaataggaagcaagaacatgttgtcatatttttctgactcaatcccacgattgtagggatcgcctttgtgtctggacgcaacgagattattttgaagtttttatctcttgtaagttgctcagcgcatacacgcttctacctggtcggatgtcttctttacaaccctgctcgggcaacagacaattgtagatgctgacgaatcttgtacaggctgttaggggtaccttcctttgcccaggtattagaagtatgggacatgtgtcatctaattctatcgccacgtcaatgtgcaaaagactggataacatttactcccaagtctgcgcgggaccttcctggtcgcacgtagacttcactcaacctggagtcttgtctggatggatgacgcatgtcctaggcgtcgaatgacaaaccgatgtgaccctaatcaagggtatcttcaattttaggtcactaatgttgattgacagttctacctcgaatcacgacttgatgtccatgttggaaattatttttccaagatcttagatctactcacaagta

SEQ ID NO: 311910 - DNA, 6594 bp, Cannabis indica
gtctttttttatcctgattgtattttcagtatggaaaatattctaactgagttgttacctatgttggtgactgaattcgaaggttaataaagtttgattttcctttcaaaaatgtttaacctagtatatatctatgttatattaaatgtgactatataagagaaagtgatcttcttttttaaaacattacaatttaaatttaaaccccaaatatctctctctctcttattttttctctcttatattaattgtatcttttttacattacatgtcaaatttaaacccactgcacaaaaaaaaaaaaaatctttccattattaatttttatccaattcacatgtgtaaaaaaaattatacaactaaaataaaaactaagaatataacttagtatacatgcattgtatgtaaattaaaactagtgtatatataaaacacttagcataataatgaaaatatagcttataagtgtataataaataaattattgacatgaattatactaatgtaagtagtggcttatgtccctaatttagtgataatatttataatatataggtaaattacatatttatttattattaatagtttaaaataaattttagttcacacattatatttataatcataatataataaatagtaatctttattttttaatttgtatattaactccaaaaaacaatatgttgacggtaagaattcgtcaactaaactttcgttaagaaataaaaagtaaatgggtgaagatgaaaaacttaagagaaactcagaacataatagagaaaattggtgttgtattaaatctctaaacttccttacaaatgattattttctaattccttctttcatgaaagagagggatatttatagggagctctaatggctccagaatacaagtggtcccaaaactagaggacaaaattacttttgtatcatgaagatcaacatgttagacgggcagtggtgaggtggttgtcgggtgtcatttggtactccgagtgagacaaatagtgtctccactatttgtacttatgtacaaccactactttttcagaggcatgtgcatgctttagcaactttatcctttgttgtaccttcccttggcatccctctctttatagcttacgctcatgatgcgagtataatacttaggaaatttagctaagtgataggtctatgagatttttgagtcttgttgtttaaacttagtaggaacttcttcctcaatcacttttggtggtcactccattgtaacatatatactctaagtattattgttcctttgtatggagcaggtagtattaggtggtgattaggggagtgagtaagtaagtaagggagcaagagagagagagagatggaatggagagagagagagagagagagatgtgagagagagtgggaatggaggtgagagagagggaacggatagagagagcagggagagagagatagggaacagggagagagaaaggagagagagggaatatggagaaagcggggagatagagagggaacgtggagagagggagtggagtagggagctccagtgtgagcaatatggcatggggagctcctcacgcggggagctcaacccttgccttggcccctcctcatgttggctttccctctagtgtggtttctcagctaggtagttggcctcttattttctttctcatatacttttaaagtgtactttgggattttccctctcattaatctagagaactccaaaaattacacttagtaattttcaggggtcaacacttgccccctaatctgtaagaattctttcaatgattcttgtagactaagtttggtgagttttatctttacgacttaatttttcttcctcatttttttcgttatccttcacgggagagtgtaggctttacgagttatctcgatcccttttgtggttggtatttatcacaagtgtaaccttttcgttgagtgattattagggtagagagtagtcttgtcctcttatcggttactcgttggatataagggagattgtggcctcttaggcaatgcttgacctatttctagatttaaaattgtattgggggagcttgtggcctcttaggcagcgctcaacccctacattgtatctgtggcacttatagcacattttgaatgctagaaaattaataatccttttagagaggtttccctctcagattcgtatttgattcctttttttcttttaatattttaagggtgatgcgggttttgtcaaccaactcaaccttttgcttcaatattttaagggaggtgatgattttgtgaaccgaatcgaccttttgcttattttaagggagatgatggttttgtgaaccgactcaaccttttgcttattttaagggagatgatggttttgtgaactaactcaaccttttgcacttaactttatttgtttccctacacgtgctctatgactaactttgaggagcacccccttgttattgcagtgctctttcttgtggatctatatttgggcgttcactcttttctttgactgataggggtagtcaatccctgcagtcctatttttttttctttttttcttcgttcactttgacaattttaattgacaagtattatgagcaagttaaatagacatgtaaggagtgatgaatgtcatatgtaaagtaaaaacttaacatttcattgataaggaaaatatgtgattttccaaatacatatgatatgttcagaggtcaacctaagtgccttctttaatttagtgtattgtactaaaggtaaacttgccattgctaggaatgatttctcgtacggtagaactttacttcgaggagcatcttggatgtttaatttgtaagggtcatagattgaaggcttcacttgaatgtgtcgacttatgattattgcctaatagaccttgtagggatctgacaagcttcccgaagaacactcactagtatcttctcttaatacttcatttctttcctccacacaaatgtatttctctggtcgtttgtagaagttttctaagccatccaatattcttttcaggatatttccccatagtccatctccagggcatactccagcggttgtggcaaacttgagatcatctttagacactttccctacgttggtaactttcgcgttgaagcgatggatgtagcttcacaaactttcttttctcccttgcttcacattagtgatacttctgacaagcataatgttatcacatgcaacctgatcttgttggagaaattcttctaaaagttgcttccaagatgtgatcgtccccggtcctagccgtttgaaccatttatacgcgactcctttttatgtgatcatgagatattaacaccttgccttacatgacacatttttcatctttattagctcattaaatgagctgagatggtactttggatcagtggtaccatcttatgctgtcatccgcgactccttgaagtttggtggaattggttctattttaatctccctcgagagaggggattcttcgtcaaactcctcatcatcattcaagtcttcctgtgtggcgaaagctatctttcgacgtaggtcttgcatttctacttccaactccttcatccttttgctcatcctctctcagaggtttgtaggtagaacatgggtgtgtggtttgcattgggcccatgagaggtactcctcttgtccaatcaatgtttgaattatcactaaagctaatggacaaggccttttgcttaccttgctcttggaggaaccatagacgaggtgccccctagtatgagacctcttgggtgaagtctcttccttaggttatggggtgttttcctcaatgaaatctcctcatggtgggtaggctcgagttgcttcaactggcccattgggctcttctctcgcgacaatctccttccatgttcatctcttggggtgctattaagggatgacatggaattacctttgctagtatatgcagttgagatcttgttccccactcgatggcttttgtgatagaaatgcgatgcttgggttttgcctttaagtatgccactcaacactttttgcataccagcgacaatactttctagcttcttgctcttccaatggaggtcacttatttccacttcataatagtgagcctaggagcttgaactcattaagtacacttgcttttcctttttgggccaatgccttaaagttttagggtttgatggcacagatggtagaaggcaccacaccagaaatggccttctcgatagttgaatacttctatcgataaggttagccatcgatgttgttatcaagtcacgtattgcagggggccctttggccttctccaacgataggaggttgatgttctcttactatggtgtctgactggttttcatctgagtgaaccccattttctcagagacgatgggaatgtcttgacatcttaaaaattatagtgaatggtttatgaactaacatagctagaacttttcattcctgcagatatcgccaaactgttgacgataagaactcatcaactaaactttagttagaaaataaaatgcacaagggtgaagatgaaaagcttaagacaaactcataacattaatggagaaaactggtattgtattgaatccttaaatttccttacaaataattattttccaatcccttcttccatggaagagagaggtatttatagggagctctaatagctccaaaatagcaagtggtcccaaaaactaggggacaaaattacttttgtgccatgaagatcaacatgtcagatgggtagtggagaggtggttgtcgggtgtcagttggtactccgagtgagaaaaatagtgtctcctctacttgtacttgttgtaaaaccactactttctcaaaggtgtgcatgctttaacgacttcatcctttgtggtctgttcccttggcatccctctctttatagcttacgctcatggtacaagtataaaacttaggaaatttagctaagtgatgggttttatgggaggtgagtcttgttgtttaaacttagtaggaacattctccttaatgttttttggtggtcacaccattgttacatatatactctaagtattattgctcgtttgtatagagcaggtggtgttaggtggtgattacgagagtgagtgagtaagtaagggaacaagggtgataaagaaggaacagggaaagagattggggagaggggaactggagagagacaggagcggggagggagagtaggaatgggggaggagagagagagatagagcaaaggagagagagagggaacatggagagagagcggggagagagagagagcgagaacacgcagagagagcgggaagagagggagtggagcggggagctccagtgtgggaagtatggcatgaggagctcaacccttgccttggcccctcctcatgttggctctccctcttgtgtggtgtctcgccaaggtagttggcctcttattttcttgctcatacactttccaagtgtactttgggattttccctctcattaatctagagatctccaaaaattatacttaataattttttggggttaacacattacatgaataacaatattataaacaatataataaatattgatatagatatatattttatttttaatttttattaaataagtttaaaattgtaaatattataaattttccaacttgtacacatataaagttgtactcaaattatgaaaattacttccatttgatagcattattcctgttgtaaaatattttattggtatatttgataaaatagacaaaaaataatattgtagtattttaaaattgattttaattgtgtttttattatttttgaggatatagtttccttttctagtgtgaaaaggctttcaaaatcagattctattctcttgtgacttttgtgaattaaatatgagtttttttttttatttataacatttgattttatctttgtatttttaaggaaattcttaatcatatttacttcttttttatctaatttcttgaccaagaaaccgtgtacaactgtgtgtgtaaaggttgtcaaagttgccttatttgtttaagaaaactatcttaaaaaattgtccagtttcaatgtacttatttgaacagactgactgtttgtttaaatagattttgtctttcttgtttgggaagatttttcatttattgacctaattgtttgttagttgtttgaccacgacctagagggtttttaaagtgtataaatacacccctaggtcgttggtattggttagctctcttggggctcgtttgtaacgccgtattaggtcgtattgtattgtattgtattatattgaattgtattttatgcaatatttttatataaaactatatgtggtattaacttttatggacacctaaatatataatattttagtataaattaaagtttaacatagtattatataaaaatatgatatataatccaattcaatataatacaatacaatacaatacgacctaatacggctttccaaacgagcccttggtgtatcatttcctaaattacttttaaatttaaagagtattttctttgttgtgtgaagaacttgagtccaacaagt

SEQ ID NO: 311911 - DNA, 974 bp, Cannabis indica
aaaaaatagaaagaaaaaaatatattttatataatcacaatgaattattatatatactttttatattatgataattatattacaaagtatgtgctagattatgtacgtatttttttcttgcatgtgaagtactaattaattcagcattcaacaactctgatttattgtcaaataatttcaacaataaatgtgaacttgtttctagcttgttcaatcatatttattgtttgtctcaagtaataatacgtgtaatgtttttaataaactaattattttgtgtagatattgtaagtgattctctcgacccatcaataatactttatcaataaattaaattaatttataaactttgaaagaacttttaagaagatatgatttaatagcaacctattattatttaaactctatctcaagattaataatatgagaaaaaattagagtttttcattcttaaatttattatatttattacagggtttttttttttctggtcaggcccaccgaccttttttgggcttaggtgtggcttggccggagctgtattttattactgcgattagtcttgtctctgtgacatgattttgagtgttttaatcttatttgtgacatagttttgagcattttcgtcttatcattgtgatataattttgagtgtcttattcttgtctgtgtgacatcgttttattttgtttgtttcgttgttaatccttctttatttttcgatggctcatcatcaaattattgttagtagttgtgaatagaaactatttgcaattgaaagaattattggtagtgcagttatgtaccttacacaatagttgagtgctcaagctatgaggttgaatgaacatgctgcaacagtttctactgttgtgtcttctgagcggtggataaaatgaaatataggagtttttaaggttaaatggatgctgcaatttttcatctgatttttattttagttttttgtttttttt

SEQ ID NO: 311912 - DNA, 766 bp, Cannabis indica
gcactttgatattcggatataaccaatggtagaaacggttggagcctaaggagaattgattaggagactagcttatagagaacagtacacaaacgatgggacaaaattgagtgatgaggttaggcttcttaactttggggatgagtgttatgatggtcttgtttagtattgcaggatctgcaccattattgaggacatcaagtactgaaggagtaacaagagagccaacaatgtgccaataattggtgaagaacatcatagacattccattatatgcagagcttttatcattactcatagtattcaaagcatttagaacatctaaagtcgtgtatggagctaaaatgatatgctgggaattctcatcaattatagttggtatggttgccaatatggtattaatagcttggtcatggacaccttggctgctgaagatggtttgaaagtagcttgaaataatatcaatcagagcaagtgtactggcttgtgtgttgccatttgaatccttaagctttttaatgtgattattggtagatctggcattagcacgctgataaaaaaattttgtattagaatcacctgactgcatccatgtaattctagatctttgatgccaacaatcctctttttttgctaacagctcatccaagattgactcagaattcagtagtgctgtaaaatggtcaggatcagttctagtagaattctggagagcagcaacatggtcatgagaatcttttatttctttcttcaattttccaaaagt

SEQ ID NO: 311913 - DNA, 554 bp, Cannabis indica
gagttgtttcttggtcgattgaaggcagaggctccattttgttggttttgaggtctgctggtgttggagtttatttgattgccattgttgtcgattcctgtgctcaccatatttgttgtcaatggagaaaaaggctctgataccatgttgaatctcttgacgatgatcaaactcaataacagagagaacagggcaagaagtaaagcaagaagagaaggaagaaatgcagaaaggaaacaaaagaagattgatgaaacaaagagcaatcttattcattaagtgttgattgtagatgatttatatagtgaaagaatacaaagtaagcaacaagggaattagttatagttaaaactaactaatcctaatagattcttgtaacagataaaattgttacagctatcactaacagttataacaaccagatactcttaacacagatcaagtaaatttttcttatagcagttaatttttgtgctcatcatattgctaagaaagtactagtaattggtaggtgttagaaaaattaatataaaccccaagatcaatttgtatat

SEQ ID NO: 311914 - DNA, 1278 bp, Cannabis indica
ctcctctgtccactcgaactgctctctagtttacttaaagtagaggtacggatgatctctgtttagctctccaagttgtgcttcaaggctattctctgactcgacatactgctccaattttgcacctatttttcgctgacgacagcctccttttctgtaatgcagcttagagttcttgtttggctattaaaagatccttggatttgtaccatagagctttaggacagttactaaatcccacaaattggtattatctttttcacccaatacaactttggcaaatcaaattttctttcatcgacaccttgctatgcctataagtgagtgtcatgaaagatatttaggattgccatcatattcgggtaggaacaagcaagagttgttcggggatataaaagacaaggtgtggaaactaatgaatagttggagtgaaaagattttctcagcaggtggaaaagaagtgcttcttaaagcggtggtgcaatcaattcccacctttgctatgagctgtattcgattaccaacaacaagttgcaattaacttgaataatgatggaaaacttttggtggcgtcgaatccattggaagaattggaagctgccctgcaaaacaaaatcaaatggaggcatgggctttcgctcttttgtgcatttcaaccaagccctgctagccaaacaaagttggaggatactcaatcacccgtcctcattgttaagcaaaatactcaaaggacggtactttccacacacttctttttaagaagcttcacatggtcattctccttctctcacatggcaaggcatttcgtatggaagagaacttttacaagctggccttcgttggaacgttggaaatggtaggaatatttgttgtggtttagatgcttggatcccgggatttcataacttcaaacctacctttttttaggactctccattagctaaggtcgctgactttattactgacgaaagagaatgggatatccctctactacaaagatatttctcgaatgtggatgtagagaaaatattaacaatacctctaagctactttcagagtactgatgctttgatatgacaccacaacaccacaggtctctacagtgtgcagtcgggttaccatcttatgttggaaattattttattcacgatcttcctcactaggattgaggtatcacttgctgtgtgtgggcactactcttacactaagaatttcgaaatctcaatgaggaagagagagagagagtgggttcggccaaagatagggagagagaaggct

SEQ ID NO: 311915 - DNA, 3353 bp, Cannabis indica
tatgagagttagtttttattaatagatattaaaaagaagttatttttcaacttctactgtaaaattatgaatcatttaatatatcttaattatataatatatataaatattaatagtggtcccaaatcattcttgttttactatatttattttttcggattgaataatttatttgaagaaaaaaagctaccactaactaagaattgaacacggaaagcaaggtcttgtgcataaacatacgttgttacgctgatataatattttaatttataaaaggataaaattaaaggggaaatcaccttctatacggtaatttggtatggctgtaataatccttcaacttgaatttaatgacctctgctgatattatttgaaaggatagaaagcttttttctaataaatctaagtttttctcaaattgttgaaattcttgctaactttaatgtaattgaagaaaaaattagatggttgaacatttgattctttggatttgtcgggagagagagatagcctattttaaattcagtagctccggcaatggatgttgaaatcttgccggagctaaagggataatatcgtgtgaactgtgatgctttagaaagcaagttttttggaatggcaagtttttttggagtagcaggttttttttttaaaaaaaaagtgtcttatatttacaaataaagtgtcatttaaccgtataaatggaattaatgtttgtacaccgtatatttgattaatttttcagccaccagtgtacatataaaaacagcccaaaaatctataaacaaaaaataattacatgttctaatgatgacaattttgtcaaattaaagcattcccattattttttctaatatgtaaacaaaataatatgattctagttttctttccgtacaatttagtaaacagcataataaaatattattttctattttaaactgatttatttctctcattgattattctgattacagttacagtttagtaaacacgacataagtcatttcttaaaaaaattagtgggagaagtattcttttttttttatcccttatttgatccaattctccattcctaattttaataaagtaagtaaacaaacataaataaataaatgactaccttacaattaatactcattacttattaataaacatgccaaaagtttctaactcgcccaccttccataaacaccaagaaagaacaaataatagttcaattctaaaattaacaaattagaaacaacacacattaagacacaatattttatttttgactatttagaatttttatccctgaattatgatatatgtattattgttcccctcaattttttagcttgttccaaatagttcctgaactatttacactattataaattggtcattctgtcaaattttatcacacgtggccagacatgaacacactaatggtagtgtgtgggctatagcccccaattaaaaaagttagtgttaaaaaaattaaaaatcttctatttaaataaataattatacaataaaatagtaaaaagcccccataaataattataattttaatgtaaagtaaatataaatatttttataacaattaagctctcataaatcaaaatttttgggtctgtcactgcacgtggcaaataaaatgatgatataacaacttagtcagttaccacattaatattacgtgtataatttaacattaaaaataaaataaaaaaatatgcacttaattaatgattaaaaaattatgtaaagttgcttaaaaaaattatgtaaaattaaaatttttaaaaaatataattttttcaagttaattacatatgtgcattaacatgatactcacgtgagaattgattaaacacaatattattaattatggttaattgtaacagatcacgtgcctggcacatgtcagcagaccatacatacgataagataaaactgttaaaggaaaaataacagagtaccaaagaaaaaagggaaaagtttctttgtgattgtgaatcacacaaattcattaataaaaatgcgaaattggcaattgccaatacacaaaaacgtgcatgaataaaataataaactaaaaaaaatggtgtttttttgacgataattccaaaccaggaaatttctatgcaaatttaactatgcatcacactaaatattatttttttaaaaactcttttgacaatgaataaatacttttatttgtatatacatttaatataatttttatgtagttaattttttaccaccttttactaaaataaaatttattttaaatacttgaggctagctcaagtggccataggtgggtgtgtgagtgttggaggtcttgggttcgagtcccaagtaaaacatggttgtgatatataaacgcttaaataaaaaaaaattattttagcgcgaatacaattataaaatttaagcaaaatataatattgattttttttagtcaaatttaacataaaatttacactatttattaaagatggtcagctgttaaaaattattttatttattaggatctagatttactaacatgtatattgattataattttataatataataccctaaatataaatttcttaaaaacaataaattaaacacataaaaatatagaaaatcttggcaacaaaataatatgactcattccgttcagatttctagtccttgattcatgtctgttgtagagcattattaagatctgaataagatctgaacgtggatcttctcctccttcgattgtgttcaatatcatagtcttccacaaaagtctaaatatcaccttgaatagagtgagttgatactcaaagacaatattttgagagagaaacttagtaaatttcgaaaataaagagaagaggaagaagtgacattatctaagttatatttctaaaactctgtagataactgaccgttaattgttaagtcattatttacatgtcattttattagtagtatatttaaattatttttttaaaaaaaattaatgacctagaccaataccaatcagggattaccacgtagcaatttacttaacacttaatatctaggaacctatagaaatttttaaaattataacttaagtattattaccagtattaaaaattaaatttgagtatttatttacaatcaaaagttagacttagatatttataccgtaaattactttattaattattattaattggaaccgatcatgtgcgtggcacatgccagcatattatttatttattttttttgaacaacatgtcagcatattatagtagtcaataaaccatgcaaaccataattaatgggatattagggtctaaaattggtatcctaatctaaaactatacataatttgtaaa

SEQ ID NO: 311916 - DNA, 1681 bp, Cannabis indica
atcaaggaaaaaagactattttatagtatatgtagaaataatcaacaacacatatttagttacagaaagagagatctagtgatcttatttgattggtcatggatcgataaggtttatatttaatatttatatgttcaatggtttcctctattagaaagtactgtccatatttagaaaccaaggaaaggtccaaaagcataatagagatgctaaagggagcatctggcatagaaagcctattaaaaatgatgatgatgatgcaggtcagtacatatttatatatatatatactgaagaattgatagatatgataggacatgatatatatcaacgtgattgccagagttgaattgtttcttctttacgtacactctctctctcacaaagactacatttatacatgggatacgattttattatatatttctattacattagataagtctcaatgtgcattagatggttcttatagtacattattattttttaacactaattactcgtagatcaactccagctctcagatcaaataaattttctatctaacggctgccgtatattataaaaaaaaattgtgtacctatatatatatatctatgattatttatgatccaatattataacccataagtttggatagttgaccaagaccttttaaccctaaccatgagcaaagaatgcgaatgagtggggggtcaccgcacatttgcttgtcgtcatgaacacgtgacacgttatattagtaatccgcattgttattatttgtgtgtgcaaaatgacattcaatcctgattttggcattataaatcacttgaacttttctgaaaatatgtatgaaaagtccactctaagtatattatcaattatccatttacaaatatatataaatatatatatatatatattataaattatcaagtaaaaagcacatctcaattacacatatttgttacactttttatatttaattttaatcatatgtattaataattttaagtgaagatcacattaattattttaattgtatagttaaagctaattacaaattattgtaagtgggtaaataatatatgtaatttgagtgtgataaacataccaacaaattgtaattaaacataatcactactctataaatatataattctgtgttaatcataaaaataagattattggtgaactacttttatttctatatacaaaatgtacattataattatagtttttttttttttctgaagtataaacatctcttgcactcagaattttctggtatatataagtataatatacactaggtatagtttatttctaggaaaacagaattgtcccttatatatatattttttttaaaaaaaaagttgtaactaattataaattattatttttttatgttgtaactaaaatattcgtgactaaaagtattaagtcacaaaaattataatttattgtgagtaaatgtattttcaatcacaatataatcgttgtgactaaaactaaattagtgacaacttgtatctaaatattatgtttagttaaaagtcatattttattgtgactaaaaaacaaatttagtcacaaattgtttatgttgtgattaaaagattattagtaaaggtagtattttttgtagtgaatacattatacaattttttattaaacaaaacaataagtctgatcaata

SEQ ID NO: 311917 - DNA, 539 bp, Cannabis indica
agactggaaccagattcttcaatgtaatggactggagttaaaaaaaaagttaagattcttctacaatgcacctcaagaaaacaaaaaaaaaaaggtgcattgatgcatttcttattattttgctattttgaaataagtttagtctaatttttttatggtcatgtacgttataattatttaagatatcctgtaaagtattgataaattagaataattaaaatattaaaaatagtgttcaaacaatttattttatatgcctatattagttaaatgaaaatttatataattatgtttgattgtgacataaaaatttggctcacaatcacaagtcgtaggaaatctagaatgtaatgttttgaataaatctaccttcacaaaaaattaaatttttaaagaataaaataatgtgtattattgctaaaaggttctaacaaaatatgataaatttatattagaaatggaataatttaaacttaataattgattttttttcttatgataacattaataattgaattttttttatgataagattgtgg

SEQ ID NO: 311918 - DNA, 1094 bp, Cannabis indica
gtttgttaaaattttatgtaattattaatgaaaccataaaaaattaatctatacttatacaagatatttctttgttttattaagatttttttgtattatttttaagttgtggacttagtattttgatattttgtttatttgcatattaaagtagcgtagttgtcaagttattttttagttgattttttttttttttgacgtaatgattagaatcattcatgaattttcgatacagatatttgcaaattgcgcaagaatctcctcaaaccaggatagctcatcatctaataaaagagtatgttttgccaaactatgggccccaccatagtggcgtccgcaccaaccaccacctcctacactgccattctgatatggtgctaaggtaagttctctatcctagtccttagtgtcactttggggacaacgtgacatttaagttttggggggtgaacaaaatttttaaatttttttagtgtgtttgtttgtttatattatgttattttgagtcaagttgttgaatatggaatatgagccaatatggaattgagtatgtagcatggtttgagaaaaattttgatcatttttttcaaaattcgcatgcttggtgagattgtattcttaattaacttcaatttgtgctttaaaaaatatataatcataattggtaaacctctatcaattgaagtggttatgcatgctaaatgtggattgtggaaagttgattaagaaaaaaatttaaaacttgcttgcttactatttgaggaaaaatgatagatgatgcatgattagaaaagtaatttaggaaatttttggatcgattgagtctttcaagtcgaccttgattaaatttctccttagttaccttttttgagcctaaagttatattttttgttgttaaacatctgttttaggcttgatttaacactttattatttttcagttctaaatttatatcatgagcatataaagatgtaaaaaaagagaattgaattgcattgggtattatcctttgtggagtggtcttgacaatagaaaaattcaagttatgttgaggaaaagtataaaagtaaaatatgaaaaaaaaaattgaaaaa

SEQ ID NO: 311919 - DNA, 874 bp, Cannabis indica
tctctttctttcttctctctatctacgcctccttctccttcctcgttttttttttttcttctgcccagagctaatcctaactctggcgactggctgtcaaaacgaacaacagaaccaaaatcattgccactaaaaacctatggatctgccactctcttttgtgtttcgttcgataaatctcatatctacctctatctctctttttccgtgttcttcgtccatgtgtgaatctctctctttctctatttcctcaggtcgatgaaggttcgtgtcgatggagcttcaagtttcaaggcagttcgtgcacgacaactttagagcttcgagaatcagggttattttatggatgatagagcttcaaagattcgaggttcgtggtcgtttgaagtcgactgagctgtggggttcatagtggttcattgtcgatgaaggattggggttcgtcgctgttcgtggtcgacagaaactgattgtgaaaattttttttgttctaaaattgttttgtaattttttaggttcaaatatataatttgtagaatttttttgcttgctataaggttattttgtgtatataatatttatttttcttctgaaattaagattttttggtatataacatatgtattgtaatatatgcagtaatagattataaaaagaatatacttagtattgtatttatatatttattttgattaatttttctttctaatatttttataacatttatttatttattaatgaatgctgaatatattattgaatattgtattctaaaaaattaaaatatagttaaaataagtgaaaacaattatatattatttactaatatataaaatttagtaattaaataaaaaaagaaaaaaaaaaaagggaa

SEQ ID NO: 311920 - DNA, 1813 bp, Cannabis indica
cctaattacccctagatcaatctcagccctcaaatcaaatatctccatcatctaacggttgtctataattttttaaatattgtctaaattagaatcgtgatccattaaaatatgtttagagtttttttaaacacgtgtgttaaattggaatcagaaactatgtttttactattgtaaaatattcataatttttaaaaaatcacacgagatgatgttataattctaatgaacaatcactatgaaaacaaatatttcaacatataatttcggatacgaagattgactaaaaggttgtaattatcacttctagcatattactactcttatatattgttgacgctgaaaagtggacaacagcagctcgctagattgatgagatgaataacaagtttaagtaaaaaaatttagagagacacacacaatttatagtagttcactcctcatgtcgcaatgacaatagagttacgtcaattttgagcttttatttctcacgagatagtaattacagaaaaaggctaagtgtttaacatttagtttctagaaagagaaactagagagagatgctctaaccttgtggatagtcttctgaatatgaaaaatgagctaagggagctctccttttaaaagtaaaaaatatccacaaaaatagggaaaaaataattcaaaatatatataaaaaataaattggctaattttgatcgttgatgatgatctaacggtcaaaattaacttatgagattgatagttaattttttgagttcgagccatgtcaatgggacctgctttgggtaagccggagcttattttcataactcttttggggtaaaattcgaggtcgataacttaagaattgtgattgatgtgtgatacatgacttgataaagcattgaatttgctttaaaattcaagttgaattgcgtcaatcgaatcaatattaagtgagttgtgttcgttttactgaagacagtttataacacttagctcccaagttgacatcccagtgcccatattggcgtcataggttgacgtctatgggatgtaatttgtgatgcctaagtgatgtgatgtgatattttgacatcacttagtttgtttctgtgttttggcgaagttggtcactagtttttggagatgttgctgttctacgaaaatgagagactcgaaactctttatttttgagtgagtttcttatattagaaatgagaaatacaaagttgtgaatttgaattctttgacttcatggatcttagttattgtgaaaaactagacgaacggttgaatcagaatcaaataagcagaacccaacacacgaggccatttttcaacctaggcatttgatacttcatttttgggctctcaagttatcatttcgatacttctaaggttcttgaacttgaggacaaggcctcctacctcattttgaccattctagattgaatgcttggatcagatttgacatttgaatgatcgaaaccagcacactaggttaattgtaaacctgggcgctggaccaagttaacttgggcgctgggttctatttctggggtctcgagtttgtggttttctcctcgagtttgcttgaatcggttcctcagccttggccttgcccttacctacacataaacatagcactgtgagtcgacagactcagtaagaaaagcataaacataatcatacataaatcccgggttatgatcagacgcccatacccctaatcacaaccctaactgccgtgtcccacatgatactgagtcccgaacgtttataagacggtactattgacaagtaacagcctatactcggttcactggtc

SEQ ID NO: 311921 - DNA, 2199 bp, Cannabis indica
aaaaaaagtattaccaaacgataccttagttaataataaatgttaaagtactgaaggattgtacacccaatgtttataccacgatattaacccttaagcaacaattatttagtaatattcgctatcatagaggaacgcgatggctgaagcgtgtcctctatgacagtgattttctaaaataaccactactaaagggttattaaaatcatacgtgatgcccagcccagccattcatcttttcttatactcctcaacccatttcttttcaccactgaccactattttctaagccccccatttcgtcgttccttcaccgttttctttcaatttattttttttaaaaaaattcttattttcaaagcccaaaaacatattgctagtattaaatgatattattttagttttttcagtgcggaagtgtggtatttggtggaggtttggttcagattttatgtcttaaataagatacaattttattataatcttatttactttcaataaagatcggaaatcatatcatgacctagtcatattctttgttcacatattttacacatgattataggtttaatatataagttctattaaattttgaatgtatacttattcacaattatattgatgtcatcacaatagaatgtagttgtgattatatgcttcgaattatttattcatcagtggactagatttagactaacgtgataatcagcgataaggtttacttacacttagctgagtgaaaggtcttttcctaggcattagtaaagtaaattaggattggatgatcggttatacatcagattggataatattaacagtagaaaagatattataaacttaccattatatacgtatatattttctaagtcaatatcacgtagttgatcatagatcatttgatctcaatccttagatgattgagctctagcttaattgtattggacgagttcttttacttgttcgttaccagcttacccatggaactagcctatacttacattttaggaactcgatagtgcaattgagtataggagtgttaatcatagatatggacatctatagcttctatgtttattagaagtgaaatgatagttttctttgagcttggataacagtgttaaatggttgaacgttcattttggtaattatattagtttcttgaactattatttacaaataactaagtgttttaaggataaaataaattgaagaataaaatagtaattttgtccctactcgatatagaccatctatatatgatcaattattgttgtgattgaaataatagataaattatagcgtatctatacttggtgtatagaatattctatgtaatcaggagtgcaatttcaaatctatattggagtgaggaggaattaataagtaggaaatttactccgtaaatttcaagatctacttattaggagcttggttacatagggatgtataagtcaggggtagttaggagtattttgtttgattcttagacgattatcatagatatttaccttatgccataaatttgaaatgtttgaaaatttcatgaatttctagcaaatactgtaaaatagttaagaaaatcgttaaagatcttgcgaattgataggggtggagaaatatttgatttgtagttcaaagatcaataaaatgaaatttgaattctaatcaaacttacctctttagaattctagagtcgcatattgatgaaatgattaggtctataattagttactagtagctaccaaagtccttctagagaaatgacttagagacagcaaacgaaattttaaaatatcatcccatctaagactaggtcccaagacaatcttataatgatataatggtcatgtacttagtatacactattattaaatctaagaataccctgattatgtccttaagaaagcttgaactgctaattaatgtttgtacatttgttagctattcttaagtgactaggggtagactacactatgatcattaaaataagaaagtgtatctttctataacatgactatataaatgtaatctcaaagccaaagtaggaaagaaatggagagactatttgatttcactccaaaagtgttccatcaccttctaaacctataaaggatgataccagtgttgggttttgtgccataaataaaacccatttcaataaaatcagatttatttaataaagatcagaaacaacatttt

SEQ ID NO: 311922 - DNA, 691 bp, Cannabis indica
gttaccaaacggcacctaaactattaatcaaacacggatttaagagattttgctttaaaaaaaatagagattaaatgctagaaaagatatagtttagagtttagagggttttacctcaatttagtagatggaattattttgaaaacttttctctataataacgataccatatgattcatattcatatatttttcaactaaaagcgacatggccaggtggcccaggttgggttagcacttaccactgttggttcaccaatccatcaagagccatgtgggtgtgtggctatgattccacgcatgttatttcccaactaattaataattacttccatttttgcaccactcctaaagtattttttttttttggtgaacactcctaaagtattaatgtatcaatatatattcctcttccttctatcatttttaacaataaatgactgaagattttcagattaagccgggtaaaaaattatgacctgtgaatgtgatttagtagtataaaatagtataacaatatttcacaatccacctccttaaaataggtgcaccaataaattaagagtgcattacgagctttaaagcttgttcggctgtgttttcaattttcatttttttaaattgtatttttaaaagtgagaaaaaaaaaatagtttttggtcattttaaaaatttaatggtgtttgacacaa

SEQ ID NO: 311923 - DNA, 970 bp, Cannabis indica
tttttaagaaaataaagtaagtaagactttgcatgccaaatggtgaaagtaataagcgagatgtagacagagaagagcatcacgatgaaattattagggtttatgagaagaaaatgaggtttaatatgaggttctctcaaacttatatttaaactcttttgacataagttttatatatatatatacaaactctctcttcacccaaattaaaattagatatgcagaactgagaacacaaataaaaagaaggaaatcattctcaatctcactcacttttcatatatcataataagatttgtactccgaattcgatttaatcggacactcatcgatcaattggataaattttgtgtttgggcattggacctctttcttcttacaagatagtatatcatgtggaaaacatattgaggccatcattgttatttcaatacaacatcaaacataacccagaagaaatgatcgtctcgtgtcttgttcaaaagaagaaagatagaaattcaaaatcataattattagattggcttctatcgatttacctcgagattgttggaatccacctcctctccctttctctatgtcgttttctttagatgaagaacaaccccatttcagaaatcgatttcgatggtgctgttttgatagttacagttgaatacttatttttcgcctcgatatgtaacaggtttcaaaaacagatttttcttttggtgctgttttgataggttctattgaatactttttttttcgccttttttccagaaacagatttttttttttgtggagttttgatagttcatattgaaaacctattttgttggtttaaaaacatatttttttcttaataaagttaacgattctttaagttcacgttagtttttaatacaaaaacaagaatcgtttaaaaaaaaattaggaatcgttaaaccaagaattgccgttaaaccaagaattgtcgttaaataggcac

SEQ ID NO: 311924 - DNA, 912 bp, Cannabis indica
taatgagggataattgtatttaaaactcctgatacaaaatgatctttcatttcttttccctctcatttcattttccttctccttctttgatcttcaaatccttaaaagttttcctttacattctttttcacttttctttttccagaaaagaaattagaagtgtttgacttttacagaattgtttgaagaagatctacattttcaaggttagtggaaaagtttttgctactatttccttttattttgaaaatcaatctgtattttgtgtttcaagaggtagaaaatacatgagacaataggatatatatatatgagactttatttgctttttgacaaactatgcatttctttgggaaatatagacctgaaacttgaataatcacgagttttaggaagaacacctcgagtgtttgcacatttctcgttgagtattctgaatactcgtgaggttcgtgatgaacatcttgaatattcataaacacttctgaacaccagaaataacttagtaaatatgtactttggctattttaatccctattaaaatttagggtttattttttatccttcagattatatgtgcttttgtcgtgaaaactgtctaagtctttgaaatggtgggtgtgtcacagtaacttaatgttcatgcaggcatacgcatgttccttgggtcaaccatttgagacatgcggccaactttcactttttttttactttatagtcgcatgttaggactaaccaggtttctcgaaatggtgggggtgtctcattaactcaatggttatgcaagaagtgcatgccacttgggatactgggaaacccccagccatttcttgaggtacaccattagttgtacatgtgcaacttatatcttgcgaggattggctgagttctcgaaatggtgggtgtgtctca

SEQ ID NO: 311925 - DNA, 1045 bp, Cannabis indica
ctaagcaacactagtattttttatcatttctcaaaaatgtaaacttgataatttctcttctttttttttccagccataatagttaaggaactaaaatcaattttcaacaaattaattaaacatgcatgcttaaaaattcaaaactcataattaatgaatactaattaattaaatatattttgattgtactattcgttcaaaataaaaaagcatatggcctaggacttatatgaacatcaacaaagattctagaatgttaataatttaacttgttatccataaaatacagattattattataattatcaatgtcaccaagacacatatgcaccgattagttcatctttcctgttattaggaataacttgtagaacattttttctttgaagggatgcaccaaaagactcagtcatgtccaaatcttcatttttcattccattgggaagcatccaatcaaagtgatatagcaacaatgcaagagaaagctcaacactgaggagaccaaaagacataccaacacatattcttcttccaccaccaaatggaagatattcaaagttgttacctaatttcgagtcgatacaattactatcatctaagaacctttcgggtttaaaaatctcaggttcaggccaatacgtaggatctcttccaataacccatgcattaactatagtgttggttttagcaggtatctcataaccattaatctcacacttctctttattttgtcttggcaataacaatggtaaaataggatgaagtctcatggattctttgataactgaatttaagtatttcatctcatcgagtgctctctcatttcccaacccttttctgtgaaagacttctctaacctcatcttgtgcccttttcattatcttcggattcttcatcaattctgacataacccattctacagatgatgctgatgtctcaaccccagcaccaaatatttcctagcacaattataaaatattaataactttgatgctgtttgctgtgttttaagttttcaaaatatattattgtatttataagagag

SEQ ID NO: 311926 - DNA, 823 bp, Cannabis indica
atctactactttgtaataaatgatgatttaattttattttttttattatgtacactcaagctttgatttatatatgcatttaaaattatttatcattttaaattctaaattaactttaccttataaatatttattaaattatagtatcgaggtagatgaaagattctctcattcagttcaaaatatttatttaatattgaatttgaaataaatatatgtaactaatgaagaaatatttttttaaaaaaatagttgagatgttctctcaaagtggttgagatgttcctttttaagtggttgagataggctttcaaattggctgagatattgtggtcgagatcttatctctaagagtatctacaatggtaatattttttaaaggtgctatatatctccacatcatccaaaaatatattattttattctatctttcttccacatcattttttacacctttatttctaaaaatattctaatggtataacacattttaaaaatactataattatgatctcacacattataatatatataattctttttccttattaaactattacatatatattacacttttaatttttatttgaaaaaaacaaagcatgaatgacattgtgtggcatcaatacaaatttcaagaataacattattttatctcgagtaatttgcggcataacctccttaagtggtcaggttcttacaactaacccccaattgtaaaattttggtggtaaaacctcctaaacccaagttctgttagcacttagccctttccatccatttttggctgttaactgccatggtggaatgtccacgtgtacac

SEQ ID NO: 311927 - DNA, 1323 bp, Cannabis indica
aatcgtaagtttgtttatagcaatgatataattacataatactaccttttcaaattgttgaagatcatggttaccgaggaattaggcgttgaaaaatccaaccatcttttgaggtatatcgtatacttgaagtaatataaccatttttggaaagaatcaaagattcaaaattacttcaaaagctgtccgggtaagtctgcttggactataatgattttgtaaagagaaatcgtttcttttgattctcagataagggtttcattattcaaattttattttgtggtttattttaaattgtgataggaagttctttgctagggttttcttttggctatgaaatgttgggttttaagctgaaaaaaatggggtaaggccatctttctcattgaatttttctcattggggttcatttaactgtgaaattatattatgcatgtatattgttcatttaactgaatgttgtttcgattgtggttttatcaaaatgatgattccttgtagttattttgtcctaccataccagtaggagagatttgatattagaggttccttaaattgaggttcttgttgaatgttttaactgaaattgcttatttcaaattttttttttggtgttcgtgtctgaattatatttttacaaagttgaataaaattcatttcatttggaaaaattattatgacttaataatggccaaattttacttatactctttcgtgtttcttatttgtaatgatttaaaagaatgttcttggaaacccttgcctaagactgaaaaaataatcaatgaacaagttgcatgcctctggactagatataataatatatgaggtttgagaattctctttcttcccttgctgtcaaactggaaggtcagacttacttgagaaagaggagtttgtatcatattatgtaagttttttctgtttaatttcaagtgtcttatgcaaagaatatagcttcaattttctctattttattcctttgtttggtaaatatatgaatttaacttccattactgcattgacaatgtaatatccatcacttaaaactacttgcaatacataattggtaggcacttaatcatcttttggacaaaatgaagcaataacactataaatttctctaaaagaaatgaacttgatatatagctgacttaaaaaccagataaaaaattcttagataattatttttgtaggaacattgcctgtttgtccacaatgtcaaatgacgatctagaataaaaaaagaatgtgaaaaactaattactattatgtttatttttttttataattgtcctattaaaagactattatatttttttt

SEQ ID NO: 311928 - DNA, 981 bp, Cannabis indica
gggcacaaaacccaacaatctcagccctcctcgaggagagtgagtccacgtgtcatatttatgggagcctgggctcgagtttctaggtaaaaaattctcactataacacaatcaatggaggagtgggatgtgccactattactcccctcaacttatttcctgagaccagcaatcatgttgtagaaatgtcaacaccaatagccactatgggacacttcccgcctatcataccagctgtggtgtctaaaggaattatttaactaaccatgacccaatatacgacactataagaataaatgcaggctttgcaggctgaggtcaacggaaggattaggatccgatgtcctcctcgagtactaaacacgcattcggataaccctcaagtaacaactaacagccgataaactaataatcgtaattgtagagaacaacaaaataaataggagggactcgagttgaaccagcccacgcatagggaataagtcgcaggaaatgctgactgcgaggtgccacaagaggaggataccgagcgacacaatcctcgaagccgagcccaaccgtaaaataaggtaaatgatgttgaatctcattcttcatcctcccaaggtcgttcttctagtgtgtataccaggtctggctctgtggaaacaccacgaggagggagatatcgtgttcacaggggtgatcttcgtgatcacctcaatgaagttttcagggcacgatctcagacgccccgaaatcgtaatgagcccgtgatccccaggtgggcgatcaaggcacaaacaactaaaatatcccagctaacgttgtcaacccacctaacgcaccacctgcaactaccgaggtagtgatctcggctaacatagttgcgattactgccacaccaacgacaactcaaaataacactgtcacactagggggtgttgatcagagtatcctgctacgagcgttaaaaataatcgagcagtagagaaagcccat

SEQ ID NO: 311929 - DNA, 1544 bp, Cannabis indica
attatgtgtgctgaaggtctctctgctctaattcaaaagtttgaggctaaaagaataatccaagggtgtcgtgttgctcaccttgctcaatctatcactcatatgttgtttacaaacgatagctatttcttttgccaagcaagtgagaatgcagctgccagcatctctaatctacttgatttgtttgagagtgcttctggtcaaaaggttaatccatcaaaatcttcaattttttacagtcccaatattgatggcacaaccaggcttcgaatttgttctactttccatatgaatgaagctattgagggtagcctctaccttggtcttcccaacataatttgccgcaacaaaaatgctattgcaagagtcaatagttgggatggaaaatttttatctcgtgctgggaaagaaatcctcctcaaaactgtcattcaatcgcttctcacatacgcaatgagtgtatttcttttacctcttggtacatgcaaggagatagaaaaattaatggccaatttttagtgcaaatccaacactagtaaagggcgtggtataatttggatgtcatgggatcgacttgctaagcctaaagaagaaggaggcatggggtttagacacttacatgactttaatcttgccatgcttgcgaaacaaggatggcgtctcttgtgtaatcccgactcacttgcttctagagtttataaagcaaaatacttcccacattccgattttctttcagccaaacttggtaacagtccaagctttgtttggcgtagcatttggggtgctcaacatgtggcttgcctagggactgttcgtactattggtgatggtacaagcacaaacatattgtgtactccttggctgccgaatcaaaagaataagtgcataacttctagccatccaagtctgcaacataactctgtcaactctctatttcagattaacgattgcgcttgggacataaatgtggtgaccaatttgtttccaactaatgaggctaatataaccctgggcattccattaagtagaacagcaggggccgacttttggtcttggatagcagaccacagaggtctttttactgtgcgaagtgcatattcactgctacaacatgaaaaaccagcagcccctacaccagataattcggggttctggcgtaaactttggcacttgaacatcccactgaaggtgttgaattttttggggcgtgttatctccaattctctgcccacatgtgtcaatcttgtaacaaaacatgtgcctattttaagccaatgtctagtttagtaaaatgcacccagaaaccgcaatccactcgctacttacctacaattttgcaaaagcctgctggtcactatttggctggccgattaatgttgctgctccttcaagttttcgcagctagtttgagaatatgttactgttttgtgatacagagcaagtatgtcgtgcctctatgcttgtttgggctatatggaaatcatgaaaccaagttctttagaagaaacgtaaatgtactgtcaatgatatttttgttgggtttt

SEQ ID NO: 311930 - DNA, 1220 bp, Cannabis indica
aacaaagcattttggtcttcagtaaccaaatgaggaacacaagtaataaccgaggaaaaatcattcgctgaaacttgaaacaactgctgaaaataattcacaacagtagtgggaagaccggtttcccatcccacccactcgccatcgacgtttttcagacgctgaatcaaattggcccgtcttctagatgttgctttggcatgaaaatactttgaattacgatcaccttccctcaaccataactgtttgctcctttgcttccagaaaacctccctttgtaaatagagattattcagttgacactcagcctctttataacaagcaatggaatttggatctcttcctctcttccatttcttaatctctaccttacaagctttgatccgcttcccaaagttacctgtgtagtctttcccccaatctaacaaagcactaccacaagcctttattttttccgtgattggaaggccatgagacagctcccaattatcctcaacaacttgaaagcacataggttctttcaaccacgagttttcgaacctaaaggtgcgtttaggtacatgaattgactcagaaaccggaactagatgtaatgggcagtgatctgaagtagacacttcaaggttatataacttagccaaaggaaatttactaagccaaccttgagatacaaccgctctgtcaagtctagcttccacccaagaatccgtccctctaccacgttcccaagtataaggatacccattcaactccatatcatacaacccacattcatccaaggtatcacaaaagccctcaatcaaccaattcggataaagattacctccatgtttatcttgctgagaagtgacattgttcatatcacccactatacaccacggcaagttgttatccctcttcaaagtccgaattaaatcccaagtacgcttcctcaagcttcgattaggttcgccataaagtccagtcaacctccactccccatagtcacggttttggacagagacatcaatatagttagtgccaaaatgtaacaattgaatatcctcagcatcccgccaaagtaacgccacccccccactcttaccttgagcatccacactaaaagcaccttcgaacccaatggacagtctaagcttctcaatcgcctccttcttagccaacgtctcacaaagaaacaatacaatgggcttcttttggataacaatatcctttatgaattg

SEQ ID NO: 311931 - DNA, 1562 bp, Cannabis indica
tttttttttgtttttttttttttttttttttttttttttataagtaaaatagctgtagtgttgaaaacacaataatgggatatgatgaaaaatattatgaaagggttgtaatttgagtatttttctaatattgtgaaaaatattgtaaattatatacttaattgtgaaatacaactcatattctctgataataactttactttctctttggtatatctctgataaattattatataaattgtgaactacaactacaaataatttagtttaagttttgaattgaatgccatttttttaactgggtatgaactaaatttaatttactattcaagctcaaaaaatattaattataaaaaaaagtccaaacaatgttaaaaataaaaaaagggcatttttaaaaattaaatttcatttcagtccataaattaaacattcaggctcaacccaataggaccagaacccaactacacccaacccgaaaaagcccgacccaatacccgacacacccgaacacttgaaaatcgggttcggttgtgcatttccaagacccaaagcccaaaaacccgaacccgaaaccccaaaaacccaaaaacccgacccgcgtgcagccatatactcttctccaccattatttgccaaaaagcccattatcagacccccaatgttctcttctcttcttttcccactatcaccgaacccctgagcttagaaaaccctctgcccaccttcactcacatctcatcatcatcctcgacttttcttcacttgaaccacggcctcatcaccatcttcacatgaacccagctataccagtcccaactcgcctagtttattatcatactattaaagttggcaaaaaattatgatcatatcatgtattattttagagaaaaaaaaaataaaggagttaaaaataaataaataataattctatatgtgctacttcatgataactgttgccttggattttttccaaaatatgtggccgcagctgcgtatgacacgtggattacaaggacacctcaccacaagtttagctaagtcatatatagacgggcaagtgcacttcagagggtgagtccccggagaggcacataaggcatgtctctcctctccgggagaaggagaacctgttcgaacagtcacttcgcatttaatgcagcatgggaaaaacatcttggaacacccataagaggacatgacagatagcgtaaacctcgtttatggcgattacacgaaaatcaaggggctagtgacggctccattatgaaaaatcacatcaatcaaggaaggataaagattactcttacctaaattcctatgatacctgcgacataggtcatgtatgccctattttatatctcttggaaacttgtgcacatacattgttggcactcaaagacaagtgatccttttttagttatccttacaaaactctataaatacccctgaacaaaatggaaagggggatcgatcgaaaaaacaagagagagagaactcaccaagaacattctctatataagaactctcattaatacaaaagacttgtggactacgactca

SEQ ID NO: 311932 - DNA, 3567 bp, Cannabis indica
ttcatagataaagttcaaagcatcgctgattcgcttgccattgctggctccccagtggatgatcaagatctggtgctacaagtcttgaatggccttgggcctgagttcgatcccgtagtctctggaattacttcaagaagtgatgtcctcaccattgaagaagttcaagctcttcttctttctcatgaaagtaggattgaacaccacgttgccatgagtgatttatcttccaagctgcaggccaatttaacctttggcaatggaagatctggaggtgttcgaccatatgcccaccccaactctggaaattcccacaacaactcatcctctactggtcgtggcaggggttttcccaagtactcaaatcaacgagtaatttgccaagtgtgtatgcgcattggtcacactgcagccatctgtcattatcgatttgataaaaactggactactcccaaaccaggtacctctgtcaatcgtgcatttcttactgatcttgaatttgactgtgatccccaggcttattccaccaccatggtccaagattttggcgaagatagctcctggtatgtcgattcaggtgctaccactcatgttacaaatgacaatgccaatcttgacacctctactcctttcacagggacagatgccttagccattggagatggtaagagactcttaatctcccatgttggttctgtgtccattccctcttttcaccaaaactgtccattaaatatgcagtctgtcttaagtgtccctcgcattaccaaaaatttagttagtttttcaaaactaactgaagataataacattttctttgaatttcacaagaactgctgctttgtcaaagacaagacaacaggaacagttcttctcaaaggcagacttaaagatggcctatatctccttggtgatgtctccaaagtgtctcaatcttccctgccaagttccaaagccaacaatgttagatctaataatgtgtacacttgtactactgaatgtaattgtaactctgagtgttatcactcaacacacagttgtaatcacccatcaatcaataaaaatgcttttctttcttctgtgtctactcaatctgcatttcatgtttctcaacctactaatctcgatttatggcatcacaaaattgggacatcctgctcagtctacactacagcagctgttaccaaccatccctcacataggttcaattaaaaacatgcaattttgcagtgcctgtcaattaggcaagagtcatcgactccccttctctgtttctcaatatagagccattcaaccattagtattaatacatacagacctctggggtcctagccatgaaccatccatggatggattccgctactatattcatttcttagacgattacagtcggtttacatggatctatcccctcacagtcaaatctcaagcctttgacaagttcattacctttaaaagcatggttgaaaagcaatttggattgcctattaaaagtgtgcaggctgatggtggtggtgaatacaaaccctttgctaggttcttggctgatcagggaattctattctctcatccttgtcctcacactcaccaacaaaatggcagagcagagaggaagcataggcatataacagagactggccttaccttgcttgctcaagcaaatcttggcttaaaatactggtggcatgcttttcactctgccaccttcatcattaataggcttcctactccagtgctacaaggcattagtccatatgagtgtttattcagagataaacctgactacaccatcttaaagagctttggttgtgcatgttttcctcacttacgaccatacaactctcacaagattgatttcagatctcagcaatgcctttttcttggctattctgctgcacacaagggttacatctgtgaaaatagtgaaggtcgtatttacattgcccgaaatgtggtttttaatgaaaaccactatccaggcccctctcacaacagcaccaatactcaggtacactctgaacacactactcaattttttcctactgcatccttttcaacctctaatacaaatgttgttcctgtgtcatctggtgtctcaactgatgtctcaaatggtggcttcactggtgtttctgagccaattgctccttccccacaacctgatcctgtcccaaacactatcccaaatacattaccctctgcctccttcccacacaattcaccagataccaatacatgccctgcatctattccctctcaacaacaaaacaccacagatattgcctctgttccattaatcccaacagctactgttccattaatcccatcttctatcccttctaaccaaaataatatctcagaaataccacaatcctcaaccaactcacaccagatggtcactcgatccaaaaatggcattgtcaaacgcaaagcttacttggcaacaaaacatccattgcctgaatccttattgccatctgaaccgaggtcattacaagctgctctcaaagaccctagatggcttaactcaatgcaaactgaattctatgccttaaaaaaggctggtacatggacactagtacctttccaacagggtatgcacatcattggaaataaatgggtgcataggatcaagcttaatgcggatggttcattagatcgattcaaatcccggcttgttgctaagggatacttacaagctcctggaattgactatgaggaaacgttttccccagttgtgaaactggttactgtcaggactgttttaactcttgctgtaactgaaaattggatagttaatcagctagatgtaagtaatgctttcctcaatggccatttatctgaaactgtcttcatgcagcaaccaccaggatttgttgatgaatccaagccaactcatgtctgtcttctccacaaagctctttacggattgaaacaggcaccaagagcttggaatgacaggttgagaacttatttactaaaatggggtttccagtcatctcgatctgacatgtctttatttgttcatggtactggcagcaatctacttatactactagtatatgtagatgatatattggtcactggaccaaacaaagtcctcatctctaagttgattactgatcttaatcatgagtttgctctcaaggatctaggtgaagtgcattattttttgggagttgaaatacatcgtgacagtcaaggaatgttcctctcccaaacaaagtacatcacagatatcttgtccaaagttcacatggaaggagccaagatttgttctactcctctaagtagcacctccaagttgtctctaactgatagtgtctcatttgaagatcctacattgtacagaagtacaatcggtgctcttcaatatctcaccctcacaaggccagatgtcgcgtttgcaatcaacaaactgagccaatttttgaaagcccccactgtctctcactgggaagcctgcaaacgtttgttacgatatctcaaggggactatttcagaagggttacttatcaaaccagcaccatcactgtccctaacaagttactctgatgctgattgggc

SEQ ID NO: 311933 - DNA, 2571 bp, Cannabis indica
taacttatgggttttgcaggctaatacctattaaatggacatcctggagtatgggtaacatggtcgagactgcaagcggtcggggaggtcaaaatcctttgaatccccgtagatgcggtagaggccatggagggttttagggtggtagacatgaaaatccacctcaagctcctctagattgggagcaaaggtttgccaaaatgcaagctcaaattccccagcaagatgaagagatgctaaggctgaggcaaaaaggtcctcctacagtgcctccacagtaagcatcggccgccatggttccagcagtgccaacaaagcaacctattgttgtcatttgtctggagccactatatgagagattttgtaagcaggcgcctccagttttcctgggaggcccggatgttatgaaggctgagtagtggctcactgttatggaaagaatttttaatttcataggaatcgtgaggaatgactggggacttgtgcctcatttatttataggaagacacactcatgtggtgggaattagtgtccctctcccgagacgtcactaccacgacttggaaagagttttaggaattgttcaatgctaagtattataatgaggcagtctgcagtgctaagtgaaaagagttcactaatctggttcaggtaaaaggcatgtcaagaaaagtgtatacaatgaagttctatcgtttagccaagttggcttcgggtatagtaccacggacttcagtaagaaagagaaatatctggcgggtctaaatgcaaaaattaaacatgatccagtatttactaccaatgaaacaacaacttatgtcgcgagggttgacaaggctctgccagccgaaggtgcggtgaaatttcttcaagagctccgagagactccaagtgttggtgaaacccccgctcttcctacttctggatatggtagggatagtgatgattccaccgctaattaggaaagaaagactaccctggattttggtggtttgggacaaaacaaaaggtttcgagagaaccaaggcaatggtggacgctagagttattcttaccctaagtgcccacgttgtaagaaacatcatctcagagagtgcaatctaaaacatgctttcagtgtagcatggttgggcattttaatgaagacttcccttgtaatgactgcatttcataatatttattagaaaaggcaattagcactgcttattaatattttagaaaaggtaattcgctccttctcgacaatgccaaatcgagcccaatgatctggtagaattcaagaaataggaagatgagcacctcatggactatattcaatgattcttaaaggcaactgctaagacaaaaaaacttagtgaggatgcaagggtaacgacactttcagtcaaactcaaggagatgagtcctttatggtccgaccttcgtctgagggcggtctacaccatgaacgactttcttgatagagcggatggctttatcaagctggaagattctgtcacttgagccaagagctcaaaaggcagtaagaagaagtcaacatactccccatcccctgacactaaagcgtagggtaatgggaagaaaggatgttcaaacaacaactgctataggttgtgtaacgccctaaataattaggcacgcttcccaataaacttatgaaaccctaatccctttattgggattactagaaaaataagcgcggaaattaaactttattaataaacggaatgaaaataacttgtaataatttaaaccttataatttaaaagttacaaaagttgggatcccaaaagtatttacaaaacactattacaagttcttttcctttggctgacataagcggcaaaatagagtctcaaaatacatcactggtagaccccaacccgcttggtctagtgtggcccgaacatgtacattcttcgtccagctcctgcactcatggctgatcaacgacagtcttaccctttcctgcacagtagagcacccgtgagccaagcccagcaagacagtataaatcttaacaaatataatatgctcatcatgctatttaaacagtaatgccattcatatatgtctgtatgtcacagacctgcatgtcacactcacatgcctatttatgtctacgtggcgtaggcctatgtgttgcgctcacacatctatttatatctacgtggcgtagacctacgtgttgctctcacacgtctaattacaataaggccttagaatagttcatctcggttctggttaccgagtccaacttgattatgccttgacgcataacccttaatctcaatatgtaacacataattattggtgccactgcaatatttgtctatttgctatagacctgcatgttacgctcacatgcctatttatgtctacgtggcgtagacctacgtgttgcactcacacgtctatatacaataaggcctcagtagggtttacctcggttctggttaccgagcctaacctggttatgccttgctcgcataaccctattcatgaatatacgtaatccatgtattacgttctttcggtggtttatcctggtgatatataccaggtctaacc

SEQ ID NO: 311934 - DNA, 1315 bp, Cannabis indica
  modified_base (33)..(33): a, c, t, g, unknown or other
gcgagtcacacgaatgcgattagacttggtcanattcgcatcatctcgctgattttagctcaggcgaggtttaaacttgaggagtctctcattgacatctaagcttttcttgggaaaattaagtacacgtgtcctccaaacaagagtctggtctcgagtttctaggtgagagaaatctcactataacacgcagctctaaggcaatctgtctccactttgaactgcaataattgatgttgtattcctactaatatctcgtcacaaatactctcaagttcagcaaccaacggggaagggccaccaatacaaaccttagctgctgcaaacgtaacagatccttcgtaatcacgaaccaccacacatccagcatatctcaaagcttgatactaaatcttctcgacagctaccctatcatttggcaactctctagaatctaggaacttctatatgtggcctatccaggaagttgaatgatcaatgacgcttacccagggctattgtgcttagaatagcaatattggcgatgagaactagttcatacttctctatttctatatttgttgttagttttgctaacatataagtattttggtcccagggggactttcttgattgtatatcttttgaaactttggagcaactcgcgagattttgatacgtaactagccattttctcaccatttgtttggtattcgttggatatctggtttactaccagttgagagtcactatagagttcgatgttctgggctacaacttctttggctaattacaagcctacaatcattgcttcgtattctgcttcgatgttggggacaaggaattcaaaccagagagcactttgaagttgatgtttttgcagagagatcagaatgattccggctccataacttttttcatttgatgctccatctacataaaccttcccaacttccagttccagagttggttcttccagattgttgttaattcttgtgcattctacaatgaagtctgctaaagcttagcccttgattgaaactcttgattgatagtgaatattgaactggctaaactttgttgcccacttcagtattcttccgaatgactctggtttctataacacttggcggagagggtatttgtcagtatctttatggcatgagcctgaaagtacggccttagcttccgtgaggcaattagcaagcaataggaaagtttttcaatcattgtatatctggactctgcacccaagaatcccttaattacgtaatacaccagaagttgtaccattccttctgttggataatatttttactaggacctagatttacta

SEQ ID NO: 311935 - DNA, 1553 bp, Cannabis indica
ctttctaccaacctggtcagtggagttggataatcccccgcctgatctggtatttaatacctgtcttttattctccctgtatcactcgagtacatctctagatttaggagatctatctgttagattcttaattgctctatgctttgtttcctatttaaactcagttctagatttaaggaagcttacccttttcgtgcattatccttccctgctttattcgtgtgcccctttattactaaaaatggaagacttagctaaatctttttctgcagcccttcacctcactgatactgaaaatacaatccactctcttgctgagcatgtcgacccaaatgagggacttccaccagccccaccccagtttcatctcatggccaccctcttcacaacaaagaattttaaccacaatgccctcaaaaattacctggaaaaacactggaaaggtcgcttcccagtgagtgtcaaagaaagatcacccaactcaaacttgtaccttgcagcgtttcactgcgaaggtgacagacgcagaaccattctcaatcaaccttggacttttgataaatgccctatcctgctggagattcgagacacagactccaccttatccccagaaactatgaggaaaatacccttctgggtacaaattcacaacattcctttttcacggaggtccatctcccttgccaaattgctgggccaaatcactggcaccctccttgaaatccatcagccctccttacttgaaacttggggctcttatatgcgggttcgtatcatgttcgatgtgactaagcctttacctcggggtatcccaatagttttcccgggtttagcctccccaacctggctcgagttgaaatacgaggacatccctgatcattgctactattgtggccgtctaggacactcttatccgtcctgcactgaatatatgcgagcctcggatgagtctacccaaccaccaccccttccctatgaaaatgtcttgagaggcacatctcgcccaaaccatggccccttcggaatactccccaacccccttatcatcaactcaccaaccatagtatccctcccaaatgccccaacaacctatcaaactaccaatctcataccaatcaatcacccacggggacaagtcctgaaccaggacttctctttccacaacaaccaaactaattatgctgatgccgcaggactgtttctgagctctagccaaaacctgggaattcccccacttggggatcaaggagctgggccttccaacttaggatccaaccattcttttgctccccctggacaactccactccattgcacccccagggccaaactttgctgccttgttatcagtggctactggtggtaatttatcatgctctgtctccccccagcagtcatccaatccagggtcccggggttcatcttccccatcctctagccagcttcaagccccattaatgatatcaacttccactgcccaactggacccgactcctgtgggccacatggctgacattccctcaactctggcgtttgctattggcagcaatgatg

SEQ ID NO: 311936 - DNA, 530 bp, Cannabis indica
tatcgagaaaacacgagaaaaataactatacaggaaaacttcctaaaaaaaccaataaaaattaacatatggcatcttattagtatctaacagacccgttacaaaaaagactaacgaacctataaaaatcatgaccttatgaattattatcgcttaattttttaggtcgaaaatctatctgcattaactataaatttttggagacttattgcaatttattatcttgtaataacaaaagttactcatcaccattaatgaagttattatgaaagataggggtagttctcctaaaaataattatatatattttgattattaaaattgaatatttaaaactatgtatgtattagtaattttctcttcttaatttaaatttgctcacttgctttctcattttttaatttcttcttattaataattaatatttagatataaattatcattaattttaataagctaattagcaatttttcccccgaactttgacatataccaaagcatgccccccgaacttttttggccgttaaaaa

SEQ ID NO: 311937 - DNA, 818 bp, Cannabis indica
ttttttttaacaaaaatacggaatttctgttgctttctaaaaaaaacaaagaataaatgacaaacaaagtagtaaaaaaaacaaaccaagatccatcaaaatgtaaaaagaatccaattttaagtgtaatatgcaactttatcttctttaaaaggaaaaagaacaaaaaaaaagctcaaaatgctcaaatcatgctcattaaatgatatattttagagaaacatttaaagaatgttatgttgcttttccagaggtagagaaatactatgcctataaaatagaattttagaaatatttttcaaagaaatgttaagggtatcttaagagcattttcaatggaaggtaatatttatagttatcaaaatacatatatcatcttaaaatatatttttattttctctttaattcacataaaatttgtcacatttttttaaaaaatactctaatagttgataacactaaaaattatccatcatggtcccaaatcacattaaattaatggactttttaagtaaaaaataacattttctaataaaaaaataagcatgtggtcattgtttatattgagctaacacttcacctaaaattgaaattggtcttgaaaattatatgtattaagacaactccattgatcaactcccattggagatgctctaaggtttaaggtaacatactactattagtacatttcaatttcaaatcacacaattttttaataatcaaatcccacacattatcatttaaggctcgtttagtacatcgtattgtattatgttggattgtattgaattagtattatttaatacaatatcatgttt

SEQ ID NO: 311938 - DNA, 1038 bp, Cannabis indica
aacgtaatctgtatataattttaaattttttttttttaatatacatatatatattattttattattattttatatatataaacacatttgactcggtcaaaccgagtcttttcagtgttggagctcgatctctctattttcgaccaggtttttacagtcaatgcccaaggggttgccgcttgcgtcaagcacgcggcgcgtgtgatggtggagcggcgcgtgaggggaagtattgtatgtatgggaagcatagttgcggttcgtgggaggaggaggtgtacggactactgcatgtctaagcacgcaatgctcgggttggttcggtcggctagtttgcagctcggtgagcacggcgtaagggtgaatggcgtgtcgctgagcacgttggtgacgccgctaacgtgcgctgtgaatgatatggaggcggcggaggtggaaagagaaaacgagaggttttcgtgtttgaaaggagtggtgttgaataggcaacatgtggctgatgctgttttgtttcttggtagtgatgaatctaagttcatcactggtcataatttggaagtcgatggtggcttagtggattaagagggaagggtggcatcgtgttatggtggagactgatagcttagtgatttttcaagccattaatagttaggtccatatgtcatcttcccttggtctaatgatagttgattgtaaatatcttttagcttttattgatgatgttattttatgttttgttaagcatacttcaaacaaggttgcacatgttgttcgggctctttgtttcttttctttcccaagtgattgtagtatgaggaaataagttgttgcataaatgtgtaaaaccttctttaagtttggtgattcatttatgtgtcacatatatacacacactactatatataatatgtttttttttgtgattttgtcgtcatctccttaatctaatttacgttatattttgtcaagagttgtaatattattttatgggtaaatattattttggaccctctgttttacaaaagttactaattggac

SEQ ID NO: 311939 - DNA, 2390 bp, Cannabis indica
cttttcttttccttggtccttggtcagcttcatagcaacgaatctcctcaatgtccaagattggattaaaaagggtgggctcacgatgaaatttatcaatggtttgggctcccaatagttggttaaatgccaaatcccaacattcctttgatgggtactccataatatgggcttgtgtaccaaacgggctttgtggttcagggcccaccttccttgggcttatccgaatgaagttttggtctacttgggctgtgtcatctagaatcccttttagtttgtcattatcttcctttgccacctggactccaacggctaggcaattagagggttctgtatttggctctattccaggaacatcacccaagagccttgcgatttgatgatcagaaggggaattcggtaccgcgtgcccgattccagcctttgcaggcatgagttttgtaccactgcagctgggtacatcttttttcttttgcattgtccttatgacctccaaaggaggagatctgggattatcttttcaacaatcaaatttactgtattctcaaatggggtaacttctccaatccccggtaaagtgaccgctgggtaccggttgatgaccatttcaccagagctgactctggtctccaccaccgtttccacttgtcttctcttccccgggtattgcgtacgaagctcccttgaatccgcaccctcaatctgtaagctaagtctctaattctttagcaattgtctcattttttcatctttggccgccttttgattcactatccactcactgaaccatttcgacagaggtagattgaagggtgaccattcaatggtatcctcagccatccaattcccatacattgggaagaattcgccattggtgtccttgatcatagccggagtcttgaaacaaaacttgtgttcatgtgtcattagtccgcacttgtaacatattctaggaagtttctcatattgatattgaagccataggtccttaatccctgttcttcgaagaaaaaaaccagagaaaattggtttagatagctccactgtggctcgaaaccttaaagtgcccataccaaaagatcccctttcaaagttcttttcgatatgccgaggaagctcatagactgttgaaacttttcccgccatctcctgtaaattcgttttgttccaataaaatggaggaatgctctttaatcgaacccataatggcgtatgatcaaacttgacctcctctggagtgagccatgaaggccagggcataaggacaagcaaataaccacataccagccacggtctccttagaagaacattttcagcgtcaaaacttgttctggatgagaactgtagcagcccatcatccctttcaatccagctccatccagagatggatgcccaagcattgttcaaagagccctgtatcgcctttcttccaagtctagtgtgacagaagagcttccccaaaataaccttgcacgtctcattcgggggatcaacttcaccgggatgaagatcacaagttatgtcctccacactaacttggaaagattcctcaaataagtcattaagtgttgaatcagccatatctctataagaaaagaaatggaactttagcaccctataatcttgataccagaccaattagtctgttgcctcgaaaaacctcacgcaaaattaataatacaatggtaaactcctctatgaagaagaagaagcttacatactcttccaccggaagttagcacatcgagtgcaccaagctatataagaaattctcattaatattccattcttgttctcaaatcactctactttctttcttctgtttcttgcagggaaggctgcccaaagggattcccccaaactctcttggagtagttgtcgttggagttatgcatttctatcaaattgataattgtgcaggagaacttaataccatttgcaatatgtggtgtaaatttgatagcaaattatcgtcttagggtaccatattacattggtgtcggaatctatatttatttatctatctatatacttttgaacctcaaagcggtgaagtggaattttcaatgatcttcttcatgttctctattttatctaatcttcttatttattagttttttaattatttatttcttttttcactttatctattaactcatgtttatatattaaatcctattaattatagaaatacatatacataatttatttctttatattatgtgacttttagacattgtatcttataatagttacaaaaactaataataatgatataataaattatataagtattttattttttatgtaaaagtactatataaaagaaaatctatattaaattgcactaagggaaaaaaaaaatatacatttaatgtgtgtatataaat

SEQ ID NO: 311940 - DNA, 688 bp, Cannabis indica
cacaataaacaggatcaggtatgtgaaaagggtttagggcataaaacccaacatgtcttcattcgcattctctccgttcgtggtctgcatttgtggtctctattagtagtgttgatctcttcgttcgcggttgaggaaaagattggcgagatttcggtcaaattgaaatgtagccctctcagtcggtcgaattggcgtggtttcgatcaaatggtggcgatggtcatggtcttggatcttttagtggggttttggtgggtatttcagtaagagggaaagagagagagaaaacgagcaagagggaaatagagagaagttagaaagttttgaaatgatggggtattttggggtacacataaaagttgggctatttcacaaatattgggtagtttaagttttagttattagttttaattagggctatacataaatttttataaactgcccaacctgaacaacccgccaaaaccaaactaagataacccgacgaaaaaagcaaactgaaaaacccaacgaaaatataacccattcattctttatattgggtaggttaaaaataatatcaactcgcccaatcaacttgaactaatctgaccaaccctattaaaatggtttttttatatatgtttttaatgtatataatctctatattatataatttatatacatatttataaaaaatagaaag

SEQ ID NO: 311941 - DNA, 2169 bp, Cannabis indica
tcttttccatcctccatattgaacctcttaatgaccttttcaatgtatgattattgtgtcagcaacagcttcttctcttctcctgtctctcttgatttcaatgcatgcctaggatttttctagcaactcccatgtctttcatctcaaattcactgtttaggacatacttcagtttgcttatttggttttgatcctttcccataataagcaagtcatcaacatagatcagtaggaaggttgtagcttgtgaattcaaatttatgaaatacaagcatgtgtcaaacttggatctgatgttactaacttttgtaaccactgaatcaatcttcttgtaccattgccttggagattgcttcaaaccatatagtgacctctttagtagataaaccagttccccttctttggattccaccttgaatccttcaggttgctccatgtatatagtttcttcaagttttccattcaaaaatgctatttttacatacatttgttgtatgtcccagtcaagttgaacagcaatagtaatcatcattcttattgtcttcattttaacaattggagagaaaatttctaggtaatctaccccttcaacttgtgtgaatccttttgtaactaatctagccttgtccacctttggctcatcctcagctaactctaaaaatccatttgcatcctattactttctgtccatctggtttcaatacaactattcaggttctattcttcttcaaagaagtgatctctccattcattgctgcattccatttcttggagtgtttgctgttgattacttcttggtagtttctaggcacatatcgtttgattctttagctactacaagtgcataggcaatcatgtctgcttctccatatctggcagggggctttatttctctgcataggcacatatcgtttggttgtcttcctcaatgtcctaatcagtgccatcttgaacttgcaggtatgtacttgtatgttgtagtggctccacctaaatttgcaccttggactgagaactgtcacctaaaacattaggtaaaatacctttcacatttcctttaaaagggaaatcattctcattaaaaataacatctccactgatcaaaattttattagtttcaattgataacaatctatagcctttgacaccaatttggtagctaagaaaaacacatttaatggacctttttcctagcttgtcctccactgtttgtgcatatgcagcacaaccaaaagatcttaagtgcattagagaaggaggcttaccactccacaattcttcaggggttttgagatcaatagctctactaggacttctattttattaagtaacatgaagtgtacaaagcttctccccaatatttcttgggcaaaccagagtcaagtagaacacatctcaccttgtttagaagtgttattcatcctttcagtaaccccattctgttgagggtttttgacaacagttatatgccttctaatatctgtttctacacatagctcatcaaactcatcaataataaactcaagaccattaccagttcttaaagatttgacccatttatcaatttggttttcaacaaaagttttccaaattctaaacttgttaagaaaatcatttttttttgtttcaataggaaaacccatacctttcttctataatcatctataacagataagaaatattaatttccactaggtattttgaccctgcttgcaccccaaagatcagtatgtaggtattctagcaattgttttgctctaaaattgctccttgaaaatttgattttgtgttgttttccttgcacacagatctcaaaaaagggtaagtttgcatgagtatagtttaagagtaaaacttgtttagacaactccaccaatccttgctcactgatatggcccaatttggcatgccaaagcttggaatcgatcttgcctttggtgactgttgcagcttgtgcaagggtcattgtttttctatccaggaagtacaagccatgtttcttgatacctctcatgacaagtaatgaacctttagtgatcctcatagtccccttatcagttttgtactcaaacccttcatcatcaagagtgccaagagaaatcaaatctcttcagatcaggattgtgtctaacatttatgagagtttttgatagtgccatcatagcttct

SEQ ID NO: 311942 - DNA, 2217 bp, Cannabis indica
ttttttcttattttgtttaaacatcatgaatggaagttttgaattgagtatctttttaaaatattgctgttgaggtatttgtttgcctttgattctactaatttgcctataaattttgtgttttttttataagttgagttttttgtatatatgtatataaagataccgatgtcctatatgtttatgaaatgtcttaaagaaagaagtcaagaacacatctctgattttaatttttcttcttctttaagttaaattttttttcttcatgatagtgttctggtattctctttattgatttcgtttttataatttagtattttatttgcaaatttttatattaattgtttataagttctttttatcgttgtttagatcatttattattttgagcttttttcggttttaacaaagaaaaaaagtaattcctataactattttctatgtaacaattgctattattggattttttcagttttaactaaaaaaaaataataatattacaaaaatactttcagctagctaaataaataaatacacagcccaaataaaaaaaaaattacataaatattacttacacacaccttcaatccaggatctatgcttcctaggaaaccatcgagcaactacacaacaatccaatgcaactcaaacgaaaattcaactagaaagagaaccaccattaattctggcgatttcacctaagaagacgacgagaatcaatcaaaacaagaactgtttcgaattcatgaaaaaaaagtgtagaacaactactacgaaactaactagaaatccagtttaatttgcatacaactaatgtcctgacttcaatttttagattcaggaaatgcaaatcttaaaactttgaactagagttcccaaacaatccaactcaagtataataaaaaaattacatcaatactatagtaaaatatttacgataggtgtatttttgttgttttctaaatttctattggtgaatttgttcatattaaataatgaagagacatgtagatagagttacgtacgtgaaaatattattctgatttttaatgttgcataaaagttgctacaattgcacaaatattttgctaacaattatttcgtctgattgaagcattcgtctgatgcaactttcagccaaccacccagtaaccttcatctgattcaaccttcgcccaatcacccaacaaccatcatctgattgtgtaaatgatagtttaaaaagtattttggtaattaaaagtacataaaagatataaatgttgtccataccttatggaggtatttttgtaaataaaatatcaatttgtattttttatgtaataatttctttattttattatttttttaatgaacaaattttgattttctaaaaacccctataaatagcaatttcaaaaaaataaataaaaaaaaaccgtataagagcatctccaaggagcataataaatttggagttacactatcactaaatttagtgtcaaaaagtattaccactccaactacaacagcgaaaattacactaaaaaatatttcttattattatattatttttataataaaattaaaaaattaatatcatattaattaactaaaattaccacaatgtacccatttaaataaaagagtgacgcgcgcaacatacagtttgaactttattttcagcgtgttaaatttctccgatttttcaaaattttacatgatatcttaaataactataatgtacacgactatgaataataatagactaaaaaagtatcttgaatgtcaaaaataggtacgagtacattagtgcactacttttaaaaagatacattgtctttgaaaatgttaatttttttttgaatttctcaaaatttttacaagatatcttaaaataattataatatgcacgagtataaaaaatattaggtctaaatttgtcaagtgccaaaacatacattactttcaaagaaaaatgcattgtagactttctcaaaaattgagacaaagtattacaattaactacctggaaaacttttcatgtcaaataatctttatatgtgttgtaattgtatgagatgtttgtaaagtagtttttatgaataaattaatctctataatttgcaaattaaactgaatgcatactcagattgaagttccgaattatgacactacctattgattacaaactaaataattatatgtgttatattatttataataatataatatata

SEQ ID NO: 311943 - DNA, 1269 bp, Cannabis indica
aaactctccacagtctcttccttttcctcaaaggaagaggcactagtagtagacgaacacgaaatttggttcgtttcatttggtgagctttgtgacgaacaaatctccgagttggcttgaatttgttcccacggagtaaccggagaccgaacctgatgaccaggcgcgggtagctgatcaaggagaagattaatcaatttttcagcgtcggaatccgaaattggagggaagctctcagacaaggccataagaaaagccctagatatactcaaattttctcctcctccaatactgatggccgacaccacaacctcgcctgtgaactccactatctcagctgtgaaatccggtgacaattcagcggctttgcatacatatctcaaaaactctgcaaagaacgacgccatcgcatcagtgccgaatgcttgcggccaaaatgatggactgaatgaagccagaatagaatgaaaaaactccaagaccagtgttttaggacggagattggcggaatctgggcatttggagagtaaccgagccacggcaaggagggcattgatttgaggacgcgaaacgctagcagaaccagcgacaagatcctcaggcgaagggcattggctacaaatccaagacagcttctcagataactgaattggattctgcgcaattagatcgcagagctcgatcaaagcttccatagagaccaatgaaagaacaaaaatatctttcttactattataaaagcgatgtattcgaatatcggattaacgttgagaacaacaactccaagactgttccccctaaatccctcgcccaaaaccctatcgagatagaagatgacgatgataatgattctcaaaagcctacgagtggctccaaggagaatgctaaagctttggctaatgcgtctcaggagaaaagagagaaccctgagattgaggagggtttactggatggttcaccggagggcttcccgatcggttcatagagattagttctattgatctctctctctatcactcgaagttttctatttgtgatatacgagaaaaggaaactacaaaactaaaccgcttttcgcgcgcttgtcttaatatttttttaatatatatatggaaattcgaaataattttgtaaaattttttctcaagtgaagacattattcaaaattttaagaaatttggaaaattcttaaaattttgtaagttatcttaaatagttataacgtacatgaatataaaaaaaaaaaatagactaaaaatttttctcgat

SEQ ID NO: 311944 - DNA, 1886 bp, Cannabis indica
aaaaaatgttaaaaatactgtagggctgtcatactttttgtaaattttaattaatttatgatataatccgtatttgactatattggtagccaggcccacatcatcactttggactcttgctcggccaacaaaatttgaagaacgggctaggattaaggcccaagaagacacggcccaaaaggttactacagtcacaaaatgcaaaacttatagaataagaaaagggaatcttacaaaaatacttattttttgtaatttttatatttttactgtcacactttgttcttacatttttttacattgtaccaagcactacaaaaaatcttacttttaatcacaacaaaacttgtgactaaaaataaaaaagctgtgactaatttttaattaccattcctatgttgtgactaaaatattcgtgtctaaatgtattaatcacaaaagttacaatttgttgtgactaaatgtggttttagtcacaatacttgttgtgactaaaagtaaattagtgacaacttgtgtctaaatactatttttagtcacaagtatttttttgttgtgaccaaaagtcacatttagccacgaaaaaattatgttgtgactaaaaagttgtcactaaaagtagttgttttttatagtgagtttttataaatattgtgttaatatttcaaaattccaaaaatactttgtttcaataaataaaaaaaaacaactaaaaataactctaaaacaacttaacaaataacataaaacaactataaacaacaaaaagataactagaaaaataacaaaataaagacacaactgcaatatgcaaaacaatatcaactcctcaatatatttttaaattacgatatttgtttatttaattttgacaacttgatttatctttttgtactgctacattatttttttcatgaaatacattgttacaactttatactttaagaaaaaaaattctcttttcctttttgagttagtgacggttaaaatgataatttattttttaaaggttaaataaataattacattaataatagaaataataaaattttatgattttaaaatcgggtatataatatgaaatgatgtattttaatattaccaatttattatttaattaatcatatacttaaatacagaataataatatggtattgaaacagttattccgtaactacaaaatacaactatgtaactgcagaataaaacttgaaaacaagcagtgcaaaaaaaataaaaatacacaaagtttttgtacgtggtatcaacaatcattgcattttgttattagtccatggaccatacccagagataatatttattagataaatagactcccttttattgtatgtcgcaagcttgatgtattccacattctaatcgaatctttcgaaactcaaagtgctcaaaatctcttgatctccttgaaaagacatgcttgctttctcctgaggcaagacttgaaaagctatctcttgaaagcttgtagaaccttcttcagaggtagcacaattattcttcttcttttgtagacttgattacaaactcaaaataatacaaaatacatgaatacatagtatagaaaatcaaaaatagaattaacaatctacccctatgacacttagattgattaaatattttataagaagaaaacatgtatgaagtgttagaaacaaaataatagagtatagaaaatactcctcctgcatgaaagtatactaacacataaaacaacaactttttcaacgaagaagttcacaaactacaaacacaaacaaacaactcctcctgatgagttcaacacaactattcactctgagtagtggacaacaaagtgcataaatatttctccccctttttgtctatcaaagaagccaaagacaaaa

SEQ ID NO: 311945 - DNA, 1320 bp, Cannabis indica
aaattaaaaaaaaagtagcagcacaaatgcttctagaacaacttacaaaaatgaaatatttgcataacaccatataacaatgtttctttcattgtgatcgctcaattaaagcattccatcttctgcaatttcttctaaaaattaattagctcatttcacactaatttcatcaatttcttattttgtataagttttttttctcattgcactggaatgagaaaagataaggattattacatatagtagtaattgtaataggatagaaaaatattttattatagtgtatataccccaaatatatatagcttacttgagtggttagccaatcaatagatctaaaattcatgcaaaattcacacatgtatcttagtatataatatccacactcgaaattcgatatttgttgaggacactgcacatatttatgaaataaaaatacatagataattaaaaatttgtagaataattactacattgtaatatattaatgtaattttattttataacttacttttatagatttctatgtaatgttagacttttttagttgtctcttattggaagcattgcaataatcaaaagtcctaataaacaaaagaaatattaaaataattttaaaataaaaattaaattagactaaaccataatattatttaacttacattgccattagagatttaatttcattaggtgggggtaatccaattgaatcatgccaataacatgtttcacgcaatacatcaataattgctagcatccaatgaaatctgttgaccaccaaaataagatattatgtgtaagtaaaatatattgatgatgtaaatagttaactaaataattcttacccagtattaatagaaagtagccaaaattattccgcttctgttccttgcatgcgatctaccattgtcattgcattttgcgcttgacatgaatccaaagctaaaattggatgaaagaaacaaaaatattgtgctcgatttgccttcaccaacatttcatgtaagatcttaaatattacaattggattataaggaaaaactattatttagtgcattaagtgtaattcaacgaccaatttttttatctaatgtaaaatattatgcaagcagcttcaatctgtttcatagtgcctaaattaattacgtcaatatgtgaaatatgtaaatattcatcattatccaaaatttatgggtccatgaccatgcaaaatgtgacagtcagtagtcccgtgatccgtaaggggaaacaccgggtaagctgtgcaatcccacaccgcctgggaaagtttaagtgagatgattctaagactgtgtaggt

SEQ ID NO: 311946 - DNA, 665 bp, Cannabis indica
atatatataacacaataagtacattctaatatttagatcaatatagtaggaaaaaaatacctcatttcgaatcgagtagaatatataacagttgacgttgaaaatttagatacaatggccacaaattattttggaaattgcataaaaaataaaaataaaggctgatacaaaatgtatgagaggttagtgcagaaagaataaagaattggacttaagactcaacatacgtgcatttcttcaattagtttagatttatatagcatatcttagaataaatatcagaatttaaaaataaatttttattatcataataaaatatcttaaaaaaattaactgcaaatatgagaacttaacacgtaaacttttattattataataaaaactcttagattaaaattatttttttattaaaataatttaaggtgattctacagtgtactcccttaaaagggatagattgatgtaccttctacttaattttttagtcaatttattttcatattcatgtacgttataactatttaagatatcctacaaaattttgaaaaattcggaataatttataatttagaaaataatattcaaatagtctattttacacgcgtataaaatataatagtcacgcgtacgtcggtcagtttggtcgatttacgttacattttatt

SEQ ID NO: 311947 - DNA, 1128 bp, Cannabis indica
ttcttaaatccctcaattttaagaagaattgaaaattttgagtatagagcgagaccaccattctttttcttttttctttccctttcgccaaacaaataattttacatatatccctccatctttttccttccaacccctttcctttcacttttcattccaccttaccaaacatagtgtaatttcttgttactacaattaatgtgaaatatttgagttaattttccatgtcaaatatttattcataattaaataaatttatactcatgatgattgaagattaaagattgattggtttaaagtgagaaattatttataatgaaagactgagagtgagctggaattggaacataagccataaatattgatatatgttggtgaacattacaatattattcattatctaagctcatccactaccattattttatatgcatatataaatataaatatatcaacttcttactttattttcttgcccaccaattttatatcctttcttaatgatacatttcaatttagaatagaaggaccactatcattttttattttgtttatatatatgctaaaatcaaaggaccactaatgctatattttgctattacaagttacaaagaaaaaattgttagtacctataactatttgtactcaaaaaattatgcaatttttatttagccaatgccaaagtatacagcattactttctatttgatctctatatattggaatcgaaaatttttattcttctatcttttttattattattaacaatttttataagaaaaaatttctaatttgattcgtgtattcaacttgaatatgttattagcttttctgttttgttaagtaataacttgaatattgtattctacaaaatagatcaaattgatacttgaagtcaattttagtaataaattgatacctgagctcaattattttcaataatcacttcaaatatatgttgaattgtaacgttctcacttcacgtctccattgagttcttacactcacggaatcatagctcttatacacgagtacgccactctgactgcttcatggaatgactattgaccctacagaccaacacgagtgtttccaacgtgctttgtcctcactcgcacgcttcctggga

SEQ ID NO: 311948 - DNA, 1151 bp, Cannabis indica
atgaacgcacattaaagatatacagcaagccttatctcatgaggatgcctcgctgagttaactttgatggcgagccaaagctcgtcatatatcttctcgaggttgatattgcttttactttaattttgacacgtgtcttcctctgatgtgctcattgccccttaaaaagagctttttataaagggtattttcgtcatgatcctctttttgaaaagatgcatgtcctctgattttggcggttgtgtggtttcgaggtacatcagtattaaatgaccatcttttccacttctgctatgaattatgtccgtaggattaaacctttttctaatctgacgaagccaatatcgagagtataaaataaggaaaaaggaatctcctttgcattatttcctccaatttagaaagtttgagaaatctttaagctttttgataggaatcaccgtcgagtttatctgaggacttgcatgctatctctgtccttgacattttttctacgagtttcttccgacttcatcttctcaaagcaatccttgcttcgttcgaagatttgtagacagagtaaccagtcgttgtcccaagccctaacttcaaatagtaagttgctttcttcctttttgtgcttgttatattgtgtttatttgctgcttaaatttgtttgtatcattgccacctcatttggttttaatagtttttagggtcaaattgtgcctaggtccatactagggttcaggtaatacgtaggttttttcaaaatctctaactcaccacctttgagtttgataaaattctttccagggattgagattgctttttgcttgtagtaatatcccactctagttcaggaatttatcgtccagaagatttaaaatttgagtttcctaatgtctcaatgtgttgagaggcctaggacgaaatttaaaatggggccttttattttacaaaaaattaattattttacaaaaaattaaaataaatattattttttttttttgctctaagatattatttattattgaaattttgacacaatataattaattcttttatcttcatataataaataatctttctcacacataacatactttttaggacttttgtaaaaaaaaaaaaaaatcaatagtatatcaaaaattatattaattcttttt

SEQ ID NO: 311949 - DNA, 635 bp, Cannabis indica
cctgccttgcttggggtagacttcaggtcaaaaaaccaactgacctcgtgcagagaaggcacaccccacttctgggtggcgtagaggacaaacagggtagacagatacttaatgccctttggagtaaactgggtcggacagaggcagaagtaatctgccaccttcttgaagtacgggtgcaaatgcaacattgccccttgtttagtatgagcacccgaccaggcacacatctccttcttcgggtttgtggctcggtgatttgaggcagggacataacattcaagttggcccagatagacagactggtccaaatcccttaggcatgcctcaatgatcttggacggagggctcacccatctggcacctaaggcaccttgcctcctgtaaggaactgcagccgtaagctcctcagtgacttagtccactgcttcgactaggacttcgtcctctgcagacactggctccccggcctcgttgtaacccccaaaatttggagtttcagcctcctcctcttcatcagcctcggaggggctgccaagacagacatcgtcctgttcctcaatttcttggacttcagcgtccccctcatgatccccctcctcctgaacgggcagatcctgttcggcgctgggtaa

SEQ ID NO: 311950 - DNA, 2632 bp, Cannabis indica
tttttttttgtgtgtgagttctttctttttcagttcctaattctgccccttttttcgtagtccctttcttatttatgtggtaagtcctttggttgcatggatgatttgtcctcagcctattcttctcttgacgtgttctctctgctcaccttgttttgccacgcgtcttgttgttaggtgatggctactattttttgtgacctttgggtccggcggtatcgtgtcttatttttggattgtttatctcacttctttggccagcggtctttcttctgttggaacttctttttactatccgtggtgaacgggagaatcacaatgtaaaccttcgttttgatgccttttctcgacggaggtacttgtttgtcgtattctaagacgcttctgttctatgccgccctattcttctaaagaagtgaatttcctgtcggtgagctagatggaaggtcctctttgggtccttcttgaatctatccatcatatggatcttcctccgtcagtccgaggtgataggctttaaaccctaacttattttcttctaatttttccgtcggcatttgtgtgtcttcctagtttttcttactgttacttcctcggggggtggtccctattttgtctttctcacttttgttgtttgtgctttttaccttttatttatttttatcctttggatttccaactgagtcgtccagcattgggcctttcttattttcattaattattagggttttacacttttgggaatctgttttacttgggcctttgcacattttacgccttattgggccttcattttttttttgcaattccccccccccccaaacagtcctatcaagcatatcctcaataccatggggaacgatcaagtgaaaatatatacaggggcatctctaaagagaagattttcatttaacacatcctcatgttggtaaccacacaaatattcttccttttcaacgagccaatctcatgttgctaattgcactaacattcctcctcatcaaagagccactccacatgttggtaaccattccaacaatcctcctctccctgtaggacttgattatggtataccaaatggaaatcctcacataacaatgtttgaggaacaactccaacaacttttgagtaacaataaaatagaggagtatgaatctaatgaagagacagagcctttcatgtcttatatcttggtattaccttaccctctagagtttgaaatgcaaactacaaccaagtatgatgggaccactgaccctagaatccacataagcgactttaatactctcgtgcaagcacacgaggtggttggagattggaaatgtgtgttatttcttactaccttatctgaagccgcatcctcgtggttcaaaatgtttgaaagacactccatagtgtcatgggaccaactctcatatgcttttaaaaaggagttccgagccgcgagaacccgcaagctagaatgttcttccttggccaatgtgagacaattgccaagagagagtttgaagacctacatcaaccgcttcaacattgaagttaccaaaacccatggcgttgacgatagtgcaaggctgatggcactgggggcaggtattgcccatggttccatattttggaatagccttcaaggaaagaacgcacacaccattgacgaattcatgaagccagcacaaaaatacatcaacattgaagaggcaaggatagcaaacaacctccctctccaatctttgcagcccactcaagctgcattagcgccactagaacttactaatcccactaaggctgctaactctttaaacaacaacaaaagagaaagcatagatggcgaggacaaaagtcccaagaagagtaggagtggtggcccttatcgcccaatgtatttaatctacactgagttgacagaaacccaaaagaccatctatgtggcgaatgagcaccgagttccattctgagttcctaaacccatgaagcatgatcgagccaagagagatgcctcaagatattgtcaataccatagggacatcgaccacacaactaatgagtgccgaaacctcaaagatgaaattgagactctagtccttaatgggacacttacccattatgcacaacacaattttcaaggaggacatgtcaactagctgaaactccaccaatggagcgagaaggcatttaatatttcttaagtttatctaccttgttttttttaaagacacctttggtgcaatttttatttattaaactaccacctttattttccagaatgtaaatagttaaactcacatttacaagagtgctacaataaccagatcttttactattatgccaaacctaccaaagagtaaaataggtaatacttaacctataaatactcgggggcaaaatagcgtagatataacagtgcttgcaacaaaaaaaaatctcaaagtcgttactgatacaccactttaagtgcgtgggatttcaaaaatttttgccataaatattttttcaaaatttcacctcggacagggggcaaagtcggtatacaggcgagataaaagacaagtgagggcgctctaaggagccataactcaaaaaaattctgcttaaaaagacatcttgaatgacctacatttgagactttgacaag

SEQ ID NO: 311951 - DNA, 722 bp, Cannabis indica
attcgggttatttgggcgggttagaactaatattcaacccgtccaataaattaattggacaatttgagtttttgtaaaatttttcgaattgtattttttgtcgatttatttaaattaggtggtttgttaatatttttgaacagccctacttgcagctattgtgtgcaaggcgttgagtggtggcacatatgtttttcttcatgggaggcgtactcggttttagtatctacaatttatttactttgaaccctattaattagtacctaacattaaccaataaaatcaaactatttattgctatatctgaactttaaatataatttataagagaaatgctaaaagcactagtagtgcctagcactctcctatgtgttaatatcgctattggtctggaatgctcaatttataattataaaaacacaagtttgtgtcaatttttaatgaattttcttagcatattatattttagaaaacgaagtacgacgccaccagtgacagacccactttgattgatgtgggggctatagcccccactaacaaaaatactgcctttcaaaaaattaaatgtaacttttttaatttcataattatatattaaaatagtagaaaaagcaagctcccacaaaattaaataaatctagtaagagtaattataatatagatataaatattttttaatgataaataagcccccacaaagtaaaaattctaggtccgtcact

SEQ ID NO: 311952 - DNA, 923 bp, Cannabis indica
ttcttttgtttcttatccttgggtagccttttggaatcgtctttcctctttgatcctgaggctttcgattcgacttcttcaacagaatcataccccaattgccttttggattccttgacttgatgccttctgaacttattctccaactcgtccattcgcaaatggagtaaatccctttgttttggactaagtcgttgacgaagattaggttttctcaagttcaaatattctcgtaagttacaccggtcgtgactactgtcggaccttgctcttcctatatgctacattatgccttttgattatcgctggaacgagtgttctctcctcctcgcatggatcaattatgagataccgtacgcctcgcggtacccctcgcctcttctcgttctgctcttcctcttaaggtttgattcacctcgttccccctataggggtttgcacgagctcctttcttatgaacttggagagagggttggcgatctccgtataatgttccacatgtcctaggctgcgtccctagaatttcctcagtttccttaagttgcctctcttgagatttctgggaatatctttgggttgcctcctgccccctagtttgtgagttgcgagatttgcctcgtaaatctctgcttccaaggtcaagttaattttgggaactattctcctgcgctgccctgactgtggctatttcatgctctaattaggcattacgttggtttgcttcctccaatcagcacctaagatggcaattttctaactcaacgattggtatgtacctggttgggtcttaggcaccatcttcatcaacctggttaggaagtgaacggatgttgtttatcctaggcccttcgagtctgagtccctaatactgggttttctcatagccagtggccagttcaggtgatgaatcaatagatccctga

SEQ ID NO: 311953 - DNA, 946 bp, Cannabis indica
aatcaatattttggacttcgatcagacttggacctaaatctcccccacggtcctggttctgaactcgacctctgaaccaaacccgaatttgtccccaaacttagacctgacttaaataaaatcaaataataaaaataaactttacataacacatttttattttctattttttaaattgaaaaacaaaaatagttacagaatgcattttttttttcaaaaacaaaaattttacttttattctgtgattaaaaaaaatagaaaataaaaattttaccaaacgcacttatatttttttttttctgcttctttttttcatatgtgcttctaggcaatgttgccatgatgatgataatgatgataatagtacaatatacatcctaagatattcttttcttggattcttttcagaacatgttttgttcataagatttatatttattttgcattcaagttatatatatattatatgacactctttcataaaaaagatataatagatttattataacaatataagttaattatttattgtcatgtataatagtttattattattactaattaaatatagatactgttaaaaaaatatatatttatatatatattaatttgcagctaacatattaggacaaatgaatattgttttccattaaacagcagaaaagaatattgtttagaaaaatcgattcccctttaataaattagcttagaaaacttcacctaattaaggagaataattaaaaaaattatattaacttttattataagctttaagaaaatgatatattaattgtgtctacataaataaatgtacttaattaattagtttatttgttatattctggctttcactttttacaaaatgaccagatactcataactcgattctcattgattagcatcgggggcggactgtccccctgaaaaaaaaaaatcgagaaaaaaa

SEQ ID NO: 311954 - DNA, 844 bp, Cannabis indica
gaaagagagagttctctatttttgtttttttctttgatttttgatttttcttagtttcccaacctaattcattcattattcttcaaaaagggcagctgtcaacatacacaaaagccacctaatcccctctttaatatgacaaaaatacccttaaagcttaaacttaggttaacttcaacgtaggggtaaaatagtcaaaaaccataaccccacgtaaacccagtattctattttctccaacatacatgccactaagaaacaggttctagacatacccatgtgctaaaaatagacatttatcgcattttccattgtcgccaagcaaaaattataaaaataacataattaatatataattcaaataatacacctagagtataataaaatctccggaattgaaaaattagaaatataatgcccactttgataatgggacccataataaaataaatacacaagtaattataaaaataccaataattaatactaattgcctttactaatctacattatgaaattgggtcattacaagctataaaaggacaaactgataaaaatatcagtgaaataatttcttattacataaaatagaaaactaattttattttctattttttttttccaaatagttacttagggtcatgttattattgttattttggtaatatattattgtatttgtttacataaataaaacaaatttatacattttataaaaatagtgataaatcatttaaacttcaataaaaaatagctataaatataataaattagaaataacgtatacaccatttttttttttgaaagaaaggatgtatcatattaaattaaatcagctgttaca

SEQ ID NO: 311955 - DNA, 942 bp, Cannabis indica
ttgattagcaacgagttgcacaacatgtttaaaaatcacgtaatacgcctttgttagttagggtgttacagtataggagatgaatttgggaaactaaatataaaattacacgattctcttaattacataaaatcaaccccataaaaatagaaattttaattaagatatagttgtagagatacataatgaaaatatctttgaagatccctaactgccgcatcccactgtataaaggaactcaactaagaatatgtgattttcttggagaagtacaaggtatgaaatctattcggataatactagctaaagaactaaagtcgaaaaaagcggttatgtcttggatcagcaacaccgtttcaatgagaatcgagaaatttgaatatggatttggaaatcgggtatacaccctcggctggtgatgatgctttggcgagttctttgtgagtgtatcccaacaaaaaatagatcgccattcctgaatggaaaagattgtcctttttgcaatgaggaagtggagtcttgcagtcatcttttcaaggagtgccccttggtccgagcaatttggttctcttgctctataccatgtcactcatcgcagatacctgggacagacatgctaagtttcgtggagaacctcagtgtaggtctgtcaaggaaggagtcttttgaagtcttgatgacggctgcttgtatttttgctgaaatctggtatgagagaaaccaagtcaatatgaaatgcaagattgcagagagcaaatatattctgcttcgagttcaaaaaaaaacaacgagacttttccaccattctgcaggagactcaacatctgcaactgcctgattggaaggacctcatgccttctaacttagatttccctggggtctatatgttggaattattttatcaggatctagatttactaacaagtatgtttcattaacatc

SEQ ID NO: 311956 - DNA, 974 bp, Cannabis indica
attttatttattaaaaaataaattcacaattttattaattaatattttgagttatttatcaagaagtttaaaatttatctagtattttaattttttttttaaaaaaaattattgttgtaaaaacaataaatagagtggcgtaggaaaaatagtatgttcagcataatgtattattttcatatttcgatcattcaaagccgttattattgtatctcacttgttgtttcattatatctcatcattttttatcaccgcatcttactatttgtgatcaccgtaggtcacttgtagtcgatagatagaaagaataatggaaagtattgtgggatggaaggtattttattattttactattaatattatgtattatttttttaaaaaaaataaataagtaataaatatgttagggttgatatattatttttttattagaagtagttagagatattgttttttaattagaaagaacttgtttcttattagtaaacaactgcttgtttctcaaataataattaattaaaaaaataagtaatacatatggaaaatttatgaagataatagtaaaatatcaatttgtagatttatattctaataaaatattaaaaatgagagatttaatgagagaaaagaaaaataggtttagagagattttagagtgacacatcaccgcctcatacctctcctttatatatattgattgatgattgattgatgattgatgattgataattttttattaattaataattaataatttgaaatagttaaaatagattatggttaagacttatagataattaggttgatatttataaattttttgttaatttatttgttatgcgtgcatgatttttttattaattaataatcattaatttgattaatttttaaggaaaagatagatagatgtgtttaaagtgttttaagagtgtcatatcacttgttgctcctaaaatcgcccaatatacgtggac

SEQ ID NO: 311957 - DNA, 635 bp, Cannabis indica
taattgaaaaaaaaaagtttaaaaattgtatatggaataattccctttaaatttttctcgtaagcttacatttaccaatatttgtaatgtaggtcaactttaatgttattcccaaattatcctatccatttacatcacctctctctctcctctacccattccttcttcctcatcgaagcccacatcggaccccgtcggaccccatattaaacacaatcggatcccgcatcggaccccacatcgaagcccacatcagaccccatcgaaccccatcggaccacccatcggacttacgtctcctacctcgcaaccttacagattcaatgaacaactcggaccccatcggacctacatcgaatgtgcatcagaccttgcccaaatcacacatttgacattctaaacctaaatctatccctaaatctaacaaaatctatctttaacaataaaatcacaatgagcatccgtgcaccgtcgattatgggttgggtcactttggttgggggtgcaccgtgggtatgctgtgtgtcggtgggggaacgtcgtgggtcactgggtgtgcgctgtgggtatgtcgtgggtttatggggtgcgccgtaggttgggagtttgaacgaagagactgagagagagagaga

SEQ ID NO: 311958 - DNA, 1297 bp, Cannabis indica
agggcataaaatcccaacagtagctgacgccttgagtaggaaagggcaaagcttgatgaatacagtaaagcaaatctccagccatttagcagctgagatgacccgagctaagattgagttcgttgtggggcagttggctaacattactctgcaatatacttttctgaaacgaatcaaagaaacacagttgcaagatccagatttagtgaaatccttagatggggtttcgattggaaatactagtgattttacagtagatgatatggggatgctacagtttatgaaccgtgtttgtgtgcctatggatgatgaaattaaaagagaaattctaaatgagtctcatgcgactccctactcagttcatccggaaacataaaagatgtaccaagatcttaagacaatttttatggcatagaatgaaaaatgatatagctgaatattttgcaaagtgtttaacttgtcatcaagtcaaagccgaagaccaaaggcgtgcaggtttacaatagccactaaatcttctagaatggaaataggaggacattgccatggacttcatggttggactgcctaggagtacaggatagtacgactttgtgtgggtcatagtggacaggtttacaaagtcaacgcactttttacctatttggacaaatttctccattgatcagtatgcaagactgtattttagacaacaatttcatcttcaaggtgtctcaaagtctattgtttctgatagggatttaaaatttacatcaagattctgggagagcctacatcgagctatgggtaatcagttgaaatttagcacatcattccatcctcaaacggatgggcagtccgaaaggactattcagattttagaggacaagctatgggcagatgtactagactttgaaggatcataggtaaagtaccttcccttgatcgagttctcgtacaacaacaactatcgggcaataatcgggatggctccatatgaactattatatgaaagaaagtgcagatcacatattacttgggatggagtgggtgatagaaagtttttaggtctcgaagctgttcagagaacaagtgaggcagttgataaaatcagagcgtaaatgctcgcagctcagagcagacgaaagagcaacgcagatccaaagcctaaggatattaatttttagatcagagatatggtacttctccgagtatcacctatgataggtattaaacactttggtaagaaatgaaaacttagcccgagttgttggaatgtcttttactaggatctgaatttactaacaagtatgttttt

SEQ ID NO: 311959 - DNA, 957 bp, Cannabis indica
ctaaatacaggtcaagaagctgtccatagaaattattataataaaagtatttataactaaatatgagttcactttttaatgaatataatctatcaatgggtatttaattattgactattatatttgatcaaatggatgatatagatagctattattaatattttttatttttacattttatctgatgacatggcagtcatcttatttttcaaactctattctttgtattcccttctcattcctaaatgaatataaaataattaaagaaaatattaatttataattattgttttgattaatttgaacactttaatttattattcaacctaaaagctcaatttcttaaaagtaaaaagctcaacaaagccaagttagaacaattccaaatacaaaaacaatgaaaattccctccgttttccactttctgggatacgaaatcttaaccaaaaattttattatatccctaaactcagaaagttcaagcacccacaagtgaaatgaacccaaaaaatcaattacaagagaaagagcataaagtaacagttcgaatgtagaaaagactcatcaactaaaaatctcatttctcaaatattattcaaaaactgattcaaccgttaattggacccaaatgcaaaaaaaaaaaaaaaaaaaactttaaacacaaagtccaatggataggaagggaggaagaaaaaaaaaaaaaaatgaaaataaaattaaataataataatgcataagccaaaaacaaaaagaacaaaattatcaaccgagatagatctttgacattgcattatacatttaatattaatgtaaggataatgtaatagttccagtaaaataaattaatttctaaaaataatttcttagaatcatcattctctataattaaaaaaagaaacataatttttttaaaaaaaaaatacttgttggtaacctactctagcaagtcactaaatt

SEQ ID NO: 311960 - DNA, 1065 bp, Cannabis indica
atttaaaatatatatatatatatatatatatatatttttttttgcatttttacggaattttatataaaaactactattgcaattagcgttgtaacctataaatcgtaaccaaaaatcgtatagaaacctgtattgcaattagtgttgcaactagtgctgcaactattttagaaatctaaataaaaaagaaaaaaaaataaaaaacaacatataggataattcccttaaaaaaagtatgatgagagaactcatatattaattactctctaatcacatgagaaagttttataaaaaaatatctatacctataattaattatttagaaatgttaaaaggtatttatagtgtttagcactctcttacatgttaatatagctattggtctaactaaatatcatcttatataatttaatataataatttttaagaaatatcgctagttaatcacaagatgacacgtttaaaaaaaatactataaagtaatagtgtttaataagaatgctcttaattaatataggacattatgccttataattaataattaaagacagctggaatattgatggagattaatgagtgcatgttgaatttttattattaattggtgtaacattaaatgatttgtccattggtgggactcgatcaaagatgctcaagaggataatattattatatactctctctttatatatatatagtaaaaaaaaaaaattaaaaacaactcaaatattttaaacctgctctatcaaaaatatatatacattataataaatcaacctaccgtttaggagataactaattctcatttattaaacatgtgcactaatgattacatgatgtaataattataaaataaattgctaataaagggtactcaaaattctgtttatatatgatgtttgcaattgataatattttaatgagtaatttgtgttataaatatttaagtttaaattttaattataaataaatattaaagtttaatttttagcggtaatgataatacgttatatttttagaactttgtaggtaactgatcgtcaaatgttaagtcattattcacgt

SEQ ID NO: 311961 - DNA, 2657 bp, Cannabis indica
aggaaaaaaatgttggattggatcggatgcccatgcatatgttatactaatcttacctcaattctgtaagcaggtgtgtcggttaacctgagtggaaaaactgctcgatgatcggaagccctaagtcacattaatgtaatacttgtaagtgtttagctaaaatacttttggagacttaaactcataatttgaagtttccctatcaataaatagcgtgcaatactctaaatatcgagaaaatatgaaaattgaggtacccaaaaatcattccaaacgggtaatcgaatccccaaatgggtaaccatttacctgcctagagaaaccattaactatttctgagcagagttataaaactcgaacatttcttcctcaattctaacccaaacttgctcaaactttccaaaacaccttaaaaacatgctctaaacacaattcagcaaataaaggcaccaacaaatctctgaaataaaaccaccattattgagcaagctttgagttctaaaactcaagcccactcaactcaaaccacagttgctacgagcccttgaaacaaccacaaacaatcataatcaatccctaaaacaatttctaacctccccaaactcatacaaaaccactttcacaaaatcatgcataaaaccaaactttaacttgaaaattcaaaggaaaaaaaataaacttaaaatttaccttgatctatttttacaattcctcttaaaattaaagccgaaaaaccttgctaaatggatgaattattcttggttttttttgagtttagattaggggtgagagaaagatggtttgaagagagagagagtgtaacttgattttcttggtggagttatctaattccttcttgaataatttagtaacttcagcatataacagtttacttttcatcaaaatccactaaatattaattctagaataagcttagctgaaaaaaagacaaaaatttcccttacttgtctactaagtaaccttcacaaataggggtaaaattatcataactaattaccctgcataactacaatattctaactgtccataaatcttctctactcaaccatatcaaagtaacactaatggtcaaattgtcgaattacactattaccggacataaaacatgaaaaagttaaatctcataattaacatgtatgacacacataaaattcaataaaatttccgtaattaaaaaattacatctctaatacctatttctagcaataaagcttaatttctactcatgcacatataaaaaaaataatactaaactgctaatttctatgtgtaaatacgcgattattgaaattaactatagacttaaacataattaaaaaattaatacataattatattaaaataattttttgtgtagtgacatcctacacctttacttcaattaatgtgctacatagtgtggtaatggtgtgatattaccatatcactttcccccttcacaaaaatatataattatattaatattaataaagtgtaaagtataaaataatgtgatatataatcaaatctcatataatataccctcacattatatataattcatattggtaatatgaatatgataatagagaatcaaaatttaatattttatcttttactatatcttatttaccttgtagagtacttaattataatagaaaaataactttcttatttttactactcatcttaataaatttaattaaatccctattaattgaaaattatattaatttaactttcttattttctctaataagaatgcttactatataaaatcaataaatctaatacttttataacaattttatgatttttttgattttttttataagctaatataaaaattatgtacaaattatataaataatgtttaaaatatatcaaaataatgattatcttatatataattatacttgtatctaactaaaatactcaatttaaaaatttgttcttactcttgtataatattaacatatgtattttaatttattatttgtacaacaatttagatgtcaaaattaaattttatattttttgttacaattatttataaaataacattttagcagacaaaattaaaatggaataaaaagcgatgcacctgctaacctcacctaatattttaaaatacatcatcaacccactatatttaatattaattgattagataaatatttgtataaatataaaacccccaaatttgagcttaggactaacactgctaatgacctaggtagttgacttccattgcactttagaagcgagtgacctaaggtctccataagaaaggctatgttataatttattacagaaagggcttacgttcgcatgatgagccttatagtttttttagtttattttaaatttattttcttatatgcaagtcatgaaacatagtattttcttattctcattgcagaagtaaagactactatgtttggtcgggttatacacttttttttagagaatgagagttatacactttttttttataattattattgttagttttttaatatttaaataatgagattttttttaaaaaaaacaaaaatatagtatttaatttcaaatttaaaaatattataatctaaattaattttaagaactttaatataaaaaaaaaatatctattctatataaagtatgcttat

SEQ ID NO: 311962 - DNA, 3158 bp, Cannabis indica
aagtgcaaactctgagtaataaagcaaaggaggatcagcaatgttctatattcagcaactttaggaatagcctaaacttctcaccggcaacacacttagtaaacatatcagctggatttcaatgtgtgttaagtttcatcactttaactttcttgctagcaacaacgtctcttcatgtcaatatgtttggaccttgcatggtacatggaattcttcataagatttggttatcacaatgtatgcctaagttttctgagtggatcctcatttcaattgtcaatctcttgagccagatggcttctttaactgcttctattgcagccatgtattttgcttctgtggatgacagcactacaaccttttgaaggtttgatttccaactaacacaaccccaaagacagtgaacacaaaaccaaaaaatgatcttctagtgcaagtttccacatagtcagagtaaactaaactagttacattatcaatattattgtagactttgttgaagactaggccaattttgactgagcctttgatgtatgtaagtatccatttcagtcccttccaatgtttttcactaggatcactaataaatctgctgacaacactcatgctatgtgtcagatcaggtctggtgcaaacaatagcatacacgagactccctactccatttgcataaggtatgttttccataagcttcctctcaacttctatctttagtcactggttatgagatagtttgaaatgcaaagcaagtggagtagttattggtttagcatctttcatgccatgtatgtcaagtaccatcttgaattaattcccttaggataagcagatggtatgaggtctgtttctcttgatctcaatgcctaagattcttttgattggccctaagtccttcatctcaaatttaacatttagttgagacttgagtttatcaatttgattcctttctgtcccaagtattagtatttcaacatataatagtagatagattccatcatgaaagtagacacaggtatcataattactcttggtgaagctaattttcatcacaaattcatcaaatcttaggttccattgcttaggagcttgttttaatccatagaaagacttgtttagaaggcatacttgatctgattcttcactttcatagcctttaggtatctccatttagattttctcttctaggtttccatgtagaaatgcaattctaacattcatttgatccaccgtaagatcaaattttgcaccaatggacatagtgactctgattgttgtttgtttaacaactggggagaatgtgtcattgtaatcaatgccttcttgttgagtaaatcccttggaaacaagtcttgctttgtacttgaaacctcacctcctggtattccttcttttgtttgaataaccatttacgtttgattactttctagttatctagctagttaacaactgtctaggtcttgttcttttttagtgatagcttctcctcttctataccctccagccaagctacactatccttcccaataattgcttctatgtaattagatggttcaacactatctatgtcctctacaacagcaagagcataggcaatgaactcagcataaccatatttatcagaggcttttgtggctcttctctccctatctctagctagttggtaattccctatactagcttaagaatcatctgtggttctatcttctgtagaggcttcatcaaaatctgttggtttagatgaggttgagtccacctcaatttgatccatgcttctactggtttctaatgcatcaattttaacctcctttttcatagtcatttcttcctaattaaaaaccacatccctactaattatgcatttcttatgccctggttcccagcaccacaacttgtaacccttcacaccatctggatagcctaggaacatacatttgagacctctaggttgaagtttatcttgcctataatgagcataagcagtgcagccaaacacccttaggtgaacaagcttaggtacatgacctgtccaaacatcttgtggtgtcttaaactttaaggggatagatggacacctattcaccgggtaacaggtactcctacaagcttctccccaaaagggcatatccaaaccaacaccctttagcatacaccttactctctcaatgagagctctattcattctttcagcaagtccattttgctgatgtgtatccctaactgttaagtttctcgctatcccatgttccttgcgaaactcatcaaattactttgagcaatattcctaaccactgtcattcctcatctttctaattttgcacctggtttgattctcaattaactttttccaggtgacaaaagtattgaaagccttatccttacttttcaagaggaacacccacactttccttgataagtcatctatgatgctaataaaatagcttgcacctcctagagtcttgattctggatggtccccagagatcagagtgtatctaggctagtttttcctttgtagtgtgttgtctagtagagaatttaaccatgcagcttttaccataaatacactcttcacaaaaacaaagtttaccactcaatccaccttgaaacaatcctttcttgtcaagttcactgagaactctctcactaacatgaccaagcctcaaatgccataggttcatactgccatatttggcattgttaatagcaggtgatgttgttcctataactactgttacaatcatatagtacatgccatttttcagtctacctctaacaaccaccatggaaccttttgagatattgagagtgctattgtctattcttacagtatagccatgattataaaacataccaattgacaacaagtttctttcgagatcaggcacatacctcacattttgtactatttgagttatgccatcatgcatcttcatgtcaactgtgccaattctaagaatcttgcatacattattgtctcctagaagaactgtacaaactgtgttttcttcatagctggtgaacaaatccttgtttggggtcatgtgaaatgaataactagaatcaagatccattctcctccagaattttaacttgagatgactaaaacatctgctgaatcatagtgtaacaccctaactaacataggcgtattacgtgatt

SEQ ID NO: 311963 - DNA, 704 bp, Cannabis indica
aaaaaaaaaaaactaaaaaaagggacaaaatggggtctgatcgcagttatataaatacttttatcggcgcattgaaatgcgccagtaaaagtggtcaaaaaaccccaaatctgaacgcaccgtttagattaatacttttatcggcgcattattgcgccgacaaaagtatccccacctacgaaaacttttcacgtgggaatttttccccccaaaatttcttctaggtggtcaagattcccacaaaaaatttgtacacttttaccggcgtagttatgtgcaggcaaaagccttacagacgtggaaacgtcctcatgccatttggcagttcattttggatctttcaccagcgcatatctaataatacaccggtattgaattcctttgtcggcgcattattgcaccggcaaaagttattgcttaatcaaagtgaaaattcaacatttcatttattgtgacaacttttaccggcgcaattgaccaattgcacaattgcgctggtaaaagtaggttttctggtagtgacatgactaccaaggagatcagcaaattcaaatgggtgatggttcaggttttcctattcatactataggaaaaacatcctttattttgccatttcagccaaaaaatcttgttcttaacaatttactacatgtttctgttgggattttatgccctaaataaaacccattacaatctaatctgat

SEQ ID NO: 311964 - DNA, 1190 bp, Cannabis indica
tcatgaatttcaatcataaaatatataaacttcactataaaatataaaattattttaacatacgtaattttaaattattattaaaaccgcgcgaaacgcggtaccattccctagtattagtataaattaaagttaaacataatattatataaaaatatgatatatatatatatatataatccaattcaatataaacaatacaatacaatacgacataatacgacgttccaagcgagtggttattaacttttttatatttttttaatcaaaaataaagttaaattaccctattatatgttggagtccaattgtaaaatttaaattaaatataatattaacttttttttttggctaaatttaactcaaaatttatgaaaagtgtataaaataaaacaaaaaagaaaaattaaataaggagtacttttttatttattttttttgaaaaataagaaactttattattactttaaataatgaggtagtttttcacttatatttatttacttattttattaaagttagaaaagagagcttggttttcttcatactttttgatgtttcataactggtagtttagttgtctttttattcaagatgttggtagggtttctgtctttattattataaatggttagttaacctattattgtaagtacaatattatcatgtaatagactttttttgattcacctaatgaatatatttatttatctttcaaaaataaataaatagaataaaaatgattttattcctaccaaccaaacccaactaatgattcgataattaaacacaacttaagtttacttttttctagactttatgtatgtgactgtaccattattcatgaaaactcgattaaagctttgcaattgatgcaagtggcgaattttgccattcaatgtcaccaaaacaatctatatttcacaagtataaacaaaatagacatattacaaaaaaagttatatagtacaactttttagttataacataaatattttgtgattaaatatgacttttaatcacaataaaaatttatttgtgactaaaacatagtatttagatatacgttgtcactaatttagttttagtgacaacaagtattgtgactaaaaacatatttagtcacaccaaattgtaatttttgtgattaatatttttagccacagactttttaatcacaacgtaagaat

SEQ ID NO: 311965 - DNA, 998 bp, Cannabis indica
aaaaaagaatatgttcttttgttatttatgtttgcctgcttttggttgaactgattattgatgagagtcatatgatcatgatttgtagatattgttatttacgacctagtctctaagtcatcataggtagattaggtgtgcactcacttataggtgaaagagatagaatctttatacaaagtgaattgagtcttagtcgtggtataatggtggttatcagtcgcaactacccttttggatgttgctttctattagtattgagagctaggaatctagtggacggtgtgatatacacaggtagcttgtctcttctgattatttgcgctctctttattttgtttatacttgatgatgatgatatgatttgttttgaagggctaactatgcatgggttatgaaagtactgaccctttgatattagtcatttttttactgggattatatgcccaccctctatattttctcttcaggaacttagtttggtacttatggatgagagaaaatcattgatggagagcgatgtgattagctatgtcctatcttaattataaattaattttatttttaaagactggttatgtatctagtaattaatggatggtctgtattatttaagtacgtatgaacagttatggatgaagaatataatagatttttagttattttttttttttggtgttttataaattattaaatctcatcattttggtgattatataattgtgaagatattattattttttatatatattaacgatttgttttattttattattattattctttctttattataggagttatttagtaattttatatatgtattttatgtaattttgtaatatcaaataaaagatcatctgtaaatttaattttttaacaagtgttaaagtgaatttttaaaaacataaattatggatataatacctattttatataaagtatgcctatataattgaattcttggtttatgagaaattcatgggtaactttttatt

SEQ ID NO: 311966 - DNA, 1322 bp, Cannabis indica
tgcttaaaattttgtggtgaatcaatctacatataatatggttggaaactattaatgaaagatgtaaatatatatggcagattttgtagtgtacttgggagatgtgataacagcaaacaacataggaatacaaaatgcaagtttgtattgggagcaagcaatttcaccagcaagagccaaaggaattccatgggctactgtgtttggtaaccatgatgatgctcattttgaatggcctattgagtggttttcaccccctggtgttccccaacttctatgccctcttaccaattctaccacttcatcatcatgtccaggtgaggtcacatatttatagacatatcgtctttgttaagtagggtcggttttgagatttgtttgtgttggatctttacttaaaaggaaaaaacaaaattaggtctctcgactaggagagttctaggtgcaggacctagctcaccttaatcataaacttctgttactaaacaaggtaaaaaatcagttgatacaaatttcaaatcgaaactacaaccaggatacaatatagaagtttttataaacaaattaactggtcgtttaacaaataacaaagagatatttctcaactcaagaaggaaaaattttaaaatcttaattacatgaccaatattacactatgaaattagtgtagggacttattagtaatttgtaagtagtgtgaaatcgtgtaaatatgttattgtgtagccaatatgagatatgaattaagaaaatagaattttagttcaattggtagattaacgctgtctagaaaagtgtatttagagatttatcctatcttgaagaggacctattaatctatcattgaagttttcattgagaacatcaatattaagtaatgggttctcttcgagacaagacaaatatctaaaatgcactaagacagtgctaatcccccaattgaattgaaattctattttctcattctatatctcataatagctatacaattacatatttatagattttcacgccatttacaaattactaataaactcttagtgtaacaatcacacaaagaaattatctttaaactacttataaagttataagatagatctttttagtatatcaacataacgcaactttatttttagtacgagttaagatatcaattttgttttctttctttctttcctctacttaaagttgttcatccaatattgaataatttattatgttgaaagtagaatttttaatatgattaaaaatttcatatgataatcttatttttagtacaataaattaatttcgaaaaaaaaaacaggtaaagaagagtgtag

SEQ ID NO: 311967 - DNA, 737 bp, Cannabis indica
ttaagttaaaaatcacgttaacacgcctaaactagtaggatgttacgatgcgtctttagtaaaaataaaaattaaatttgttcaaattatatatatttatatatggtattgtagctagatatgctcatttagtcatttttaaagacattcaaattactggaggagcaagctttttgcaaaagaaagaaaaaagttgaagaacaagcgttcttaatctttagttaccacttaatcaagggaccctccaactaatgacccttatgatttttggggctccattagccattaggtgacttgtataaatgtatatatactttttttttagtgaaaatatataggtaaaatacgtaagccaaacaattttattcctaagttttcggatatattattattattattattattgtatgcaaatgaatctacgtaattattttttaaaaaaatatataatggtggaccaaatgctcaaattatagctcaccctcttgtatataggacccatacgaaaatgatatacaaatgtatagcagtgattactagattgtcatgctggtagattaatcataacccttatgtgtcatgccatacaagaactacaagaacatgaaaatgaaaattaggtagattttattatcgttttttattttttaagtctacgttatagaaaaagaaaaaaaaaataaatttttggctaattagtaatttttccccctgtactttgacatgtagtaaatcgt

SEQ ID NO: 311968 - DNA, 1466 bp, Cannabis indica
catgtcatttctcatattaattcgcatataataaattataatataatataattctacaataatactcaattaactagttagggctttgctaatccatttccttaattccagggtattacaatcgacctccttggggtcgtctatctccacatgaggctccccatgtggcatctggtcattggtgtcagtcctgagagaagttggtggtggccttggaagaagagttgaggagttggttccgaggcttgctcctggtgcttaaggtgcaaaagtagtcccgattccaactccatcaactggcatgccctcagttgttcggccagttgttggagtctgtttgtcaacacttgtaaacgtgttgcaaccatcttgtttagtaactttcttgagttgtggctctcaatgaaagcaccaaaatattgacttaaaaatctagactcttctaagccacacccgctcgctagattggcgagaatgaataagtagttaaatatttataagagagacacaacaaatttatagtagttcacctcttatatcgcaatagtaatggggctacgtctactttgagtttttatttctcacgagatggtaattacaacaatagactaagtgtcaaaagctccgaattctagagagagaagctctgaccttgtgggtaattttctgaatatgaaaaataaactaagggagctctccttttataggtgaaagaggccacaaaaataggaaaaaaaaatacaaataagatgtttttgaccattgatgatgatctatggtgaaaattagcttttggtggtgatggcgaacttttagtgcctagcagatctcgctacgggtaactcaaagtttatttttgtaactcctatggggtgaattttaatgacaataacttcagaattacatctagattgtgagacatgaattgataaagcattgaattagcttcgaaattcaagttgaattgagtcaatcgaataaaaattgagtgagttatgtctgttttactgaaggcagttcatgacccagtgtccagattgacatctaacaaccaggttgacatcccaacgcctaagttgacatatgatgtcaacctgtacgctgtgtaagtgtaaaaacatccaaggggtatcctttaagatgcataagtgatattttgacatcacttagtctacttacatgttttggcaaagctggtcactgattctcagagatgttactgttttgcgaaaatgagagactcgaaactcttcatttctggttgagctagaaatgagaaatataaagttgtgaatttaatttttctgacttcatagatccttatcattgtgaaaaactagatacatcgtcgaaacgacatcagattcaaataagcagagtctagtgcactagaccttttgtcaacctgggcattgggtacttactcgcgagctactgagattttgtttttgatacttccaaggctt

SEQ ID NO: 311969 - DNA, 835 bp, Cannabis indica
aactaaatttatattttgtccactttgaccgaattgaactgcgttgtttttcaagttcagaaaatccaccttcatctgtatgacaagttcttcggaaagaaagccccatggaaagttctattatatataccctttaattacaagaaagtatgctttttgtggccgggattagtttgtgttcaagtcttttagaaaagctcagatttttatctagaatgttttggtattcttgcaattgaatctttctggtttattagactttgaatagtagataaattattttaaaacctcacttcatagtcctgattgtattaattaaacaagtgagaaaatgtgttctatttgcaaaatactccattagaaggaaggaggattatggtggggctagtagaatagcttagaatgagctttgtaaacaaaagaaggaaggaggattgggttttcaggacattgtttcatggagcatagcagctttgggaaagtatttttaggtggtggtgacaaaacaagacagtactctttggataaaatgagtcaacaatgtgcatataaaaaatcagttatggtgcaactcttctccctcagtaaacagtagctggcattggcgccaagtgactaacaattggaatactcttgtttgggatgcttggaggctgtcagttggagcactcgtgttagggaacgattcattttgcccaaacgtcaattcatcatgtggcttacactatgtatggtagagagaagagaaggagagagggatagagggattggagaatccttttgtttggtaaaagagatagaaataggaaaaggagagatggaaggagtctccctc

SEQ ID NO: 311970 - DNA, 3119 bp, Cannabis indica
tttcctattcttccaaaaatgatacaaagttgcaaccataacaatatttgtgatttggctttggaaatgctgagtcaagttcctgcatctgtcaagtagtttaacaaatcgaatctgaccactgtacatctccaagccaagagttaatatctacaaaaacctgcttatagtacatacaattgaaaaaatgatgatcatgagtctccacttctgcctcacaaataagacaaataatgtttagaatagtcataaaccgattcaagtaatcccaagtaagaagttgggaatttgatatctgttagtagaagaacctgtgtttaggcataattagtttatcccaaatatctccagcatagtcagccatgtcctcctccacaagcagattatgttagcttttggcacggaatttgttgccttccacagcaaggctaagtctagcttcattcgtattgtctctaagacccaaattttcttgaagtaccagctaacatccacattctttggacaattccagatgtcatgatctctcaaataaattgagttgatccatttgacccataagcaatcttgcttactagcaagagcccaaagaaacttagccaaaagagccttattccattttttccttctcaaaaaccaattcctccaagattttagagaggcagacctgttccccataagaaatctcgacaactcttgtcaatgacaaccattatcttgaaagaaatgatgaaaatgctcatccaaaaattcctaattccaagcaacactgagtgaatcaattgtgcatggccagcaaaaggacatatttctactagcccagcaattaaggttcttgttcaatttatccaagataactccacagtctggggctttccatttggtaggccgaacatttacccctaagtatttgaggggaaaacaaccttcttcaatttggattaaatcaaggatcttggatttgacctcttcactaaccccttaaagtaaatatgagacttcaaggtgttagcagacaaacctgtggcattgcagaacttcatgaaggcttcatgggtaagtctcatcgagttgatgttaccttcacaagataactaagtcatcagcaaaacacaagttagtcaagcgaaggtgcttgcataaaggatggaaaccaaagccctttttaccaaaatagtagctaagcaaccttgtaaggtattccattatcaaaacaaagagtaatggggacattggctctccttgacagaggccttttttgcctttgaagctaccttgaattcttccatttaaaagcaaatggtagtttgttcctttcagacaagtcattatccacatgataaatcgagaaaaaaagtagagcaacttgagtaagtcttccacaaactcccagtcaactgtgtcgtaagccttgctgagatcaattttcatgatgcacctagatgaaatattctttcgtgtattacccttcaggatgtcttgaaaaatcatgatataatgagccaacagtctatttttaataaacgcaccttggttattgttgacaatagtggggagcacttctgaaagtctagaacagatcatcttcgagatgcatttgtagactgtgttgcaacaagtaatggtctataatactttgcaaaagaggggttagccactttgggaataaagaaatgatagtctcattcaagtttttaggcaaacgaccactagcaaagaaatccaaaaccgcaatagagacatcatctccaattttgctccataaatccttataaaagccagattcgaaacaatctaatcctgggatcttggaagaatgaatgctggaaagagctttcttaacatcccccttgttaaaagacccaatcaagttaacttgatgctccaaatccaaacatttaccctacttaaaacaggcctcatctattgtgcttgaagttgaacttttactgcccataaagttttcaaaatgctaaacaaagtgttttaccacttactcaaagtcatcaacaattgtgtccccattcatgaaagtggtgattctgttttccagtcttcttttcctcataactgcatgaaaatagcttgtattttcatcacaacacttgatccaagtgaccttgctttgctgtttgagaacctgagcaaatctgtcctttgctgccaaaaaacctaatgcatttcagagactgcctcttcttaaatgttacaatacatctccttagcatttttataatccatagctacttcccccacttcatgcctgttgaaaatttttaaggcatgcttgactctaaacaaactctgcactaaactttcaagaccaaaaccagcaacagttttattccaacactccataactgtctgagcatagcctggataggaaggccaatgattcccaaatctaaaaggtttaacccctatattattgtgctcacgattttggattaaacagaggcaatgatctgaaataacctctcatttaaaataagcatcaaaattaggaaaatcattcagccagatattgtttataaaaactctatctagtttggaaaagattatatccccaacctcatgtttgtttgtccaggtgaagaaagaacccgggcttttgaattcttcaacttgacccaaggcaagccaagattgagcatccagtatgtctttattctgaattggtcttccaccacttctatcttgaaagttgaacatagagttgaagtctccaaaaatcaccaaaggctcattcagtttcccaaagctcgcaagtttatcacaaagacttttacgaacctccattgagttacttccatagactttcgtgacaaagaaggcctatttttcccacaaaaattcaccttacagtgcaccagctatgcaaaatcactaataatatccacctgaacatacttagcttgccaaattaacaagattctctcagaaatgacattactagaataaaaattctaattaggaaaattattcatcatgtcatggattttctcgtgtttcaacttactctcaaataaagctctaaagccgattatattcaacctacaaacatcaagaatcgcattttgcttttcttttttattcatgcctctcacattccaccctat

SEQ ID NO: 311971 - DNA, 2909 bp, Cannabis indica
tgttccatcaccaatatacatgcaatcatgtccctcatattcactgttgtttagcatattttgaacttctagtgtgcagtggttagttgcactagagtttgggtaccagtttggatcataggcacgatctgagacagtgagatgggtctgaacattggggagagaaggggaagtgaatgatgatccagatggttgaggggagaaggttttatcaaacctgtagtagcagtcctgagctatatggccaacacaaaagcagatttggcactgaggcttgtttgaagagctaagaaactttccacctcgagatgaactgaagttgatcctcctcgaaaattgtttgagccacggccagtgccataagtaggaatgtgattttgtgactgtcctctgttgaagacactacttgatccaccattaaaattggttccactaaagctggttctcgaaccaaaattactagccattgccagggttggcatagaaattttgattggagtttccctgcattggttgcttacagtttttgttgtttgtatagtgatcctcaggtgagagatcaacttcattcatcgagacatgagttgagagatcaagatctaatttctcgattcgtgactcagatgcaagaagcagagattcaatttctgcaacagtaaccttcaagacgagtgttggtggagatgacaaatgtgtcatattcactcgggagcccttaaaaaatggcagttatttgatcttgatcagttaaaacttcattaacagatgctaatagatcaacagtctgtttcactctgagatggtattcattcaaagaaagatgacctttcttgaggttttgaagcttggttctgaactctaggattttagtagaaaccttcaaggtgaagtatttttcgagtgttttccaaatctatcttgaggtctcacaaccaaccatgcaagttagaagactctctaacatggaggataggagccacgagacaagaagctagtcttggacatcccactcgacaaaggcagggtttagattttttgaagcttgatcttgatcagaaagaaatttaggtggtggaatagtatcttgaatgaattgcaaagttaatttccacgaattgcagcaagcacttgttgcttccataaaagataattatgatcattgagtcttacaaaaagagtgttgctgaacactattggtgaagagtcattcgtgtctactgtttttggcttttaaggcaactccattgtcggagctcgagattccggtgacaacattcgctattaacggcaaaaaatgctctgataccatgttaaacttccttgacacgatgaaagagaacaaaacagtgaagaagagaaacaaaaagaagcaaagagaggtaaaacagaggacaaagaatgaaaagagagagttacattgaatgagctgaacacaatcattatatacagcaaaaaccaaaagcaatctctaacagaaaatgaaactaataacagctgaaaatagatgaacaagacaccaactgtaactaactaacaataacgaactctaacaaagtttgaaccgacttctaactaattacattctttaaaacatgagaagaacaatgtgaatattttcaacaattttcttttttttttttcaatgaaatatctaaattgattaattagtgtatttgattgtaactaccaactaatatatatacataaatatatattgatgtccttatttataatattctcgtgtatttaatgtctttgatcatgactcggtaaatatttataaaatcacttacctaaaaaaatattttataaaatcataatatttattattatttttttatttctttaggttaggtggtagtggttctctaagcaaaggctaaaaggttaagttattaaaatgcccccacctttcctttttccaaagcttcacttctaaaatcagtgtaacatcaaaaagaagaaaaaagaaaagaaaaagaaaaaagaagtaacataataagattgtggtaaaatgtttttgtcattaattccattaataattcatcttcttttaattgtttatcccatttatattgcattaagaattatatcattgctctaaaaattggagatggcctttttaaaatatatgagaaaaggaccaacttctttcattacaaaagtttaataatgactatatgccacctctttaaccattacctgtttttggtgacatctaaaattcatgggtacccatcttagtataaaaattaataagtataatataatattttttgctcttccataatatggtcaaaaatgttgtaacccttcctaacccctaatcacacacttgaggtttaagtaaaaaagtaccaaatttctcaaaagtaggtgattgtttggtgttaatttaaacaccctaaaaaatgggcaaatagataaggtagtaagtatttaggtttgtatttttttttcttttttgacaaaattgaaacctaccctagaccacaaagggaggaagccaagaagcatccaaagtataaacccaaaaatacaatatagaagttgcaaccctatatgacaaattgaaatctcaaagggtctaaatgcaaatatatatttcttctttctaaatatttttttttaagaaattacttttatatttcttaattcattgtccacgtagatatatgtctgagaatttcttttttttttttaaaaaaatctgagaattagacaaaaagagtgacaatgtcaatatcaacagttccactaaacaaaattttgattgcatggcctttcattacttgaacaaccatttaagataaataattttttaaatcaaacaaagtgaatagttttttcaggctagtataaaataagtgaaattgtaccaaaaaagaaaaagccaaaaaaaaaaaaaa

SEQ ID NO: 311972 - DNA, 869 bp, Cannabis indica
ttcaccaagaaaaatcctacactttcattattaagtaactctttacttataaaccaaactgtcctcattcaacacaatagtgagaatttcaaattaatcacagcaatgtcaaatgcaagatcatcaagaaaatgattgaatcacacaatagagaagaatattatgatcaaaccctttcagtacactagaaacttagtctaaaacaatagagaagccactcttatatagtaactaattaacttagtcacaaagctagtctaaaagagtcacttgtaacttgtaaataaatagtatcacacaacaaaccaagaaagtataaaaacaagagaattaagattggtatacataactccattgtgccaaaactaatctctcaagattggtgttttaatctctattatcaattcctgcatatttttatatatggtatatagcgatataaatattaaattcttatgatcgtaagcggcataaatttaatatttatttttaatgacataaatactcaatgtttgtaaaactataattttcttctagtttctttagtacagacttcgttttttattttaaatttattaaaaaaacgtttaaaagtaactgtcactgatactacatgtttctgtcttgatctaataatctaaaatttgagtctaatatgtgtcttgtttaagaaaaataacagactttatactgacaaaattaagtatttatgccattaaaaataaacgtcaaattcataccacttacaaacttaaaactttaaggagacgtttggttgagaggaatgaaaatataggaatagaaatgggaatgggaatgggaataggaatggaataaaatttaaaattcataaaaaaattgataaaaaa

SEQ ID NO: 311973 - DNA, 1794 bp, Cannabis indica
aaaaaaaaaaacctaaataactaagagattgtttggttgtattttcagttttcagttttcagaattgtgtttcaaaagtgagaatagaaaacaattttttgtcattttaaaaatttaatagtgtttgtcacaagtttgttaaaactatttttagattttttcttactaaaaattactaaaaaaaagttaatattctacaccataccatgtcatgaacccatcctaccccgaacccgattcgaacttagaccccaactcgaactcagaccccgacactagactcgaacttagacccaaactcggaccgacgcccggacatggacccaaacccgaacactggactctgaaaccaaaccctgaccccatacccgaactcaaatccagatctggaccccgacctagactcggatcttggacccaaaccctaactccagacctggacccaaacctgaactcaaatcccaaacccggtgctaggtctaaggtccttggctgggtttgggtccaggtttgggcttgggtccaggtctggggtccgggtctgagttcaagaccggggtctgggtctaggtctagggtctgggtttgggatccgagtttgagttcgggtcagggtccgggactaggatttgagtttggattcgggtccaagtctggggtctcgggtttgggtccagatgggatccgagtctggtcctggtcagggtcggggtcggggttcgggtttggggtctcgggtttgggttcgagtctggatccgggttcgggttttgtttgggtccgggtcgtggtggggtctcaggtctaggtctaggtttggggtccaggttctggtttggcgtttggggtttgggtcgactttcggcgtcaaggtcggctttcagggtctagggcttggtcttggtcgggatccagggtccgtgtcaggggtcttgagtccggggtctggatttggggtcggggtctgggttcaggttccgggtcgaagttcggtgtctggtgtttgggtcgaggtcggggtctagtgtttgtatctaagtccggactggggtctgggtttggtttcgggcctagagtccgtatataagttatgaagccaaacaacctctaagcataagtgttatacataggtaccataaataaaatttcttttttaatttgattagctcacaaatagaattttaaaccaaggtaatcgagtaaaagaaaaaaagaacatttgcagcaacttttaacggaaacagaattaatagcagtaaaaaaacagtaaaagcagaattatatatattctctagtaaatttggtcagagatgcatgacttgtagttgaccatattgttaggtttggaccagttcaattaatggattctgaaatcataacttctaaaaatatatttggtgatttttttttgggacaaatatttggtgatttttttgtacacacaattattggttcgtacctaaaaaaagattaaaaaaaacattattgattgatttaataaagttttgatgcatatgggtccctagctaactcattcaagtgcctgaaactcaaaactacatgacaaattttttttatggttaataaaaattatatatattttaaatgtcattgttattgttgtgggtttacgattaaatatgttctagctcaattaacagtcaagtacaacatctcatctaaaaaatattccaaacaattatatatacaataaatgttagtatatatgagggttaaataaacaaaaacgtttgatcaaatgttaagttgataaatatcagattttgaacattt

SEQ ID NO: 311974 - DNA, 1432 bp, Cannabis indica
gtggattcaataaggaattaataagttgggaaatttacttggtaaattctaagggctccacgttgacatccgatgaggtttcctaagaattggtgagacaagacaatatgttaacacttgttcaaaaaaaacaaataaaggggaaaatggagaatgatttcacacttgagggatttactataatcataagaagacaaagagggaggactatagtatttactaaattctgtagatcctatgatcatgaatacgtcatagggattaattggttctaagtcccaactcaaatctatatgagctatccatcatggtcccatactgcacgacaatcccatagtaggagctcctacaactaatctgaacatagaattttgggtaccaactatcaaacctatgtgtcatacgatctatgagaaagggattctaggtgtaaaaattatactggctatatcggaaagacactagtgtggtacgctcgatcctaagcacagtgggtgaccatccacattgattacctcggtatgctccttcttcagcttcctaagggactttgttctgaaggcaatgcgcccgagccacatagttctgagtctcctcgtccgctgggactggaacctgcttccgcgatgcatacatgacatagttattatcgcaagtgtactaatttttggcgagtaggccaacatatctcaaatttgcctcgttcaggagaaactcggctgatcagaggccaaagggaaaacctagtagaagcttgcgtggctcggccctctcgggagtaggggttggtcttttcgagacagatatcaaaaaaaagtaaaattacaagttagcgaggccaaaattaaagacatgggataatctaaaaccaagtttggagaaaatttacttacgtattatacgaaaggcagttgtgttgattggggagagaccacttgtcctaaagaagtcttctttgaaagcagtcttgtttggaaaaccaacaatgatcttacgatcgcttgtgtgagtcccaagataatagaagccccctacaaaattcttcttcatagggactgccttgaccgagtaaagatatactatttccagaggagtggggcacacccatcctaaaattttgtacagaacccttaatcttgcaaggattctgtaggaaataggaaccaactggaatggggcaattttgcgatggttaaaaatgtccttaaagtaattttacagggggagaactgctcatgccctgatgttcttgaggctccaacacctatccctgtcgagcaactcgtactggcctcgccacttgtaaagaccgcttagctttaatttggaaattagcagataattagggttcattatgaaaattagttattaattcgaaattattaatttatgatgatttatttgaattcaaaatgcattttatatgtcatat

SEQ ID NO: 311975 - DNA, 1169 bp, Cannabis indica
agccttggattaggttgcaccatgttttcatggtactaaatactgaaagataatgagttaaattcaagttattgaagtcaacttccatcttggagatcccaaagcaacatgggcgtaaggctagggtcccctcccaggtcaactgttatgactcgggtctactcaacactgtgacgtcatccttcatgtcacgtgtctaacattccacgtcaccagaaaaagtttccgagttaaaacttacgttttgttcacttttgcgcgcatatatgcttttcttgcataaatttctgtaatcactgagtcatgtcctgattatgttactaattcgcaacttgatcatgttgacggttctccacagcaatacgctattcttgtcagaatttatcttctgcaagacgtcacagttcctcattatgtttatcttacacagtcatcatttggttaatttctcgcatttctaccgccaaagtagcagttggatcaatgatctaattttacacatccccttcacttataaacatagttttttctacattccccaacattttctttggatcccatcctagattttagcctagtcctcaactttttgttcttgtgattcccacagacaatgctagttgttgatgctaaaaattagctcaacacaaatttataattacacttgaattctttacacaaggattatcccaataaaaaattacaactctactttattgcacactttctcctaaatcagagatagttctttcttcgatcaatgaactcgaattcaagaaatgtgtattatcggaggaacaattcgacaattttgataaggctagtgtgattaggaatccgtcctttgtttgaatgttggggtcctttatttacaggcgagaattgatgttgcgaattttctattttctcttcagattggtccacgtggttctatcctcttattccctcgcacattttcatcactgctttgccttcaaagaaactcttctagctacccccaactcagctctgcttttcttgaaatcctcgcattcctcttatcactttatcaattttcacattcttatatgatgaaattgctttgacgccctcacattatttttattccttacactattaattagttttgtttaattactttaaatattaataatatatttataattttt

SEQ ID NO: 311976 - DNA, 1054 bp, Cannabis indica
tattaacttaaagggtctaatggcgatataatctataaaaatgggtatatcttaaaaaatatgaaaattgaggtaaaaattaaaacaagtaaagtaaagtgggtataccatgtaatttcctccttattctttggtatatgaacatcaagattatttagcccatgatatatgtggtgggcttagatggttggcccaaattcattagcacaacacatgtggattggatcttatacttgtattcttgtaacttgtaaagccacattaaaaaggggaaatttgactttttatgcatttagtagattaaagtatttccctaaacctaagttaacccatattgatagaatatgctaatattttataaaactcaattctacccctcccatttgaaacacatgatcctatctctttctcccttccctctctcgctctctaaactcaccccaagcactagacccacaatctaacacccacaaccttggtcccttctctccacaaccactgcgaccacatacccaacgacccacggacccaacgacacacagacccaacgacttctccatctaccatgttttctccatcagcaatattgtcaaatgaaaaattgtataaattttagttatttgtgagtttatgttttacttagggtcgaaaatgaccaaatttatgttttgagcaaaaaaatagttttttcgacaggcccaatgttggtctgatgccttcctgttgataaaaaatgttaaagttgaagatgaaggtctgatggtggcctgatgctacctataaatgtaggatatggtctgatggtagtccgatggtggtctgatggtggtgcgatgcgttcctgacgagcttaatgaatggagcttaacatatataaatgtagaatatggtccgatggtggcttggggttaccattttcttatgcacaaaaacataaaaaaaatgggtagtattgggcaactatcggacaacaatcaaagcaccatcgaaccctcaaggaaagaccatcggtatggatgggaatagagagtatggatggtgaagttagaagaga

SEQ ID NO: 311977 - DNA, 2423 bp, Cannabis indica
gcataccgattgtctcccccagattttaaggagttgaagaggtagccaacggtgatgctagaggcaggattcatcaagccatcaaaggcaccatttattgtgcccgtgttgttctagaagaagaaggacgagaccttgagactaagcataaactatcgcaccctcaacaaagtgactgtatgcaacatataccccattcctttgatcgctgatttgtttgaccagctaagtggggcaaaatacttcacgaagttggacttgagatcaggctactatcaggtttggatcgcagaaggggatgaaccaaagacaacttgtgttactaggtatggggcatttgagttttacgtcatgccatttaggttaacaaatgcgccagcaacattcggtacactcgtgaatgaattcttccatgaagacttagataagttcacggtggtgtacctagatgatatcgtgatctacaacgccactttagaagagcatcgagactgtattagccctgccagatgtatgcaagccctttgaagtacagatggatgcgtcagattatgctttgggaggggtactcatgcaggagggccaccctgtggcatttgagagccgcaagctttctaaggcagcaaagtggtatacgacgtaggagaaagagctcctaacagttattcattgtttgcggaggtggatgcattacttgttagggtcaaagtctgtggtgaagatggacaatgttgttgttagtcatttcctcacacaaccaaaactaaccctcaagcaagcatgatggcaggaattcttggtaaaatttgacttctacttcgagcacaaggcaggacgtctgaatcaggtagctgatgcccttagtcgtaaagcagagttggcagctctaaagttgttagcgggtatgtcagctagccaagtgggtacgccaatcaaggaacacatcaatgagaacctggagaaggacctagtcacaaagaacatcatgactcttgcaagaaaagaaaagacaactcagctttgggtagaggatgacctcttgtggaccaaaggtggccgtttgtttgttctgaaggcaggcaatctaaggagggcgctgttgagtgagtgtcatgacacattgtgggcgggtcatcaagggtggcataggatgcatgtccttttaaagcatgggtattattggacacaaatgcgggaggatgtggtggactacacaaggacctatctcgtctgccaacaagacaaagtggagaggcacaagacgccagggttgttagagtctttgttggtcccaagcaggccatggaagagtatctcgcttgattttattacaagtctgccgaagactggagacttgaatgcgatcttggtgatcgtggacagattttctaattatacaaccttcatcccagtgtcgaagcactgtccgacagaagtgacagctcaacttttctttaagcatacagtaaagtactggggaataccccagaatatagtaagtgactgagatcgaagattcacggggaccttatggttcaaactatttaagcttcttgtgtcacaaatgaacatctccttgagctaccatccacagatagatgggcagatagaaagattcaacgggatgttggaggagtatttgcggcacttaatgccaaccaaaaaaattggccgcaactactagatttagctcaattttgtttcaactctcagaagagttcttcatcgaacaagagctcttttgaagttgtgaatggacagcaaccattgttaccccacatagtggatgagtaccacggacagaatccgcatgccttcaattttataaaagactggaagaagaatatagagattgcccaagcatacttagagaaagcctcacgaagaatgaaaaagtgggcagatcaaaaatgtcgaccgctggagttcaaagcaggtgacttagtattgatcaaactgcggggtcagaacaattgagattccgaggggacaaggacatccttcatgtcagcaacctcaagtcgtatcatgaagatccaaaagatccagcgcgcaaccagtctaccagggatgacatcaacattcaatgacgcagcagtagagaaccagaagaaatccttgctgaaagaacggttagtgtgaagagaaagaagagaaaagagtaccttgtcaaatggaagtgcctcactgatgacgagatcaactgggagaaggcagaggacttacaacagtttttatagaagactgaagatcatgtagtaggttcaataaggacgccaaacaattaagtgggggagaatgtggcatgctgccccatggcacacccacaatggggccattttgtaatgataactctatggtatagagttattttttatgcttttaaactaaaagtattgtggaagagtagtgaaaatgtgttt

SEQ ID NO: 311978 - DNA, 950 bp, Cannabis indica
atttactaagagttcaattccatatttatagtggagtaattatgaaattaatagacaagattatttgattgatgatattaaataaatgatctagtttattgtagcttactattataggtccatagtcccttgatcgccaccttaaaacactatcaaaggtatggataaaagttgtataatgatcaaaaaaatctattttggtttattaaaatagtgattatttattttcaaatttattaatgagtttttggcggctaaactcgccgaactctcaattcacttgcaattaagcctacaacctcaaattttggtaagagagcctccaaagtactgctatgtatgtatttttaaggtgtcgtctccccaaccccgttaactccttatttttcctatatggcaatgataaatcatccaaaacttggcaacgtggccacatttaccaaaatttaaaatataaaattaaaaactaaataattaaaataaataaaaaatcaaaattttaaaacagaaactaaaaccaaaagttaaactaattaatagcataaatcatcaattaaacttagaactaaaaatatagaaatgaaaatcacaactgaaactaatttagagaaacctaaatcagaaatcaaaataagaaaaccaaagtaagaaaaaagaagaagaagaagaacaaggaggagacgaaggaagaatagaagagagaagaagataaaggcaagaagatcacacagagtaggcagagatgagaagaagaaaaatagggaggattggagcttgaaatcgagaagggggatgaaagggtttacaataacatgaaagttgaagcttgaaatcacagaaaaggagaaaggaaaacttgagatttttgaggaatacataatcagagctgaaaaatggcatttcgaaggcaaaacgtagatgttgctccagaattcgcccaaaatacgtgg

SEQ ID NO: 311979 - DNA, 2306 bp, Cannabis indica
aataagttaattgacttgtggaataaagtaataacgatacaaaccaaatactggtgaaataaagcaatcacgttacaaacaaagtgcttgttattttttttttctttctaaaaagagaaagaggcactgccttagacataaatcgggggagcttcttcctgtttttacaaaaaaaaaaaagttaattgactttgtttgtaacgtgaatactttatttcacacgacacattgtttgtgacgtgtatctcatttggtgtgaactttggtgacgttgatgtgtgactccccaatgcacacgacacatgtttactttgacctctaatatcgagttgccttttacaagggttgacgaagcatttaattatagttttgtgctatgcccatgccattacaacattctgaaatttaatattattttaaggataagccgtgttgttgaagctctaatgtatttaataaaagttttattgtgaataattttgtattaaaaaaaagtgcattactattaagcaccaataatgcaaattagctgttattagtatgacacctaagagcatatatattaattaataatgtgtgagattataattatagcattttaaagtgtgctatacattggagtgtttttagatgtaagagtgtcaaaaatgatgtggaagaaagataaaataaaatattatatttttaaatgatgtgtaaatttttagcatcctttaagggtgctaccattagagatgctctaatggtagtactttcagcattttataacatttttgtcattttgttgattcattccaaattcttgctgcagttatctctggtgggctctaatttacgtgatcgtgacatcacttctaaggtacttaaaaattattcacaagtatgatgcaaagaggattcattataatattttctagtttgaaattctagtatattgagcatgctttttttttttttaataagatgatgatacttgagctgagtgatttagtgcttcttagaaacttctttttcttattgcgtcaccttgacttctctaagctaaggttagtctttcaaccattctagtaataattggcttatttttcacgcgaccgtgtgcctcgtgtacattttcacctctcgaataactcccgccgagtcatgttcgcaagtatccacgagtgcattcatgcatcgagactctctagccaagatacttgcactgtccataggttcttactatggtaaggcaaaatcccaacactgtcattcacttagtcacgaccaaggtagcatgtgtggcaatatgtcaacaccaaattgacgtgccaatgcctctagtcataccccatttgataccatccaaacaatctctctcatggcccaaggactctcatatgtcgttggtccaatcctcaaggcaccatgtctccacacatgtcggtaggccctcgagacaagccaccagacctctgtctctttctagcatggtgcatccatcccatgcgcatatgccaactagctcacgaatgagtacctgcgtcatctcatgttgagactcatggccaaggcacaccacaatgtctttcagaggtttaggccatgttccatgcaagcagcataagaacaagctaatggaaacgtaccagctaacctctggcagcatctctagacgcactactgggtcggccagataatgtctatgagttacatgagtacgccaactcatgaagacatatgagtcccctcgtagttctcatatgtctcacctactagtctcgttgattagtagtagctcacttagcaccaaggtgcctggcgttggtggagagcttacaccaagttctccccctttaagaagcattctaagcttttagctttctaccaagatcatatatgattttttctctataaatatatggttatcaatatatactaattctcaaaattcttcaaatctgattgcgttattgtattcttaaaaactaaataaatggtaaataccaagtcccatcctaatttggacaatatttaagttatttacggaaatgctccaatcctacaaaataggcaacagcatgccactagcatgcacgccaacatgcgcccccacttgatcacctcatggacatcacctagctagtatcgtgccatcttggttgacacgctacgttctcccccactttaacatgtcgatgtcctcattgacggaccacaagcaaattttcctgattttgactccgtagaaccatccttttggtgacgatctcccacgcctgctcttggacttgatcaaagaacctgtgccactgtcgctattcaga

SEQ ID NO: 311980 - DNA, 1160 bp, Cannabis indica
cattagaagaaaatgatttgcaatggttggtagacgtccctaaaaagcatcctgaaattgaaaaaaaaatgactagttgaaatttgtcaaaagtcgcataactcttaaattttatgtaccaattatatttgtactaagataaacttttaaatacaggtactagtagctaaaatattttttttgtatgctatcaaattagtaaagtacaaaaggaaccatcaaagttgtcggagcagaatgctaaacgtaagaaaagatgtggtaagtaattaatatataaatttctagcaacgtgcttcaaaatttagtactactgatttatgttttgtaaaaaatgatgaaaaaggaccttgagggccatgtcccccatgccactgtttttggatcaaatctcaaaaccaaaaaaacaaaacttttcactgttaagatagtaagtatatattaattattgaaaaagtaataatgagttaatatgtataaatcatatgctaattgcttgaatatgtgcactaggcttaactggaggagaaacttagtcagggacaagttcaggttcatggtcaaaatgacatttgacgcaggcgctcaggacactagagcatcctaaacgtgtcaggactgttgggcatgctagtacttaaaaaaaatattatttcattagttagacttgaaaaatattcattaactttatttattaatttataggttcctctaaactatttgcgaggaagaaaaggaaagtttctgatgttgtggctcaaaaactgagggagattcaaaaattaaaagcagaaatcaaatcctgtatatagaagaaaaatgttgccgaacaagagcaaaatgagaatgatgatgaggaagaaggatagttggcccaggagtatgtgccacaggaacatgctcaggaggatgagggtccataaaattattctcagcagtttgttccctatattagccacatgtcatgtacaatttcactaaacagtgggcagctaatataatgaccgctttagtaattggattagaaaaggcaattagcactaatttttgtcattttataattatttatgaatttatttaattgtgaaccctaatatttagaaataaatattagttataatttctcaatttcggagattttattaaactctaggggtatt

SEQ ID NO: 311981 - DNA, 1441 bp, Cannabis indica
tactcccactcagcagcaggtgtctggtctaaggtgtgacctcctacaaacaaaggttagaccacagaggactcatccccttaagcccagctgtgagtgccataacccttgcatccttgctaagacttttggtcttagcggcgtcctataagaaccattggatgtagtccttgaggggcttgtcaacctgtttcttgacatccactaaatcattgggctcaatttggtgttgtgaggaaggagcaaactgggtaccgaaagcatccactagatcttttaaggagtcgatagatctatgggagcttaaggtaccaacattttgctaggcttggtagtgtaccagggaagattctacacctgacattgtctctcacaccttaaagatcggtctacactttgaagtgatgggtgtgagacagtggatcctccttcccggtgtattgatgccaaaacttcagaggaatgtgaagggctttgattcgtacagagagtggtgagtgtcattccccatcgagcttgaatttagacaacttaattgtcgtgatccccttcactaaagaaactaaggtgtcaaactctacccgattgaccccatgaatggtggtttgtgtcctagatggagcttcgatcacccggttagggtcttctctagaagttcccatgtctgttgttcttcttttattcaagaagtcatttaggtctctttgtcttctaggtcaatcatgtgctccaattgacctgggtcttgttgttgtctgctgaccacgggttagtgaaggaaactctggtgaggcctccagaatgaacttaggattgtctcaagacaacccagtgtgggagtgttcattcagtgcattgtagtggctacttccctaaaagtagtcttcagcaggatcacaagtgcaaagagaattgaatttgtcactcaagttgaattattctccatgaacttgagggaagtattggtgctattttccatcggggccacgggtaaagtaatagcataactgctctctttcatctcaaaatacttctaagtataaagtggctcattggtccttactcaccgaacttcatagcctccagtttcaaagtagggtctcctactacttccttcaggttgagtagtaggtccatttccccttccagggtctcaaggcttggtttcttaagaacattaaggatgacttcatggaggagtcctgttggttctctagttgttgcgaggttattcaacaataggtggaggacccattagttggcaccctcgagcttgagttcttttgggcttttaatcaaaggtactatccctctaggagctctccatgcctggtgtgttcctagtgcctgctcagttaccaggtgtagtggttgtgttctatgcattcaaggttttaccttggacactagttcccacgtgaccagctggtcgacagggtgt

SEQ ID NO: 311982 - DNA, 1649 bp, Cannabis indica
agcagaagtgcttcagtctgggatgcatctctgtcttccacaacttcttccagagcatatgaggctcattgaacctgtgatgctggcttgaccaatatgcattcttgacagagaattttccagatccagaggctttccaaaataaaatatctccccctcatccaaagttctaattcgaagtatatcctctacaatgtccgctaaaaagcagtccctaacaaccttctcattccaccgtctagatcctggattaaatagatccatcaccctccataaagactgattgtgttgaaattgaaaattatttttaattttcttgaaggcctgtcctaggcagccatagcctatcccatatttcacaagtaccatctgctatcataatgcctgccccattcacacaaatagccctggcctctaagatacttcgccaacatcgagagtcacttccagttttcaccacatcccacacatcattgcttttacagtacttatctctgagaagcttcacccatgtcttgtccttcctctccataaccaaccaaaaaagtttagccaataaggccaagttcatatccttaaatcttctaaatccaagacccccacagctcttaggctgacatagaccactccaacttctcagcgcataatagtgcttcttatccacactcccagcccaccaaaacttagccaccacccgatccaactcctcacacaaggtactaggaacttgcacagtagacatgaaataattaggaatgctttggaggaccaaacttaccaaagttgtcctcctcgcttggcaaatgtatttagccttccacccttccaattttccgagaattttgtctttcaagaacaagaaatccttcctcttattagccgagaagaaaaagggattgccaagatacttctccttcgagttcagattattaaaacccaaaatccctttgacttcctctctacaaagacgcctagtgttaggagaaaacaccactccactcttggcattgctaagaagttgacccgaccaactttcatacttatggagacaattcagcagcgaacttgcatttttgatagtagcactacaaaaaaagatagaatcgtctgcataaagaagatgagttatgggagaagttttcctagccacacgaataccatttaaatcatcattcctttcagcacggaggatgagtttagatagcacttcactgtataggataaataagaacggtgatagagggtctccttgtcgaaggccccatttaggattgaagggaaccaaaggtgcaccattaatcaatatagaatagctgactgttgttacacattccattaggagagtacagaccttgctgctaaatctgttctccttgagaactcgcaaaagaaatccccattcaaggcgatcataagctttgttcatgtccattttaaccgccataactcccttttttgcctctcttacttttcataaaatgaagaacttcctgagcaacaatagaactctctcaaatcgatcgaccaagaataaaagcggactggaatggagacactaactgatccatacagcctttaagtcggtccgtcaagatacgagagatgattttatagccaaaattgcataggctcatgggtctaaactgatc

SEQ ID NO: 311983 - DNA, 1347 bp, Cannabis indica
aggattatattataataagaaagctagacctcatggtcgttacataaaatgtttgcaggtacagaattgatcgggatcgatccataaacttggtgggtaaaagcccacttagcgacattatgagccgcaaaattactgttcctactaatattagaaaaggtacaacacatgaaagaaggagaagacttagtacaaaaggagacataattctcaaggccccaatgggacgccttcccattgagcgcattgattactatgctcgagtcactctccacaataacataattaaactttaaatctagagctactgacaccgctaagcaacaggccgccgcttctccgtacagagcttccgagaaatccaaccgggacgtgtgtatagaaatccaaccgggacgtgtgtatatatagcaccttatattttgttatgttggctttatatgcctttttttttttgttaggtttccctttattgttatcattgttaatttggtcgtctaattatgagatttatgtagctcatttatttttgcttgaaattttagaacttgttcttccttattgaatgtatattttatatcgctctcaaaaaaaaaacagccttaaaaaaatatatttgaagtgcttcaatatatacgaaattagtatatatatacattatggggccagccggccggaacaattaataggcgagtttatataattggcagtagaaattaattcatgaataataagaaggagaagagttaaataacagtacttggagacttgaattgtatggttatgaatcaatgtatcagactttgtacgtactcttcataaatatccttacttttaataatgtggaaggttactatatatatatatatatatattgaagatcaggatcatgataacagtcactttgagtggatatgaaattgatatgtatatatatatataatattattaagagatgaattatatataagggaatcctgctctttggatgaaatgctgagattcccactaacatttcttttttatatgaagcttggaaagtcattgatttctttttatgtatatactgatgattgcatgcgttgattcagaaaactattattatgcatatatagataagattaatattgttgtgatgaaagtataatagtactactgttttatattgatcaacgacacattattcatcataaaattcaattgtacactcatgattgcatagtttgaaagaaactatataatcactataatacgtgtacattatagcttagagcttatatatatatagttgcattgcattattatgtgaggagggttacatctaacaataaattattaaatatatat

SEQ ID NO: 311984 - DNA, 2029 bp, Cannabis indica
taggtccatggttcccgaattgctattttaaaatacatcaagaaagagttgtataaagatgtttgaaagaaaatctatgttgaattgacaaaatattaatatattaattatttattttttaataaataaataatttttccaaattagtgaaatagggaaaaagataaaaattgttaagacaaaatttatcgagacaagatttgtaaggtaaaagttgtcaggacaaaagacaccaaccttgtcctaaatagacaaggtaggcacctagcattggtcctgaccctatgatatttgtctcttaggttaattaataatttaattaattcagttaggtaaatatataatttgaaaagtggttaaagatatttcaaggttgttgaaatattctgtcaagtgattgagagattctctcataaatatcagtaaccaaattcgattataaatatttatttaaacaattaaataataatttaattaaaatgatttaatttttataaataggagcctgatttaagaaatcagaatgatacttttcacactactaatttcaaaatctatagagagaaacagaaatcaatttttctctctattgttcttgctcatgtgttgagatgaataaggttatacactttatcataatagcccacattatttcttgtgtgtggtgtatcgatttggaagacaatgatgtgagtcaaaattgcaaaatcatcatcaactagattaaaggatacaacatacgagaagtttcgggataccctattaggcttcgagaggtatactcagggtcagccctaagctaaggcgggttaagggcccaaatgaaacaaaaaacttttaataaatatacatatttttaaataattttaaaaaatgccatttattattacaaaaagggcccaaaaaaattatttttcctagggcccaaattaactcagggccaaccctgggtatactttaaacttattaattttattgttttattttaatgtacacatatttagaaatactaggagctatagtacaatgataatcaaataatacgaaactcttccgctgcgtacttgatttaatactataaaaccaacaaaaacattatgttgacccatgctcatagtcttcagcgtatttgacgtagaaactacttgggcagccaaagcagtaatgacatcaacctcaataacactggcaactttcttccctaaaggtgctctagtagtaggccaatggtaattattgttggcgattctctcaataatgtcataggtctcattataggacttagcaagtaaagccccatttgtggaagcattaaccaccattcgagtatgagcattgagaccgttgtaaaatatttttatttggatgtgatgaagaatgccatggtgaggatattttcgcaacaattccttgaacctttcccatgcctcatacaaaggatcatcttcaaattgttgaaaggaagttatctccttccgaagcttagcattcttagtgggaggaaaatacttcatcaaaaactactctgccaattcttgccaagttgtaactgatgcaaaaggtaaggagttcaaccaagcttgagcttgatctcttaaagtacaggggaacaacttcaaccttaaggcatctttcgtaactccaggccatttgaaagaatcactcacttccataaatagacgaagatgaaggtgaagatcttcggtgggtgcgccactaaaccatcccacagtttgaagcatctggaacataactagcttcaattcaaactgtggtgcctggatttttggcctcacaatgcccaaattaagctcattgaaaagaggggcttcatattgttggtgttggatgatttgatctctatcatctgccatgatcactgcattctgaccattgttaggggctaactccctttgaactcgctgcccatcttcttggttatccatcatttctatttccccttatgctctttgttgtgctcttcttctttctctgaatgtgtgctcaatttcaggatcaataggaaata

SEQ ID NO: 311985 - DNA, 449 bp, Cannabis indica
aagtaagattttttgtagtgccaatcgcaataggatatctcatacattttagtacatgatttctttatcaaaccctaaactatcataatttttttgtcctctgcaaactaattagtcaaaacatcattcttcacggttgctcatctcaacccttccatttcttcttagttttcgtcatttattcttaaagtttcgaatttttaatcaagacttacgggcttaagacgtcagattgaaagttaagagatatgaaatatattttcttgctcaataatgttaaatattatttagggttcacacctattatatattttttgtttctagaaaaataggcttcagtaatgctatgatatctctctcgatgttgatctatttccaactatttttttatcgttggaaagtgttggaatttattttaccaggatcttagatctactcacaagtatgtt

SEQ ID NO: 311986 - DNA, 1839 bp, Cannabis indica
ttcaaggttgctaaattagatcttgtggaggtggctgaacaagcttcagagtggaactcagcagttgtttgtatggttatgggagctaatcccccatttgctgtgtttgaaggctttgtaaaacgaatttggggttacctgggtattgagcgagtggtcaggatgaaccagggacttactattgtgaagttcaaggatgaggccaccagagacatggttcttgaactagggaatgtgcagtttgacaagaagccgatgatagtcagaccgtggacacaggatcttgacactctgaggttagttcgatctgttcctctctggattagattacctaacttaggattgcaatattggggtttaaactgtttgagtgcccttgttagcacgattggtaaaccgattatgattgataaagtaacaagggagaaatctatgattaaatttgcaagggttttggttgagatggacattactgatgatccgccgtttgttatacattttgaaaatgaaaaagggcaaattcaagagcagtttgttgagtatgaatggctccccattaaatgtaacaattgcaagggatatggccataacatggcggaatgtaggaaaaatggtccgaaagtttggactaagaaaaaccagcaacatgagaagaaagtggaggatactcatcctactgatgtggttgattcggtgggagaaaatttagttcatgctgaagataatgactttatgggaactgtgaagaagattgatactaaggaagggaaaaagggtgttgaatctggaatcactactccaaaccgggattgtgttaatgagtggaagaccccaaagaaagttggaaattcaaaagtgataagatctcttgaagtgattgagcaagcttcggttcaaaacactttcaagattctgcaggaacatgggaaggatgttgaaaagtgtaacttatctttcgagggtgaagatggattgcaccaacatacttagttggaatgttcggggtatgaataaaagggataagcagggtgatatccttagtttgttgaagcttaataaagtaggggttggtgctcttattgagaataaactaaaaaacaataaagtggatgagatgttggtaaaggtgtttcatgggtgggattatcatcggggtgatcaatgtgaaagaagaatattggttgtgtggcttaagtcgtttgttcaagttcaagtgttaaaggatcataagcaactcgttcactgtcttgtgaagtttattggatctcaactagaagtgtttgttacttttgtgtatggtttcaacaccattgatgagagagtagatttgtggaaggagctctctttgattaactgtcagggggttccttggttgatagcaggagatttcaatgcagttttctgttatggtgatcgtactggctatagagcagttactcctagtgagttggtggatgctacggcttggatagctcagtccaaactagaagctctcaagatctctggctcaaaattcacttggtcaaacaagcaagatgggaaggatagggtttattcgaagattgatcatgccttcattaacgaggattggataattctatgcctaattctttggctagctttcaatgggaaacatgttctgactgtattgtgtgattaaaacccacaacaggggttttggggatcaagccttttaggttctttaatctctggactgctcacagcaatttccaggaggtggtgtctagcaattggaataaacctatggctggttctgggcttcatcgtattcttcggaagctgcttaggcttaaacatgtccttaaaaggttcaacagg

SEQ ID NO: 311987 - DNA, 1041 bp, Cannabis indica
attatgaagaatgtgaatattcaacaaagggtccaagcgaaaatcttctgagtactcctcagctaaagccaaggattccttgtatagtgatacagcttcagtagacttttcctcaattacagctattcctgcaagcccatttaatgcaagaactaatctcctaagagcttcttctccttctactttcgtcttatttatgagaacctacgaaacagacgactttcagcaggcagtacattaattataataagtgctgggaaacacactgaaatatataagaaaaaaaaagtaaaccaccattaatatttcctccatagtcatgggagactggtgcaaagagcgaagcccagaacttcccacttgaggatggcagcaagcttgacgtagcttcaggagtgtgttcagaagctttccagcctccgcatgggtgatgaaaggatcagatgaaccatcagatgctacagaacaacatgaaataacttttaaaatctgaaaatatcatctcctacttgtaatttttggttttaaaaaccaaatcttcactgatggaaaaacaaagaaagaaaaaaaaaagaaacctgagacatttcttttgagaatttcatctttcaaacttgcaataacttcctgagcaacaattgcacaagtctcatgttgcctctggtaaaagtgttcttcaattggcgagaaagtgagccaagaggtgtattcctcctgaggaggaagttgcaactcatctgctacgtgtgcttttgatgaacgccacattatttgtttgaagaattggtgagtaaattcaatggccccagcatctctcctctgccatagacagtgatcaaaattgagaaactggtgtgatatatacaaacatggttctcacatcaagaaaagaaaaggacagacaaaatgcacatcattagaagaaagcagataaacacaggttacaggaaaataaattaagtgggcagtccatgggtctagcagcaatgtgagttactggctattgtacagtacagtattaaaatatttttttcttgaggc

SEQ ID NO: 311988 - DNA, 1642 bp, Cannabis indica
agtaataaatgtaaattcttattcatgtttggcaaaatatatgccaaaaaattatctaagattaatagtatttaagacataattgaaagtatataaatactaaaataataaactatttcaaactatgtttggatataaaatagcataattatttaaagttaattattaacattgtgtaaaattatttaaaaatgattacactctcaattgtgcctaaaaaattaacattataattacacaatgcactaaataacattgtgtaaaattaattgtattttatagttttaatttataattacactctcaattctcacaacttacaaaaatttaagaaagaaatcaagaaccttaaattatcactaattacatgtagttactaatactatgcaactactttttcttttctgtcaaaaattattgtgtaattatttaaataaacaaatacgtcaaacttaataattactcgaacttctaacaaattttgtaaattcaagaaaagggaaaaattaaacaaataaataatgaatccaatctatactattgcagattggatcaaatcagtttatgtcttcaccgcaaattgaaataaattcaaaatacgaaatttacacttacgcaaatcagattgaacacagctactgctcttgaagcacgagaggtacggccggtctccaagttgtcgtcccatctgggctatccataagagcaatgcctacagcagctaattcttttctgattgcatccgatttttcatactctttttggctcctagcctcggtcctttcctcgattttacgcaacacttgatcttctgttaatttggcgcgcctcaaggctttttcccctagttcctgcaaaatctgttgccatagaagaaagtccataaatgtggaaaaccagaaagctcatatcacaaattcatatacatacgttggtgtaactagttggcatcaatcctaaaacttccagtgcatttctgatcatcttttccaaagctgtaagcgattctactcgtaaagcttgcttctttccctgcacagtaatatagtacatttcatgtcatgtagccgagaaccgaaaaaaggattgaaaacgactgattttgtagcaaaccacatgtctgaccatttgagctttacctataatcaataacgatgacaataagattataaaatcttgctgtacaataccttacgagtatgtagaagatcattgatggtttttaatggatcagacaaggcagccaaaacaactgtagtgtgaagatcatctgacatagactccacaaaaacattttggaatttgttgatctcttccatgatgttgggtggaatggaatctttcagagctgttacttcgtgttgtctcagaacgtcttcgcaatcatgtaaagtctataatgaaacaagtttaaatttagtaactttaagtccaattccaataggcacaaaatgctagagaactctttcgaacatcttaaattaacaacccaataaggagaaccgaatacctgatagatgtagaaaatacgttccgaagcactttcaagctgtgcatcagagtagttaattggagacctatagtgagtcgccaacaagaaaagtcgcaaagcgagagggtggtatagttctatgacctgaaa

SEQ ID NO: 311989 - DNA, 1111 bp, Cannabis indica
atagtctatttcccgagtatacattgagtaaatagctactaactaactagattaattaacttttagagttagttaatatttgtttgcttaggtgacatattactaaggaacactaactttaacaatacttaacatatattttatttttgcaatatagcgagcgggtgtggcttaaaaatttctatctagatttttgagtcaacacttttaataacaaattaatgatttgttgacttcttttacatatttttattaaaataaaattttattttacccctagtgcgttggagtacaattataaaatttgagccaaatgtaatatttatcatttttgagctaaatttagcatatattttacaccatccattagagatggtcatatgtggctatgtattataggtataattgcagtgcaaatgcctatttaacaattttaaactatcaaaatctagtttattgatactaaatatataaacattagctttacgaatgcatatatattttcataattgattattaaactgttatttatgtatttattttttatatgaactcttgaatttgactagattagaaaataagcacaatgcaactgcatgaggagatttatagtaatttttatagtttaggaagaatttttacaacagaaaaaaaactacaaaaaataaaactctacaaagattataatttagaggataaatcatatttattaaaatatacatatatatagctaaatcgtattttatagtaaagtattactattagatactagcggtgtccaacacattttagaagtgacgctttgtgattttttaataatattttataaaaattattatattaaattatatacgacacaatatttaattatactaataacacatgtaatagtgtgtaaagtaataacaccaccaccaattcatttgagcattattatggatctcaaattgcataaatcacaattttaccaacaattaatagtactctagtaatgtgctctcaaaaaagataaaataaaaaagagtaatttgcggcataaatacttaagcttaactctcagttgtaaataaataactaagtttaatttttggcggtaataatacataagtta

SEQ ID NO: 311990 - DNA, 1007 bp, Cannabis indica
atatagtatagaaaaaaaaacagtaaaaatgtaatatttcccttaataaaatatgaaaaaacaatatgtggtgtaaatttcccattacataatggaattaatgcagtaataaaagagtgttaaacacagaatagatagtatatggcctaaaaaagttaaagtagaagaagcagagtgatttttagctttgtaagctttgtttgtaagatgcctttgttgttataatatatactgtatagatcacagccttgaggtcctaaaattggggtgctctttgcttgtaaattggtatatatagtggagtataataaaatcatttgattcataaaaaaaaaaataattagaaaactatatggaaagtttgaaaactatatatttgaatcaaatatgggatggatagaatcacccccatcccgtcccgaactcgcattaggtatataaaatgaaattttacaaagatactcatgttttttgttatttaatttttacatttttttaattgacatgtttttatatttttattgtatcaagtttttaaaaatactgtgtcaaagtttcaaaattacaaaaataactgtgtttcagtaaaataaaaaaaaataacttaaaaacaaactaggacaactaaaaaataattttaaaacaatttaacaaacaacacataccacaacaaaaaataatcaagaataaactaagagtatacacaaaaaaaataactaaaaaaataattgtttaacaaaaaaaattctaaaagccacttaaaaaataactaaaaaaacaacaacaaaaaaataacaaaacaaatacacatatacacaataaaaaaaattatctagaataaactaaaaatatacactccaaaaaatgcacataaactaaacaactatatatacgaaaaaaaaatacctataaaataactataaaacacctaagcaacaatataaaaataattataaaacaacaaaaatacagctataagtgaatagaaaaataacaagatatcaacc

SEQ ID NO: 311991 - DNA, 898 bp, Cannabis indica
catgaactgaagtcctaaattccaaagcaactgaggcaagagtaaagctacttgcctagatcttctttttcactcatcatgtgttgcacattatcgacaacttgcttgacggaaactgcctctttctctatagaatcaaataacaataaatgagactttactttttcagataggacgccaagcttcctatcccttatttgaattgcgcgcttcatatcacaagtagattcctgatcattaatatggcatgtcacagagaaaattactgcatacacaacaacaatttcacgaggacattactaaaattaaaattagatcatatttacaagtttataatgtacattactcttacaaacattctcaaattgcaagccttaaataaaattaaagatacgttttacccatttctttttacattattttcacaaacctcatacgcattcacaaaacattcctttgattggcttaggttgtgtatggtttcctgcaactctttttgcttgttttcgagcaacacattgtcattttgaagataatttacctacagaataataataataatacccaacacaatttaaccacgttcagacaatcacactgtgatatcgaaaatgcctacaggtaatttcacacacctttctctcaagcttctggcgatgttcattagaggaagataattcagcttgcaattcctgaatcttcctagcgaaatcttcttcattttgcttttgtttctgcatccaaacatcaccgatcaatcattcaaagattgaaaaacctattccaataaaataaatcataagaataagacctgaattcgatgatgaaggtgctccgtcgccgaacgttcccgttcctgaaaattttcccaaaagagctgagagagagagagagagag

SEQ ID NO: 311992 - DNA, 2745 bp, Cannabis indica
cggaactgggtcaaggtccaggtccgggtttggggtccaagtctggggtctcagactgggcctcgggtttgggtccaggtttagggtcagggtccgagaccggatctgggtctaggtctaggtctgggaccgaattcaggtctccgggtccgggttcggtccgagtgctaggtcctggtccgggtccggttccagttccagagtcccggttcaagtctgggtccgggtctgggtttggggtccaggtctcgggttcgggtctgagtcctaggtccgagtttgagtccgaatcccgggtccaggttcgggtttgggttcaggtccgggtccaagtccaggttcaggtccaagtccggagtcggggtcacgagtcccaagtcccgtgtccaagtctcgggtcttgggtccgggtcgtgggtcgcggatctgggtcctgggtccgagtctgcatgaagaagagttgatattttaaaatttgaagaaaaaaaattagtgatgtatttgaaagaaattgatgtatggtattatgtaaaaatttgagattgaataaaaaaaatgagatgttagtaatatatttggaagaaaagatgaataatccaatccaaccgtatagttgttaatttttttattattattattttactttatatacatttagaaagaaaatgaatacttttataggaaattgaattaagaaaaataatgataggtttacacggtggactttgtgatcctttgcattggacgattcagcgacttgccaaacattccagacttcccttcaaagaaaggacctgatgtctttcatggacaagtcattcattcaaaggattatgccgccatggatttcaaagctgctactgaatttgtcaaagccaagcaagttactgtcgtaggctttcagaaatctgctctcgacatagcaatggaggtttccaatgtaaacggtattaagagaacatttacaagaatctcaaattaaatcaacaagcaaaagatgattatgacgataaagatttaatttttatgtttacgtgtacaggggtggaaaatccttgcactgtgttatacagaacagaacactggaatattccagatttcactccatggggttttcctttagctaatttataccttaatcgcttctctgaattacttgttcataagcctggcgaaggctttttactgggtctcttagctaccttactgtctccaatggtaattattattttgttctttaattaattattaaaagtttctactcttactaaaataattatatcatacaaaatattagaaattggcattctcaaaatttgtggaaagtggcataaagcataaacttccattggagaagcatggaatggtacccaagcatagctttcatcaaggaataaatgcatgttcattggcatcagtgcctgaaaagttttatgacagagttgaagaagggagcattattttaaagaaagcacccactttcagtttctgcaaggaaggtattttgattgagagtgaaatcaatccaagaaaaactgatgtggtaatactggccactggatataagggtgaccaaaagcttaaagacatctttacttccccaacttttcaagactacattgttggagaccctagtgcaacattgcccctatataggtaataagtacaataaatacaacacaaattaattttcatttctctttttcttcaatatatttcttgatgaggattgttattcggcacaaggtaacgtgttaagattagttaaccatattgcctaaaagttattttcttaagttatatggcacccgatacttaattacattaatagcggtatgacactgaggagggtgcttagcaccagtgtgccttttaacaattttcatgtactcatttagttctattttattagggaatgcattcacccaaaaattccacagctagcagtgattggatactcagaaggtttgtcaaacttgttcacctcagagatgagatgtcgatggctatcagagcttttggacaggacttttaagctacctaatatcaaagaaatggaggaggatgtaggtaaatgggatgagtacatgaagcgttactctggtcagtactacaggagatcatgcgtagctgctatccaaatatggtacaatgaccaattgtgcaaggacatgggttggaaccctaaaagaaagaagggcatctttgcagaattatttgagccttatggaccaatggattatgtttcaccttaattaatgtcactcatcaccacccttgtcatttacaacttcttttgatcagtatcaccatgttattctcttttatgactcgttttcatactaaaaaaagaatgtaattgaaatacttatatttatgaaatttttatttaaagaataatgttttaaaatattttcatgtaatgataaccatagttagacatgtcaaaaaatccatttagttggagcgggttggagctctgatccgatggatcacctctgatccgaaacattcggatactattggatcttggatcagatctgctctgccccgcctaatttttttctagatcagatctgatcggacccgattgaaatttatttaaaaaaaaacttaattgaagactcagatcccttgggatccggacccagacctggtgataactctatgaaaatagagttatttatatctttttgagcattaaattagctttgttctgaagtatttttagtttattttagtgac

SEQ ID NO: 311993 - DNA, 3511 bp, Cannabis indica
ttttcgggttgcaggttggctgattggtggaagtttttgggggttgcgattgggtttgacaggccgattgtgttgtggctggttgtgttgtggcccgattgagttggggccgattgtggtgtgggcgattgtgttgtggctggttgtgaggactatttaataattaattgcaattagtattctagaaaatataatttccattaaacaacagtctatatagaaaactaagcattattcaaaatctttaaacaaccaaggaaatctaatcaaagtcttggaaacgacaatactgaatacaataaaggattgtggttattaaagtattgtggtgtgccatggcttctagtagtaaatcttatcaggaggtggaaggacaatatgcgaatatttcactagatggagaggatgatggggagttgggtattgattttcttgtccctgaggaccaagttttgaatgttgagttatgtattgtgggccggttcttgactggaagagccattgatttcgaagttatgcaccatgttatggcctctttgtggcagccaggtaaaggagtttatgctaaggagattgacaccaaccgttatctgtttcaattttttcatgaaattgacttagaaagggtggtggagggaagcccgtggacgtttaatagggttcaatttgtttttcacaagctcagaaggggagatgatccaaaaagggtagtgctgaacaatctcgacatctgggtgcaaatccatggtctccaaccggggtttaagtctgcgagtgttgtggagaagttgggtaattttgttggtgcatatgttaaggctgatcctaagaactttcagaatgtgcggagagattatatgcgtgttcgggttacattggacatcactgttcccttgagacggtgcaggaagctccgtcggattgcaatggaggatgggttctgggcagaattcaaatatgagtatctccctacgttttgttttatctgcggtataatagggcactctgagaagttttgccctaagctttttgatacaccagccgagttgctcataaagccttatggtgtttggatgagggctcaaccacgacggagaaacaacttggtgggctctcagtggttgcgtgatgggaatgacacggatgagatgtttgctggccagttcaatggtggtgcagtgtctgcttcggtaatgctacagcagcagccgagtcgagaggaggttgttggaggattttgtggcaattcaatcctgcgagtaaggggggggggggaatatccgtcaatttcattcttctaatgctatggaaaatgtgggatatcatgttggtattgaccatagtgggataaatgctaatgacgtggttattgatgatcagaatgctgatatcatgttgttggattctaagaaaaggcgcactagggaaggagtgccatcgggccaactaggtgtggaccaacatgctattgggccgtgtaaggatctggttgagaaggataatagtagtatggatgttcatgtggctcgagttaatcaagaattgggctcacaaaacgggcctatggtgggtgctgagatccaggcccaccgcccattatgagtgtcattagctggaattgctgtgggcttgggaacccatgggcttatcaattccttgtggatcttattatccaaaagaagcccaattttctgttttgtgtgagactctttgtcggaagaacaagttagaaaggctacgggttgcggtggggtttgatggattgtattctgttgatgcgcgaggacatagtggtggggtggccatgctttggcgtaataatgatgatatgcagttgcttggctattcttttcatcacatagatattcagattttgaaagtcgcttcttctccctggcgtttaacgggtctttatggagaacctaatagagctattcggtataaaacatgggatttaatgagatcgttaaagtcggaatcttctcttccttggtgtattattggcgacttaaacaatacgactagtcatgcagataaaagaggtggaaatagatatccacaggtgctgctagatggcttcaatcaagttttgtttgactgtgatcttgttgatatagtcgggtatccgtatacttgggagcgtgggaggggcactgattcatgggttgaaattcgccttgatcgagctcttgtttgtcctaactggtttcaaaggtttcgtatggcacagttacataatttggaagtctctgtctcaaatcattgcccgctacttcttgaaccgacgatgcgttctgtgatggtgccatttcgtcaatttcggtttgaaaatgcctggcttcgtgaaccgctctgtcgccaggctgttaaagatagttgggagctctgtgcaggtcagcatgttatgaagaaaatctcgtattgtggggaatctcttcaagcgtgggggcaagagtatacaggcaattttaagcaatgaattagccattgcaagcgggaattccagtattggaagaaggggcgtgatgctatatccgttcagaagtttcgagaggctgtaatgaatcttagtgaagttataaatcaaagagaagtgttctggcgtcaacgctctaaacagttgtggcttcaagaaggtgatagtaacagtaagtactttcatgctaaagctacttctcgaaagaaacacaatactataactcggcttatgaatgatgtgggtaattgggttacttgggaggatgagttgccgaatgttatggttgattattttactaatttatttacttcaaatgtggttgattactccattgtggtagaggagattattccttcgatcatagtggatcagaatttttctttgcttaggccggtttgggaagaagaagttagaagtgctctgtttaatattcatcctgataagtcccctggtcctgatggtatgaccccaggttttttccaaaaatactgggaaatagtgaagagtgatgttgtgaaccaagtatgccaattctttgcgactagtagtattcttgatggactgaatgatatgaatattgttttgattccgaagaagacgcagcctacttcgatgggggatctgcagcctatatccttgtgcaacgtcttgtataagacagtatctaaggtgctcgcgaatcgtttaaaaaaagtgatgcctcaaatcatttcctcaaatcaatctgctttcatcccgggacgccttattactgataatattatgatagcttttgaggttacgcactatctcaaaagaaagcgtaagggcaaagaaggctatatggcgctcaaattggatcttagtaaagcttatgattgtgtggagtggggctttcttcgagctatgatgaccaaaatgggttttgacttgcgtttcattgatcttgtttttgctatggttagctctgtgaggtataaaataattcatggtggtcatgagcttggtttgattattcctgagaggggtattagacaaggtgatcctctatca

SEQ ID NO: 311994 - DNA, 2513 bp, Cannabis indica
ttattttatcactagacacctttactacacacttgtgtataactcacacttttgggatactttgcctttagacacttattaagaactcacacactttagactctttttctcacacttgaactctcttgctcaaacttgcatcttaagcacacacctcacttatatttataggctacaaaggatgtatctaaagatttctagatttttctaatttactagctaattaattacttcttactattttctaaacaactctagaattatctaatcttagttctagtgattctaagttttctctaaaactttctagagtgttcttgatttttcttacaaatttcttagaacattgtaaaacattctaacatattctagatttgataatgatttttaacaaagcacaaagcaataacaatggtttcgcctcctcctcatgacttccgagaaaatcgtaactcaacttaatgctggagtagacttttttttccacatttgaactctttagtcgtcgcaatgcatccttccatatggcctcctcctttctgtatttcaaagcatgtgccactgttgcaatggcaattggcaggcctccacattcattaacaatctcaagtgccaaatcattaatgtaatctattttagtgtctccaatgattttcatgaacaaattgatggcttcactcgactctaaagctccaattaagaacacattactctccgccacacccatgaagttgcgtaaaacttgttgatctctagaggttataaccatcctgcactcttcgtggatcccgattgcttctagatcaagttcattccaaatatcatcaaggattaataaaatcttgctttcgtcttgcttcattcgcattcgaagtagttctgctctcttacccgtactgtctttctcgtccaactttaaaccaagcttttcggcaatatgttgttgaatctcttttatatttggtgtttgagaaacagttgtcatgaccaccttactaaacaacttctcttcctcagctagtctggcaatctctttggcaagcatagttttgccaatcccacccattccgtacaaccctattctgttgctgttgctcctcctattagcagcatctcccacagctgccattatgatcttcagaattttgctcctcgaatcaaaactctcataccctttcgctggtgttgcagaggaaccttctggctgttgaggataggatattggtatggaatcaaattctttattcttggagagcagtgcacgtacgttgattgacatcttgtttgctttcctactgagttggtgtcgggtcaccaaatgatgaggggatccacaagagcacaaggcctttgcatgactttcggggttaagaaaagtggtggcctctccagagatttgttcagcgttcttctgccatgtttggacatcagcctcgatttcatgacagttattcaaggcttcaatgacacggcgttccattctttgagtggcattgttcaaatcttccaattgagtccggagttcagttacgttggttgtgtagcgaaacagataacccaactgccgtccgagtggtgcaactgtatactcggctattttggctccaattgaaataacaaattccatggtaagtagagacacaattcccttctttctttctctttctttctgttattacttaacaaagcacaacaacaacaacaactaagtattattattgaaataatatattatgatattaataactaagaaaatgatcataaaaacagggcaaaagcactcacctgataatcaaagagaaacaagttatgtcttatgtaatgtgagtaagaccgagtgaagtaaaagctgaaatgaaaatgattgaaaaggaaacaactcagctaataatccaccattaataaaaataacactaacaaattaattcaataaaattaatctcaagcaagcatcaacctgctccaaatctaaaactatgaatccttcttttttttttgaaaaaatataatgattgatatgatgcaagagataacaaaagtgcaaattattaaacaaatattctcttgttacaaataaataagagcatatatgcatgtaaacatattatctagagtagaaatatagagagaacataaatgaataagagataattaaagtacgtacctttggctttggtaattatatattagagattgctgaaacaagcactactactacactagactagaatctttccttttcttttctcttttatgaaagaaatagaacaagtattttttttctttttgacagaaagaaaatggaattaaaaaagaaaagaagaatgactgaaactcaactaactcaagtgcagtaatcaaaaggaaagaagagagagagagtgatcaagttaagaagaatggttgaagtaaaactgaaatatagagagtagtgaagtaagaagacaataagtaaagtaataaccccactcactcactactcttctctaattgctcattaattaattaattaa

SEQ ID NO: 311995 - DNA, 907 bp, Cannabis indica
tagacgaagatagaatttgatttagcaagagcttgaaggaaaattatggaaaaagtattttgggtgttatgtcaaaagtaaatatatttttaatatcatgtaaaaagagtatcgttatttagtttgaaactcatgctaatgatatatgcacagaaatatttcacatctagctctacattttaaaacattaaatttcaatttagataaatatggtaatttttttagtgtgttttattaagtgcacatgtcattaggcagctttttattttatttttttaaggaaaggcaagtccaataaaaaaaatggacaagcaacatatggcttcaactcattccaaccaacagattgaagatattttagctaataagcaagaaggttagcatctctacgctcaaaacataaattcactctgtcaaacttaatacaaagactagaaatatcagtgagaataccaacatccctgcatctattgacactacaaaattgttgattggagaaacttctctgatcatgcttaaaatccattcatcaaacttttgttggtacgaaatgcttctacaaaaaccaaactaagtggaaaagcaagttagagcctagctttcttactataacaacagtcaccctttcagatatcctttacacagccaaatcaagaaaggatgaggaggtaagctaaaaactacctaaactgcttactggtcaaacatggatggagaaaaataagacaggagatgcaacaaagaagacaacactatattttctttctctaagagaaactttacactaagatgttttaaacaatcctatactttggctaatccatcactcacttgacaacacctacaaaaattccagcacattggttgacagtttacagcagtacaaaagaatatctttttttttttt

SEQ ID NO: 311996 - DNA, 1531 bp, Cannabis indica
atcgtctcctagtatgctcaccagcacttctgtctttgttgctctagttgtctgctcaaatatcgggaaaatcccacaagataaaataagtaagaaacaatggatcgagatcaacaaaattccatcaaaacatttatctgattatcatttctccagtgagaaaactatcacctgattctgatccttctgaatctgttccataatattaaatactcgctcgattccaagacttacaccaactgctggaacttgctttgtaccaaacatgcctattaagttgtcataacgtcctccagccgcaattgaaccaacctaaggacaatcaacagttagttttacatgaaaaataaggccttttacttcagagtaaaggcatctgaaagttaaaaaggaaaaagaaaaagctgaattgcttgcgtacagtacataaacaagctcacctgtgcacctcctttgaaaacagcttcataaatcactccagtataataatcgagacctctggcaagactcaaatcaaaagtcaccttgttgatacactttgatttatccaaagctttgaataaaatctccagatcattcaaagcatcaaccgatgcattattattcaagaattcgctcccctcgcttttaagtttacttaacaattcaagaggagatcccctctctttcacaaaatcaccaattttatctgctgcctctatagtcaatcccttctcttcaacctatcaaacattcaccatgacagatagtaggaaaaaacattataaaagatccaccagattaaattacatcaaaaacataaggagcatagatagcttctcttttcaacaagcatttttcctgacaatgttatggggtacaagtaacaaatgctactttagttcaactatgtaggaatccatgatcataaacatatcagtagatctgcctaattatacttactctttctattgatttatttatttattttgttgtgtggccctggaagctcgaccaggagacctcccagtggccccaagtttttgagtcttagggggattcaaaccttggaaatttacctatcagcactttccagtatctccttaccactggaccaccccttgggattgataacttgctctttcaaatgaagagtagttataaatacagaaaatattaacacaaatcaacctttcaagatacatcacacaaaaatatacaccccgaacaaaaggagcgagaaattgttttaactcacaccaaatatacttatgcgtgtgtctgtggagaagagagagattaaagcactcaaaatcaattgcaggtaaagtaaaaagatatatgcaataaaaatggcaacaaatgcagcatcaaaacacctgcatatgcattgagttatataagagcaacctgcaacgcaaaaatatgtgcagaagtccttaccatttctgtcttaatctggtcaaaaggttgcttgtctaacttgtcaatgcttgaacaaatagttctaaacttctcagggggaactccacaaatttctaacattccatct

SEQ ID NO: 311997 - DNA, 1745 bp, Cannabis indica
ataacaagcataaactccaatttaggtccacaccttgtacatttcttaggtatatccttaatcccaaatgctacaagtgccttagctcaaatggtagactatacatctctagagatgtcatctttgatgagtatccgtttccctatgctcaatcaaccaagtcacaaaaatctcaaagttgtcctgtgtgttgacactttgctttcaactatattcctacactatcagaccctttaccaccagctcctgttacatgtagttcaagagaacaccaaatagatccctcatgttccacttcacatgttatcataaccattaatgtgcatcatactccctttgaataggttcctagtaatgtgcaagtcacaaatcccacaattgtctccactattggtcaagttgaaactctagctattgtaagtactattcctattccagcacctgaccaaataagggtacaagcttctgattccaatgcaactaatactaccaataatgcacttgttgttcaaactgaagtcagaaaaatgcaacctacactcactacatatactactcctacactcagtacagatagtgttcctcataataaaaaaactagacacataatgcaaactcgatctaagtcaagtatctacaagcctaaaacattcattgtgtccaagcttctagaatcaattcaataggccttgttgtatggctattggaacgatgcaatgtttgaagaaatgtttaccttgaagaaaaacaaaacctagacccttgttagactacctgctgggagacaagccataaggtgtaagtgggtgtatagatcaagagaaatgctaatggttctatcaaccaattcaaagaaagactagttgctaagggttttcatcaataacatggttttgattttacagacttttagtccaatagtcaaactagtcacaataaactcttgctctaagcaaagggtagtgtgtgagacaattggatgaaaataatgctttttgaatgataaccttcaagaagaagtctatatgcttcaaccacctggttttgaagaccccacaactcctcaccttgtttgcaagcttcacagagctctttatgggctaaagcaagcaccaagagcatggtttgaaaggttacaacagtgcttgaccaaacttggctttctgtcatcaaagaaaaatcactccatgttcatccaacacacaccacactccacaattatcatcttagtctatgttgatgatatcttgatcactggaagtgatcactctgccattgactctcttatatcccagctgcaccaagaactctctctcaaggatttaagaatgttgaactacttcctaggcatagaagtgagtacggtgatcaagaaatgctacttactcataccaaatatattagggatcttctctataaggcaaaaatgtaagaagctaaaacctaactcatctttcatgaccagtggccaaagactctatgcctatggcaatgatcccattaaagatgttcaactttacaggtcaatagtagggactttgcaatatctaactatcataagacctgagattgcttttagcgtgaacaaagtctgtcaattcatgcataatcccttgcaaagtcacttgctggaagttaaaaggattttgagatatgtcagtggcacacaacatcatggattgcatctgaaacagtctgcatctcttgatctcaaggctttctgtgatgcagattgggctacagat

SEQ ID NO: 311998 - DNA, 2129 bp, Cannabis indica
ttctatatatggtcagatttctatattcattacctgatttgatttcctgaattaattgtcaaaatattctgacaattaatgtggcacagatactgatggagtatctcacctataaatatagggtctcggtccccgagctcctcactcattctgttcataacagcaaattccatctaaagagagttgagagagcgaggaagcccgattacccatggtagtcaatttcctttgcagatcaaagcttatgtgggtttgaagctcaagaatcaatggctggaggtatttcgatccttaaattatagtgtatatatgtttgattaattccgcactttatacttaaacatatatatttcagtttatacatataaatgtctaacaagttggacttggacaacattttttttaatctataaactcaaacatatattttttttaataagataataaagaaaacaaaaaaagaaagtacgtgattgtctggagcgttttagtggttctaaaatctaaattatattattaataataattaataaataaataaaattaaaagagagaagcgctctcttctcattatgaattaacgtgctttgatgttctctcttatctgtctttgcattaccaaaataccaaccattaacctttttactttattttattttaattaatttatttttctttggtattctttttttttcttcattcaattcaaaatttgaatgaaaagcttgggttttcgttagaactttgctagtgtatttagcttcatcaaatgattcgttcacccattttaattaaagaaaaaaaaaagagaattattttgatatttataaattttaatatttgagtattattattaaattttgttgatggggtttggaatggacaacttttttagtggaaaaaagtggtagcaaagcaatggcaatggggtttgtcagcacatgtgatagacaactagaaaaaggtactcatttcagcaagtactattttggggagggaccatagaataaatttatagaatatataccaatataaaatatctacctaatttagcaaaaacaaaataatttaataataaaaaaaaatagatgtaattaacattttatttgttttctatgcatgcttattaacaaccaatttggcttaatatcgatattttttctttcagtacttaattatctctaaaataatttataaattaatgaaaataaataaattttaaatattgttagtatttataggtaggttaccataactgtttttgacctaaagaatgttacatcagttttctgacaggtagaagatctatttcatttaacctaaataaataaataaatctatttacactaaattatattccaaaaatccatatattctagtagaaaaaaaagataaaaaaattattctaaaaaaaatgtaatgtaaaaggttatataattaattagctgatattattcagccagttagaaattctagcatgggccacatatgttttttacactactggcaattttattttattatttttattattatttgagtgaagactactggctattttcagaatgttagaaattgaaaaaaataatttttctttgttttatttatttatttattaaaacttgaaaggccaaacccatacaaactaatgataacacgacagctcagcacagtccctgttatcatttttttttttttcaggcaagttaagtaattttttatttttaatttttatagatagcatcaattaaaataaaatcatcaaattttttttctactgaatttaccaacaaaaaagaaattatctatctctcttaaaatactgttccaaattttttatagtcctaatagttgacacaaaaatttgaccctaataaaacaaattatatataggagttttatatatgcatgctttccaaacattatatatatgtagctttttttaaagttgataagactccatgaataaaatttggggaatatatttctgcaaaaaaaaaaaaaaaaatagggaatatatttttttaagccataaaagaaaaggtttgggggctcgtttggaacggcgtactaggtcgtattgtattgtattgtattatattgaattatattttatgtaatatttttat

SEQ ID NO: 311999 - DNA, 536 bp, Cannabis indica
ttagtcttagtcttgaacttaattttctattagtttcagtgtttggaaagcaaattatttaatcacaaatagaacgttactatggactatatgtccctatatatatgcccttgatcaggggtcaaacttagccgtacttgtcaacctggctgctttattgtcatgaatgttaccaagtttgccatgatgtattatccctattaacaagttgctaactttactaacttggttgaggctcaggctaatattattcatgggatctctttatgttgagacgggccaacaatctcgcaattattctttgttgataatctaatactttttagaagagcaaatgtggaggaggctaaaggattgtgggattgctttaataagttttgttgctcgacagggcagtaaattaacactacaaaaaatcttacttttagtcacaacaaaacttatgactaaaagtgaaaaagttgtgactaattataattcattattcctatgttttgactaaaaggttcgtggtaaaaagtattagtcacaaaaat

SEQ ID NO: 312000 - DNA, 1875 bp, Cannabis indica
gactacacagttgaagaggcttaaataggttgatcggtactacctatattaacaaagtgcatcttgttttctggtaacccatcacaaaagaactctaaaagttaagcatgcttgacctgtagtaatttcaggatgggtgacctcctgagaagttttcacaggttgcgtgcaagtgaggacaaagcacactagaaatactcatgttagtttgtagggtcattctttagtttaaaaagcacccaagagtgacgtactcatgtataagagtcattactccgtgggagaagacctaatagaggcttaaagcggggacgttacactacataaccctaatattccaaatgtctaataatcttgtctcgccaaataaaaggttctaaaccaaactcatgtgactttaatggccaaattgtcgcatttccacttgttttgagcataaaacatagaaatatcaaaattcatgtttatcatatataatataccttgaatttaataaaatcttagaaattataattcaaatgcacatttcttgaaaataggacccacatcatataatataattaattaattaaggctaattatctactagtctatattctaagtatgcagtcattacagaagatgccttctagaaattgaaggaacaattaactaaagctccaattttatccaagctaattgagggataactattatttgtacttggcagtgtttgatcatgaataagtgttaccccagtgcaagaaaaaggaagggtacaacttccagtgtattatgtgagcaagagattactgggcggggagtctagatatcctatgattgtgaaaatttcctactgcttgctaattgccccacagaaactacgaccatactttcaggcctatgccataaaggtaccaacgaatcacccttttcgtcaagttttacaaaatctcaagtcatccaaaaaaatcttaaaatgggcaatggagctcagccagtttgacattcactatcaatcaagagtatcaattaaaggtcaagcgttagcagacttcattatagaatgcacatgaataaatgacaatcttaaagaacccatcccaaaactagaactctggaaggtttatgtagatggagcttcgaatgagaagggttctggagcaggaatcattctattatctttgtagaaacatcaacttccaagtgccctccagtttgagttcactatatcaaacaatgaggttgaaaatgaagtactaattgcagttttgtaattgaccaaagaacttggagcctagaatattgagctttatagtgattcacaactagtggtaagccaaaattttggagaataacaaacagagggagaaaagatagttggttacgtaacaaagtatcgagagttgctatagaatttcaaaagatattacgtcaactaaatccctagggatcaaaattccttcgtagatatgctagcaaagttagcaaaagatctagaaattgataaatatggactagctccaatcgcccatttatccgttctaagcacagaggccctgggggtaaatattaggggtgttcacaaagtatccgatccaatccaatccaatccgcaaaatgcggatatccgcacttgtgcagattggattggattgaaaaatctaaaatccgcacttgtgcggattggatgttgtttgacctcaaaagtaaccgatccaatccaatccgcacttaattatatatatttttaaaaaattataatatgtaatatatattattaaaaaaagacacaaacttatcatttcttaatcttttttagtaatatattgagttggtgcattttattattttgtacacaagaaaataattcttattcacatagacacatacaca

SEQ ID NO: 312001 - DNA, 1889 bp, Cannabis indica
atcatttgaatgtcagcttttatatgagaaagagttgactcgacggggcagtgaacctgatgtttggagctgattagtgaaagtatcataagtatgccttcctataacgagatggatgcctcgctatttgttgttcaagttcattcaactgttatgcttagcttgcataatgtatattatacgctaagtgctctaaaagtcaccatatcgtatttacatctcttcatacatagcgaggttggtgcctcgctttgtattactgatgttgcctatatgatcatgtcttcatatacgaaatggttttctcgtcaatacgtgaaataatagtttgtgcatccttacctcacttaagactttacagtcagcaagttatggatatactctaccagttcaacatttaatgagttattccatttcaatatcttccaatataatacttattatattcgttgatttgtatcctcccagtttgacacttgttcttctctgaagtacctgccgaatttcgggtataacaccagttataattgagaatagggagttgagtgttaacctagtggagttggaattaacaaagtttgatattatacttggaatggattttctgtccaagtattcagccggcattgactgcaaacagaaaatagtaactttccaactagagggtgaagatccatttgtttatgttagggcaattcagggttctcgaatcccaattatttcaattttaaaggctaaagatttattacacagtggatgtgtaggattttttgcagttgtaattgactatcgcaaacctgaaatagttgggcctgaggatgttagggtagtaagagaatttcttcatatttttcccgaagagttaccggaattgtcgccgcagagagataaattttattattgacttggcacctggggtagagcttgtttcaaaggcaccatataggatggctccagctaaacttaaggagttaaaaatacaaccttaggggatgctagatctagggttttcccaacccagtgtatcgccctagggagctctagtgttgttcgtaaagaataaagatggatctctctagatgtctattgattaccaagaattgaataaattgacaataaaaaacatgtatccgttgtcaaaaatagatgaattttttgatcaacttcacggtaagacagtgttctttaagatttacttgcgtttaggttatcatcaactgagaatttgggaggaaaacatcccaaaaattacatttcagacctggtatggtcactatgaatttttagtgatgtcattcggattgacaaatgctccatcggcctttatggatctcattaataaagtgttcaaggattttctcagtagctgtgttattgtatttatcgatgacatccttgtatactctcaaacagaagcagagcacgagcaacatctctagatggttttacaatggcttagagatcataagttttatgcaaagttaaaaaagtgttaattctggttatcagaagtatccttcttagggtatatttttggaaaggatggaattatggtcgatctaagaaagaataagttagttaagtatttgccgaggtgaagaacagttacagaggttcaaagttttcttgggtttgtagggtattatcgacatttcatagagggtttttctaagatttcaatgccattgacaaaattgactaagaataaccaacggtttatatggtctgacaagtgcgaaatgagtttttaggagttgaagaaacagatgatcacaacaccagtgctagctttaccattcgaccaaaaaaaagtttgttgtttattgtgatgtgtccatacaggggtctgagatgtgttctgatgcaagctgacagagttatagcctatg

SEQ ID NO: 312002 - DNA, 863 bp, Cannabis indica
aacaattgtatattaatatattttttaaatctctgggtgggctttagcctttcctcaacaccccgaggtctgcctatatttgaaattataacacatatatatatattcctttatagcatgttaaatagtgacaacaaaaagtaatccaaaatactgtaagatcgaaaccccctaagttgtattgtcgcgatatgcacaagcattatcaagctccaaactcactgttcctcttccttagcctttcctttacctacacattgtagcgtacggctgagtcaatagactcagtaagatatgcataaaatatatacaatgaaatattagcttgtactttggctcttattatgagccaacatccaggggtcaccgaatgattaagaactttctcaatagaagtatgaccactatacctcatgcactaaagtactactcccgtacaagtccctatctgtacaaacattcgcacaaagacttggagggtaaaagttatctcgatttttgcccacctgacatggcaatttaactcaccaacaagaagaccaagttggtaccttagcaaacgggaacctagcactcaaacgggacatcaattgacaaactcgctttgtcacagaagctagtcggacacccttggtcagccagtccctagacaataccatgaccggccagcctgctccctacagatgtctagccagccaagagaaggcttgcagcattttctgtacaattctacacatggactacatgattgagatgcaaattaggcgctaaaattcaaataaaatagttggaaaataactatgttcaagggcatttttgtcttttataattaattaattaaatatacaaatatcctagggttt

SEQ ID NO: 312003 - DNA, 944 bp, Cannabis indica
gatatattaaagtactgctagtcttagagagagtagtccacgttactactacaacatatcactcctaccaatgtgttagtatcgctattggtactaattaaatatttaggttttacataatttaacataataatttttaagaattatcgctagcaaaatcgacaacatgacatatacgagaaagtaggaagcaccactaataattaatagcaatagcaatgctcataacacaactaacacaacacaagacaagactatttttatttattattatatcccacgggtaaaagtaaaccatccttcacttactttacatctgcatgtctacttttttttttttattttctaatttttttactattataaattaattaattcagtaaagttttttttattaaaaaaatatatattaattatgttaaagactgttttgagttttgacagtgcatgagatccttcctttcacgcaaaacgctgatgttataacagttctttttctttttcatcacttatattcctttctcgtgatcatgcatgttcatgattcttttcctaataatttagattaatttatggataaacttatcataattattatttatttccaattaattaacagttagttttttcttttacaaatacatatagtaatatcttcatttgagggagaaagtcatactagccccccacatccgttttttcttttttttctttcaaactaacaattctaaaaggaaaactattagaaaaaattattttaaagaaaaatgtattgtgcttagacttaattaatttattcactatgattattattgtaaatgtaaaatacactactaaaaaagttggattttaaaaacaggtaaattgcggaataaatatctaatgtttcagattttatacacttaaatacctaatgtttattttttggaggcaaaaataactaa

SEQ ID NO: 312004 - DNA, 1128 bp, Cannabis indica
agagtcttcaaactcactccttgtgagcttctcctttaaagctgtcaaaagatcaaacattgacccatctcccaacttcccacagtgtttgtaccaaggaagaagtttccacaccgtttttactttatcacaattccacaatgcatgaggaagggtttcgacatgacttccacaaagatcacaaacagggctgatattcatacctcgatgacacaggtttgtttttgttggaagccaattgtggcagacccgccacccaaatagtttcatcatcggaggcagctgcaaactccaaagcattttccaccatttattgatttctcccatattagagcatcttgtgggatgaagattcatttccctcccaactctatacccacttttaaccatgtaattcccattagaggtgtaaggccaagtcaatatgtcctcggtatataagtctatcggaatacctcggatccatgggatgtcttccctatgaaaatgacgatcgactacctccagtttccaagtcccctccgctgttatgaacgtctgaagcttagtgatcggttgtattctaggcttgtgagtgagaatcgctccggaaggccgaggtaaccatttgtcttcccaaactctaatgttccttccattcccaacacgccaccgtgccccttcacttagaatcttgcggccccaaatgattcttttccaaacccaagaagccctcggtggacacttagcttccatgaaagatgaagtgggaaaatagctatttttcaagaccccagccaacaaggagtggggattatgaatgcgacgccacccttgtttggccaaaagtgcttggttaaattcggttagactccgaaagcctagccctccatcctccttcggcttacaaagcttatcccatgagctccaatgaagtttcttattgtcttttgtgtcgccccactagaagttggctgccatggtgtggaggttcttgataagtttcttgggaaggcggaagcagctcatagcataacttggaattgcttggaccacgactttgattagaatttcctaacccgcttgggagaacattgaggccttccacccctttagtttattccacactttatctttaataatctcaaa

SEQ ID NO: 312005 - DNA, 1711 bp, Cannabis indica
atgggtgtaagggcccaatgtaggcttgaagcgggacgttacagccagtctacttaagtggaaaaattgctcgactatcaaaggcccttaatcagattcacattaaactggtaagtgtctattctaaaacacttcctaatacccatataaaaattctagggtttttctaccaaattacgtggtggaaaaatcctaaatattaaactcatattattggtctaaattatatatcatgttgtagagcttttcacgagctttctaaaaaagcttcttctaaattatcaaataattcgttataatatgatcaaatatcttgttctttcttcatcagtttatgatccctagtgggcctttcagtaggattcaaaccatatgtagaacgtctaaaatggagatccaggtgaaaagatatggccaaaatatgaaaatcagccttcccaaaacaatccaaccggacttctggttggtacaaccctgtaccatccggaatttcggttgtctaggcagattaagtttaaaatttcaaattttaaagctcgcaaaacttctcccaattaccataaaactttccaaagcagttctaaatcaacaatacaacatattccatagctcaaaacacaaaccacgctaaagaataaaaaaccaccattgaagagcaagcttagagtttcaaaactcaaacttgctacaactactaactaaccacaaaaccaactatattaaattataaaacaaacaaattaatcaacttctaactcaaacaatatcatacaaaacctaattccaaaactcacataaaaacccaagcttttcatcacaattcaaaaagaaaaagaacctaggaacttaccttaaacttgactccaatttgaccttaatcactgatttaattccttgttggaattgggaagagaaactctgaaccaccttggtcttcctttggttttgtgtaggtcgagagagagaatttcaggagagagtgagtgtttctgttgtattagtatttcactactacaaaagtcagaattcgcgacggtcctaaaaatgttttttgtgggaaaccgtcgctaaaaaaattaagtaactgtttaaaattgacaggaaaaattagtattcctgacggtttataacagtaattataggaataggcgacagttttaattacaattcataaatttattgggcccttatacccgacagtttaaaaccgtcaagtatagtataggcgacaatttaaaccgttacctaaactgtcaggtataagggcccactaaaaaattgtcacctacttctcgccacatttcccacgtgccatggccacctacttcttttctatttcccacatgcccacctacttcttctctatttcccacaccctaaaataaaaatcttaactctctaaaaccccacccacccctctgcaccatcgccctcctctctcgccgtcttcctccctctctcgatctccctttcttctcgtctctctcgtccatcgatctctacccacccgtcctcccgtcggtctccctctcctctccgtcgcatacgtcggaccaccaccacatcccgtcggtgtccctctcatctccgtctcatatgtcggaccaccaccaccttccgtctgtctacctctctctctttctctctccaagctcggtataaatacatttatttatttatattactttttttatttattttgttattgtat

SEQ ID NO: 312006 - DNA, 1544 bp, Cannabis indica
ttcttctccgcatttcgcttctgagcatcgatcttctgcttccccgcgagtcatctttcctcttttgtttttttttttttttttttttttttggttttctttctaaaatctgtttcagcctagtaaaggacgagttatacgatcaattgtcatttgtcaatagaaatgaaggtaaaggtgaatttgaccttatatgcactcataatttgaagtgcaaaacaaaggagattattgattttttttcttttttttttttttttttttgtctttattatttgtgaacactctataataatagcaaattaggatatttgtccttcaactttaatatatactcttcaactttaatatattctaatcatgcttcctatttttgaaggcggttaaaaattcttcattattagatataaagattttttttttccaattttaataagaaatgtattagagaaatagagtgagtatatattagttagatagtttattattcacttagatgctccaactaacttactcaacttggggacttgtctatgtaaagaggttcaccctccatttcaatgtaatgggttattaccaataataaagaaactctttctatcagtagtgaactaatttcttcctctttcactctggtcatggcgcgtacaaggtctactggtccatcatcttttaacgatccatctctacctacagctcctaccactggtccaatcgaaaatccactagaaatcttatcattgtcagaaatttattagtgtcacaattgtatatataaaatgtgtgttgggtcattaaataaataagtcaaatttgtgtagtctattttagaataaagtttatgacttaagggcataattgtcatgattttaatatgtgaataccatgaggacaaaatccattttgatgaggggccaaatagaaatagtcaataaatattaccaacagttttgtctgttggtaatataaacagtaatggtccccatttgcatcatatcgtattttttcactcttgtatccccatcaccaagagataagctttcagagaaagattttttatgcaaattggaagatcataccaattaaagatcattacaaaatcgattctatagattctgatacgcttctgctaatatatatatatatatattctattgtttaattctcttaaattaattagggttatattcagaatttatagtattctaacatttggtatcagagcatccctaaattagtttttgaaaattcatggtagtattaagctttcattaaattattctttttgcgtttggaatatttaattaatcatatcgtatatatatgtttccttactttgaaagtggtggaaatttattcctggttcaatcagtatatatatagcatgcgattgaaatttttatctgttgctctatatatgtttcttttgttttattatttgttgcgatcatatatgtgatgaatgtatatatgtttcactgggattatgaatatactgttggaatttattttaccaggatcttagatctactcacaagtatgtt

SEQ ID NO: 312007 - DNA, 680 bp, Cannabis indica
ctcatttgtctaagatatttcagaatatgtttgacagctatccaatgttccttgccttggtttaactgaaatcttctcactattccaacaatatgatatatggatggccctatacacaacgtagtatacatatgactatcaattgttgatgcataatgggcttttctcatttattctatctctcatggagcctttagacattgactcttggatagatttattccatgtcgggagggtaattatattctcttggaattttccattgagaatctctcaagtactttatcgatgtaattagcttgagatagggctattgtttgttcttttgatcctttataattttgatacctagaacataacttgcttcgcccaaatccttcatctgaaattgtttgcttagccattcttttatgtctgataatttcttaacattatttctaatgagtaagatatcatctacatataagactaggaacactaccacctgattttcctttaactgataaacgcatggttcatcctcatttttcttgagtccataggttttaatcatttcattataccttagattccaaaatgggaagcttacttgagaccatagatagatctatttagagcatgtttggtattgttttctgctttttgttttcaaaaaattgtttttagaaatgagaataaaa

SEQ ID NO: 312008 - DNA, 973 bp, Cannabis indica
ctcgtaataaaaagttttaagttacaattcctagctttattatataattaataaataattttgctaaaaaatagtgataaattataattaatgaatcttacctctatatataaattattataattattgtaaccggatctatacgaaaagtaaaagattttctcgtttcttggcaataaacaacttttcgttttttccaattttccttgagtagaaataaaagaatagattggacattgcccctcttcttgtatatttttttttaataattataataataataattttatctccgtgtatgtatcaaaaaatacgagtgatcaataatagttttatcatattcactaaaaaaatattagttttatctaagaatacgactctttatttcacttaggattgttgctaaaattaaattttccagacttcttcaggttgaccttccaagtcaatattggattatccgagtgatcaagaaaatgaatttagggctcgtttggtacgccgtattttaatgtattgtattgtattgtgttggattgtgttgtattgtattgtattagtattatttaatacaatacaatgtttgatatttacttgtaataattgattgtgtaaagttataatatattgtaaagttatatattttagtgggattaataatacaagactgtttagagagaggcttgatcggctttttttttcactcttactaactcacctattcatagtgtgaattttggaaagaaataagcgcaatctgttgggcttaatttaattgatttggtagttatcgagtcccccatttggtccctgtaactgaattctctacttaaatccattcaattatcttatgtgatctctttctttcttttaaaatactgagcatcattttattagaacgatttttttctgtccattgtagtgaaatttcatggaatgactttttaatttaaaatggaaggaaataccattc

SEQ ID NO: 312009 - DNA, 522 bp, Cannabis indica
ttggccgaaaaacctcggtcaacatgagtaattctctattatatattgtttaaatatatttttatttaatttgaagtttttctatgaaaataaatatggagattcatgaagaataaaaaacacattgaagaaacaagaataaatatttttgctatttatatgtattttttaatattttcgatagtaacttataattttattatgttttatgtgtaataaaaaaatatatattttagtgtgaaatttttaacattattatacataccgcagttgctacggcttcgttaactagttttaaaataataacatttaatatggttttgggtgaattactataaaatgtgtataattataagagaaatgttaaaggcaccagtggtatctagcaccctcttatgtgtcagtatcggtattcgtccaattaagtatcgggtcccacatagtttaatataataatttttaagaagtatcgcttgttagactttttatttgggcttacattaagttttattggttttatta

SEQ ID NO: 312010 - DNA, 1245 bp, Cannabis indica
tggtcaaacttaaatgtgccatatttataataaaaacttttcaaatcccataatgttaaccaattaataatctcttaacagttagcttttctgttaattagttttgcttaattttcggattaattggttgtaaagtgctttactgtgtaacagttttttactctgctgtgtaacagttttttactctgctttttgtactgttctattggtgtataaataaagaatacactgccctgttttgggtaagtctttcagattatttttcgtgcccttgtgtctctcttttcagctcatagcttctcctctcagttctggtttttaccttcttcatggtatcatcgttcttgactagcgtcaatggaatcttccacctgcgatcctcgggcaacaatggctcccgctgctcctcctgcttccgccgttcactggaatccgttctctaactcgctgacatcttccctcaccatcaaacttgaccgaatcaactatctctcatggaaatcacaagttgtccccactgttataggacatgatcttgatcagatcttgttctcagatgtaacaccaaccccaactctcatcaatggcgctcccaatcccgagtacctgcactggaaaaagaaggaccagctcctcctttcttggattcgatcctctatgtcggaaccgatcctcgcttccgtagccacattcaccacttcatctttggtttggagggctcttgaacaaagattttcaagccaaaccaaggctcggctcctacaactcaaaggtaatttctcaagacttcaaaaaggaaatttacttattgctgaatatgtggaaaaggctcaagctactgccgatgcactagcaatcgctggctcaccagtttctactcaagatttggttctccaactcttgaatggtcttggacctgattttgatccagtggtttcgggtatcacttctcgcagtgacaatctttcatttgaggaagttcaagccttgttactttctcatgaaacaaggttagaacatcatagcactttcacagatctttcactcaagatgcaggccaatctgagtgtaaaccagtcaagaaatggtgggaatcacagttctggtgcctcttcatttcgtcctcacaacaatgaaactggtcgttctcaagggcgcttctatggacgtggaaatggctccaaactgctgtgtcaagtgtgccttcgcattggtcatacagcggctgtttgtcactaccgcttt

SEQ ID NO: 312011 - DNA, 745 bp, Cannabis indica
aaataaaaatgtgttatgtaacttttattttcattttcatttttttttattaaagtaggttccacatccaggtctagggttggggctgtggtttgagtctggggtcaagtcagagtccaggtcccaaggtccaagttggagtccacatcaagattttggaatgtgtgaagatagaagaagggggatttccccttaagtaccttggggtcaacctcaggcctaccaaatggaaggctgaagactgtggtgttattttagacaagctcaacaagaacctcaattgttggccgagtagaaacctctcctttgcgggacgagctcaacttatccattcggttttgcttgggataaggaattattggatgggaatttttatcatcccctctaagataacagcagctattgacaagagttgtcgagactttttgtggggatcctcggggaatagaagtaaacttcatcgagcttcttgggaaaaggtgtgtcttcccaaaaaccttggtggaattgggtttcgagaggggaaaaagtggaataaagcccttttggcaaaaaatttgtgggctcttgctggtaaacaagattgtctatgggttaaatggattaattcagtttatctgaggactcaggacatatggagctataccatgaagtatgatgattgttggtacttcaagaagattttgaacataagagataccatggatgaagctagactttgtcaagcagtcaaaggaggtaagtt

SEQ ID NO: 312012 - DNA, 1583 bp, Cannabis indica
cagatgtagatctcctattatctatgtccccagcatagtctaaatcactgtatccttctattatagtgctagcattttgtcgcttgtagactaatcccactttagttgtcccaagtaggtatctaaacacccatttcatggccaaccagtgaacttttcttggattttccatatatttattgagtacactcatagcatagcctaaatcaggttttgtacttaccataagatatatgactgaccctacaacttttgaatatggtacatccttcatagcttcaacctctttttctcttttagggctttgctctttagatatagtgtactgactagtaattggttgcttaacaaccttagcaacgctcatagaaaacttgtctagaattttctcattgtaatcttcttatctaagaatcaattttccttttatctctatcccttaaaatagaaatcccaaggatctttgtagcattaccaagatttgtatttcaaattctgtcttgagcagagttttaaccatatcaaccctagatctttcatggcttataataagcatgtcatctacatatagaagtagatagatgacatcttttatagagcttcccttgtaatacaaacaggtgtcacgatagcttctgttaaactcatgctttatcataaaagcatcaaactttctattccattgtttgggggcttgtttgagtccatacaaggacttaaccagtttgcagaccatttcgttctttcctttaacttcaaacccttaggctgctccatatagatctcttcttctagctctccatgtaagaaagttgtagtaacatccatttgatcaatttccatatcatactgatttgctatagatagcataatccttatagttttgtacttggctaatggtgagaatatctcagtgtagtcaaccccctctttctgtgtgaatcctttagctactaacctagccttaaaccttacaggttctcccttgaatctgcccttcttatgcttgtaaacccatttgcatgttattactcttttccctttaggcctcagaacgattacccaggttctattcttctttagtgaaaccatctcctcatccatagccttaaaccacttcttagcattaggccctgtcattgcttctttatatgtttgaggctctgaacttagtgattccatagctgtcatgaaagcataggctatatcttcattccaaatgttgaaaatgtacttaggattaggtttaggtgtccttttctctctatctctggtcaattggtaatcatctagagtttcagcaggctgtcaacctcattttcatctccctgttgctctttagcttgtagttcttctctattagagttctctgtttgttccacctgatcctcatctgcttcaggttctcttccagctggttccacttgattgatattaggttcttcttgatcctccaatctccatagaatagggtcaaattgtattgtacctgcagggttagtgtctaatgtacctgcagggttagttttaagtaaacaaggaaattcattttctttaaatataacatccctgctaataatagt

SEQ ID NO: 312013 - DNA, 589 bp, Cannabis indica
gaaagaaaatattagaataacccaaaactcttgctgccattaaaatagaaaagaagaagctttaagaaatcaaaaccctagaaaccatagaacaacccttgctgtaagaagaagaagaaaggatagaaaaccttaccattttatttctgccatttgaagagaaaaggagaagcttgaagaaaccctaggttcggttgaaaagaaggagaagataaaagaacacattagaaccccataaccctagcttccatttgtgttgaagagaagaagaagagaaggaaaaattatacaaaccctaaccctaggaatttttccttgctgctgccgtagagagaaagagagaaaagatatttgaaagagtttgatttttgaaataaagtgatggctgccgaagctttagtttagggttagagaagatatcatatatatatatatattagggtttgtattgtcttctattgggctgggtttctatttgggccgaaccattattgtggaaaagtgagtctcatttgactccttctttattgctttgactgaatatatatcaaagaaagggtgttgattggagagagaaactttgtttctc

SEQ ID NO: 312014 - DNA, 1376 bp, Cannabis indica
gtgcagttatgtgtgaaagaatgttgcgtgcgctaaagaagaggtcgagtgatgccttcggccaaaagtctccaatgaaatgtcccaaggtggatgatactctgccaaaaagcattgccctaagcactaagactcatcaggtgacatgtgagaggagtttgactgttcttgccttagaggttcctaaggtagtggattctgacccagtcccgctggccaagaagaactcgaagtcttaattcgcggttgccccgtccaagggctctataggggcgagcattgaaaggcctaaactgcccaaacctctagccactcctcccatgctaaatccaaaaacaaagaaagggaaggagatgctttcattctgccaagattgtgtgcttctcgaagtaaatgattagttggccaaaagggaggacatgtctgtagagcttcttatgggcgacttgctgaaataatccacccgagcttcctttggttttctttcacatgtttttaaccgtctaggctttaattttatctcattgtgcagctcaatctgaagatggcatacacatactctcctgccaagtctacggccttgaaagtcacgaccaccaccaacaacttgaaaaaggagatggaggaggctaaaaaggaggtcgagctgaagagcacccaactacacgaggttaataagcaactccttgctgctaacaagctcattgaagacttgaagacagagattagtgatatgtcgttcacttcttagcttgagacggatgatgaggccttggcaaaggatgtcaactcccttaaggatgagagggatagccttcatacgcttctttccagtctagagaccaaaggtcagtgatctgaccgaggagaagaaaagtttgcaggagacccttgactttgagcagacatcttttggtgctgaacgggaggtgcttcaaaaggaggtggaaagtttggagtcggttgctctggacgtcttttatgaattttggagggctaacccagaggctaactttgattgcctcaatgaacacaaagaggcttatcttagtttttgtgaagcccaaaaagccaaggaagatgctgaccaaccttccaaccaaccaagagaatgaaaccccagccgctaaggacacatctgattcgtacaaagaaccatggactccagctatttgaacttttaaccttttctttatcagtttggcctacaggcctattattaagtacaatatggccgaccaagcggcctttaaacttgagaaatatttcatttcgttttaagataattggttggccgggcagcttttaatcccgaagttatcatgctttgttatgttttaaaaataaatattttctcttaagtctaaatgattgca

SEQ ID NO: 312015 - DNA, 797 bp, Cannabis indica
agagagagagaaaaagagagatttttcatttttttgagtattttcgaaatgagaatggtattttaggttagtgtgggaattagtaggattaaatggtatagaaaaattaagggtttttttcgtaataaggaagtttattaagtatgaaaaatgattttttttattcgaatctatatatccttcatatattatggtcatataactatagactatagagattaggatctatatgttgatagttttgacttatgctatcttttttttgtattatggtttttattttggcttttttactttctaaatagtaatgataaaattaatagattatatttataatacgtggctgtggtatgtaattatgtatgtatatattaattccactttaaatagaaaatagtcaattatttacttagaattaatgtatataattttgtgtttacacaagaatatcaaacgactttacaaagtgcactcgagttagaaagatatattgtgttctcacttggtttagtggaccactatttataagccacttggtttagtggaccactatttataagctctacctgtgaataaaaataaatgactattaatacaacatattttcttagtaatattatggatgaattgatgaccatatatatatagtaggtagatgttacgtgtcgagctacttaatgtttgttttatttaaagttttttatcttaattttgataaaaagttattaaataaagacaagatagtataatctagaaaaactaaaacaatgttatgaaatattagtattatgtaatat

SEQ ID NO: 312016 - DNA, 531 bp, Cannabis indica
aaatgtttaatgggccggcccaaagtatttttgtaatttttttccttttttgtatttttttgtttttttccctaaattaattgcattttcaacgtgaaaaaaaaaattaaaattagaaaatagaaattaaaagtacgttggttaggactatccgaagccgaacctaagaccatctaaaagctatatttttagcacaaaaaaataattttatgataaatttacattaaattttaatattattttttaagtacaattgtaaaataataattttgaatcaaagattctcgattaaaaagtgttaaatcaattaaattttgataaatcaacttacttaatttatattaaatatactaattatttttattgattcaagtttaattttttaataataaaaaattaattcacatattaaatttagattaatttaataacgtatgatactattttttaatgaaaaaaatcttatttattaattttattattattttaaagttaattagaattttttttccctaaacttttaatgtcgtt

SEQ ID NO: 312017 - DNA, 1258 bp, Cannabis indica
ccttcatttaaagaatcttcaaagacttcaataaaagttccaatgaggttaccaagagtcctagcaagagaagcagttttacttaaaaaaggcagtcgaaacacttgaacccaaaagggtgtgatggtgtaggattccatagaggcattctgaagaacacttggaaggcataagatcatatgttgattatggaagtgccatggttccttagaaagaactctcctaagatcaccctcacaaccaaaagtgaccaagtaagaatcagattcatagatagacagtgaaacatcaaacctacctttccattgagaggcaatgaaattgcgaaattgcttaggattatatccttttttagagtaaactcggaaaagcaggcgattgataggggtacaaacagggggtctagccacactagagagatgaacaacttctctttcccgagatgagagtgcattggccatgtcaggatggaatggatccatggtaaataagaaggaatagcaatctgagataagtaaaataaaaggaaacaagtgcagaaaaacagggtagaaagagtgtatgaagaagataacgaagaaaaaactgatcagaaaccgcttaaaaacagttaaaaagaaaagactataacaactgccacagagcaaaagagagggcagacaatgcttatttggtatcttgtgttttgttagaatgcataattggtaatttatattttgaataatgatcaattaatacccttaatttgtaaaaactatccactttagtaccaaataatttggggaaaatttagggtgaatttgaaatcgcggctgaactcagtaattttaatttcaaacgcagttcatagatcttttattctttagagatattgatttgtttagaaaagaaactcatatttaattttacttgaacgaatttagatatcgtttgagtcacaattttattttgatgagattgtgaaataaaattcaaaattacttaagactttgtgtctttatgaaagcaataggaatcttatatcttagaattagacccaatactatttgagaagaaaaaaaccatttcataaaagtagttgtttcttttaattgatagtgttcatcattttttttttccctttagcctcttcggctagtgagagtttgagtgccatggttgatcgaaatggcttactcacactttacataaaaatatatatagagagaccttgggggtaatttactaagaaaaaaataaaacgttaaacaaattatta

SEQ ID NO: 312018 - DNA, 1758 bp, Cannabis indica
aggtgtcatgctcaccttaacaaggaatggaggatcgatatggagtagcttgggaagagctaaagtagaaagtggtacgactgaagaaagagactccatgggatggaagattttgttaactatttgtatgggaaaagactagtagaaaaagtagtacggcgagaagatcaggctggaaaaggatagagggtgcaacaaacttggacgatatgagtgcttacctgaaactaattcaacatttggaccaaagaataatgaagcaaacgaatttctatgaatatatgtaagcagaaaccaactcaaaagattggagaatggcagcaaacgaatttctatgaatatattcaagcaaaagctaactcaaaagattaagaatggcagcgatctttatgagggatattagcaaaatgcctcctggattgatgttgaaggacatcccttaaatttatggaatatgaaaactcttaaggaaaattggagctatgtgtggtggacaataagatgtttaaggagattgaaatgttgaaggagactggctagatgggagtgcttacctgaaactaattcagcatttgaaccaaaaaagaatgaagcaaacagaaaccaactcaatagattggagaatggcagtgatcttgatgaaaatgcctcctggattggttttgaaggacttctcttaaatttatggaatatgaaaactctttaagaaaagttggagctatgtgtggtggacatggcctttttacctgaatatttattgctgccatatgaaaaatcaaatgacaatggaaattggaaggagatgatgaacatggagtttccaaaatagaaagaaagggagtgttcgtacttcgtaaaggtcttagtgctgacaaaatcaaaatgactatggttatcatacctgaagaaagagattcaaaaggatggaatttgttaactatttgttggattagtggggtaaaaacttgagaaaagacaagtagaaaaagtagtacaaggctgaaaaaggaaattggatcatctaagaattaaattggagggaggtgaacatggctttgtacctgaatatttattgctgccatatgaaaaatcaaatgacaatggagttaagaattaaattggagggagatgatcagggagagtttccaaaatagaaatggaatgttcgtactttgtaaaggtcgctgacaaaatcaaaatgacaatggttattatacctgaagaaagagattcaaaaggaagagttttgttaactatttgtttggattagtgggttaaaaaacatgggaaaagacatgtaaaaaaagtagtacaacgagaagaccaggttgaaaaagaaaagaggatgcacaaacttgggcaaacatggtgaaaaaatcattgaaaccacaaagggaaaaaaagaaaggattgcaattaaattaatcagggggaagaatcggaggggagaaacttgcaattaagtcaattcaacatttagaccaaagaatttataccttgaaagaagattggagaatgtcagcgattttgatgagggacaataggaaaatgccttggagtgctattttttttataaattgacaagagaattgggaaagaaattagatgtcagccagatgtttgatgacagaacactaatatggtgtatcagtgaggaggaaaatgaaatcgtattgaagataaatcaaatgaaagttccaggggcaaatacgattgtctcttgaatttatggaatatgaaaactcttaaggaaaattg

SEQ ID NO: 312019 - DNA, 1186 bp, Cannabis indica
ggcacaaaacccaacatgaactttatcaacttaatcagaaatagacagatttcctttgtgaacattggaaaactgacctttcaattggagcaatcttgcacgagattgactggcaaatcgttgttctaaggcacgccaaactgcagaagacgtgtgatgattggcaactgagataagaaccccttctgtcatggatgaacgaagccatgacagaagcaattgatcgcgtttcttccattgctgatagacagggttggtctacccagtaaccaagaaccgaggaggtgagatgccactaaagagaatgtcatccagatcatgaccacttacagtagggaccacctgagacttccaagaaagaaagttagctcaatcaagcttgatcgtgagagaagttgaaagagaactggaaaaggattccacatagaggaagtagagtcagaggattgagcagacaggtctggtgcaggtgcagtgactgtctgaggatcaggatcggagattggaatcgccggctctattgaaggcgactgataccatgtaaaagcttaacaagctaaaccagaaaggtaaaaaccagagagagagaagagaaacagatagagaatttagctgaaaagcttgacttgaaaaagagcacaatccatttatttatattcaggaattacaaggcaaaaacagaaagttagttaagaaaactaactgaatgaactaacttatcttaagaaactaaaacaagtaaaatgttagttaataataatgtgtttagagtatggttggggatgccatattataggtgttcaacatcagtgatgtttcatgttgatgtacagttttgttttttaactgatttgacaaattaaatatttagcaccaattacttgttttttatttactatcatgctatttaaatgtaaaatgaagaaaagtgatcaaataaaagaaaaaaatattacatatactaaacataaaatgaagaaaagtaatcgaatagaaaagttattactcttattattatttttagagtaaatagcggcataagtaccaaaagttttgagtttgtaagcggcataaattcaataattttttttagtggcataagtacccaatgtttgtaaaactgtaatttttctctattttcgtcagtacaggttccgtttaaaatttattaaaaaaagatttaaaa

SEQ ID NO: 312020 - DNA, 1636 bp, Cannabis indica
aaaaaaaaggaagtgaaggaaagtttagggagttttagaaggggaggaatgaggattttgtgttgaagttgaaagtgacagagagtttaacgctagctagttaacggtgggaataagtgccttaaatgcaaaagtggtggcaaaggaaactacaacaaccaattctactattaatgctatctacttactaacaacagaacacaatttgggtgtggtgggcaggtaggagggagccccagcccatctatatctgattttgaccaaattcaaaacccacctataacctccaattattcaattcatacgttcccacttcacacacacacacacacgctataggcttcaaattaacttatttcaaaacaattaatttctcatttttggaatgaaaagaattgtataaaaaaaaatgatcaaactaaattttttaaatcgaaaatgaaaaattgattcttacctttgtatttttctaccaaaatccaactttcaatcataatatatatttatatatgtcaagaaggtttgaccgagtggtttttgaaagaattaaaaagaaaaaatggttagtgtttgaaaaagaaagagataattgggtcaattggaataaagaagtgggggctgtttagattattagaagttagcgaatgcattgcatggtaatattattattatggagtgtgaaaggtcatatgagtgtgaggtgtgggactatggatggcaacgtaacactcaaccactttgaaattggatcagttgatggcttcgattggatttatttctctctagctcagttgaacaattatatatatttatatagctactattttcttctccacgttcgcttatataataaccatataattggaacgaatattatcctatgaattttgggtttatatatatgtcaacaagaacaattttcataaattccatttgtttccagaccagattatgactcttccccattcaagtagtttagttgttatgtaaaaataaattgctatggtgtttagtactacttttgtttgtgaggtggcatcttataaatgaagctagcaattttttttataaacattcttatagtaaaataagtaaaatttaggggaattgtagtgtatatggtaaataatttttattttttacgtttactttttttatatatatttttacttttgttaaatttgtttctattttcaggttatcatggttttttatgttgtttttattttataaaagttatttttattttgatgttatgctatttttatttagtggttatgttatttttatttttataaataaataaaaaattaattataaaaatataaatgaaaaaacttgtataattttatattaaactatgcaggtaacaataaaatatatctaggctaaacatcacgagtgtcttaaaaatttcctatataatgtattattttactacatgaaaaaaattaaattaatagcaaggttatcacatatgtactttggtcatatacttgttctaaattcctttaaacaatatatatatatatatatggggggctattgtagattgtattgtgttggattatattgtgttagattgtattatattagtactatttaatacaattctatgtttattattgacttgtat

SEQ ID NO: 312021 - DNA, 2612 bp, Cannabis indica
aataatttgaagcatataatcacaattattttctactgtgatgacatcactataattttgaacaactatatgtttgagatttaataaaacttatatattaaacctataatcatgtataaaatatgtgaaaaagcataaaacaaggtcaagatatgattttttatctttattaaaagtaaataagattacaatgaaattatattttatttagggcaaaaaatcccaacaaactctcatttgcactaatataaaactaaaagtgcattttaatttaatctcatgtacttgatgttttaattaaatgtagaattcggtataaactatgtaacaggatcagataggttgtattcaatatcaaccaactccaccattacattcttcttagtcacaatatgcatgaatttttgtatacttaccttatatgttttactcctcttaggttacaagattctttcctgtttggctattgcatttgtgttaacacagagtgtcactagcaattattccatgtctagaattatgcaaaagtctatatcgaactttagggcagccttattattatccttattggtagagttagtgattccatataggttttttacacttctctaaaaatattgtcccacccatatggtaatctccatctcttaagtagactttcttgcattgacgcaaatgtaaaaatctaatttggtgtagcctaaagattttaaaatattgcccatatcgactaatatatagtttcttctcttgtatttcaggacatgtttgattatcttctaatgttccttacctttattgcactaatatttactcacaacacccactcaataacaaaaatctggtctagtgcatacaagagcatacataagacctcttactattgatgcttagagaattcttttcttggtctttatcttttctagaacagttaaaaactgctccttagataaataaacttcatgtctagaagtcaagtctcctccattagagttagccattgaaaagccctctagcaccttactaatgtaatttgcttgcgagcgagtaagtaatttttttcacatgtcttgacagtttcttaattgttgtttccaatgattaagatacaatctatgtaaataactaggtataccataagtactagtgtctttcaagccatacttaggtgagttcattgaaacgcctccactacgatgaggtactatcacttgatgtttagtaacacaagtggtataatccccttcagttgtcacaacttgcgttggttcaacagaggcagatggatcatccattacaaggtgtagaagatgatgaaaaacttttggaatcaaatagtatctccactactttgctactatgatttttaaattacatctatataatcaacgtctgcaaaagtagtaatatctgtgaaaacaaacacttactagtcttgataaccacagtgtagtactggcagtgattttgttggagaatgttagtttatttatttatttgtattgatttattttcttgacattaatttttgcagttatgagggtactactttaagcctgaagataattgactagaaagattatattctatcctaattctaaagtagattttattgaggtcattaagaaaaaattgtcaaaataacagcttaagctttttattaaaatatattttggtcattttctagatatgcaatcagtttcaatgcaagctcaattgattcatgcatcattgtatagaaattatatcaaaataattagcgtgatatttgatttagctttggcaacgatactgttagatttagtgttgctgaatttggtcttattttttgatttaaaatgaactggtgacaggaattataccaagtatgctaaatgttctaataagtttatttttatgaccaaattgttacctatagtggtgttgagagtagattcctatttagtaatttcaaggatgatagttttgctattaaaatagttgttcttttctttgcaactaattgcttgcttagtaggggatgaaataaagattcatgatggtttactaaatttgataggttctggggagttcaactcatatctttgggggaaattatcttatgactatacctttaatgggttgagagttggactgaagtcaaaacagatgctagaaaagaaagatttggatattaaggagaaatctattaggacatacaaaatgggggctttccatttacttatcgagtttggttgtatgaaatacttctaattttgaagaaggaagatatttgtacgtatgattctgctccaacatttagaatttgtaggtggcttgatagttctactctaaattcaaataagagtatatttattattttttttattagagctgaaagttgtaccaattgaaccaactaattttaagaaagatttgttgaatctttctgaatttgagtggtattgattgagtacttttgatgacgatttcataggaccaattagggttgttcataaagtatccaatctgatccaatccaatccaatccgcaaaatgcggatatctatacttgtatgtattggattggattggaaaatctaaaatccgcacttatgcggatatattggatg

SEQ ID NO: 312022 - DNA, 821 bp, Cannabis indica
ttgcactaatataaaactaaagtacattttaatttaatctcatatttgttcaaatgtagtatttggcataaacaatgtaatagaatttgataggttgtattcagtatcaacctaccccactattacattttctttagtcacaaaatctataattttgtgaattcccaatctatacgcttcactcctcttaagatacagggttccttactatttggcaatggcatctgtatcaacacagagtcacactagcaattattctatgtttggaaataatgccaaagtctgtatcgaacattctcgagtctgaataattccctaatttcctttaggtcaaccttattattaagccttactggtagagttagtgcttcaaaataggcttttacagttttccagaaacaactactccacccctatagtaatcaccatttcttaagtagactttctagcattgacgcaagtctagaaattcgatttggtgtagcctaagggttttaatacaccacccttactaactaacatatagttcctcttcttttatttcaggatgtgttagactaccgtccaatgttcctttctagattaaactaatacttactcaaagcttccgctcaacagtagatgtttgatctagtgcattcaagagtatacataagacctcttgctattgatgcttagagaattattttcttggcctttatcttttctagagtagttgaaaatagctccttagataaataaactctatgttcgaagttaagtgacttcttttgaaaatcactctagcatcttactgtaagctgctgttggaaattatttta

SEQ ID NO: 312023 - DNA, 1943 bp, Cannabis indica
tattttatttatcttttctaatttttatttataaaataacatttaatttttgaaagtagttagcaaattttgaaataacatttaaatgtgttctgttgtagagttctgagctctgttccttgcgacctattttcgctcgtcatacgaagttcttcctctctgggttctttcacagtttcgtgttctgcttgaccaggttgactttcatacaatcttgctcttctgctttggttagtcttttcccaagtcttttgagctggcttcaaaatttcttgtcatgctctaatatgttttgttctagttgatctgttttgcagaaggcttgggaagagactaaccaaagcagattagcaagactatatgaaataaatagttagttttccttgtgaaaataagtacgatttatcaattcttaagctcattatatctatttttgtccttgcttcattcaagtcaattatattatatctcactttataaaataaataattagtttgccttgtaaaaataataattgatgaaaagttgagcaattcgaacaaatatttaaatttattttgttagttttatacttgttaaatttgaataggtacttccttagtctttttgagcttttgaactgaatgtagagttgaatgatttgagctctattcttatgcataatgaatgtccaatctttttgcaattttgcctgagcatttctaagctttgtcacatatggtactttttgaacaaaagcagtttagatttattaggaaataagaatcgaaagtattacacaatcacgtaaatttattcaagataaacaagaacattaaattgtgtacacttgtcataactaaattttgatacaaataaatattcattcattctcgattcctataactgagctcaagcttgatcattcttgcagaaagttctctgattcacttgtagaattgattgacattgtttccttgaacaagagagatgtccaaactgcttgcgtatttataggctggactttcaacagtttgtagtattgcaattttcccaatgacataagctctgcatgtaacgtacaatttttccgtatgtatctaaagtgtcttttctgggactattaggtcaagaatggatgaattatgtgaattctatgataaatagttatttttgtgttactcttgccacttttagaattttacgcgaaatgacttgaagccgaaaaccttaaccaggtaaaatattaaaaaatcgtaaaattggtaattatacaagttatgacaactattaggcttagaatggtattattcgggtattggaaattatatcgtgaatttccaagttataaaacttcaaaaatgagattttcaataaaacaagttcgtccatgtccatgtgaaccttgtattagaataattatttgaaataaataattatacaacttagtgttaaatagaaataatttctgataattattttagttatcacacaaataaactaaatttttttagctataaattattttgttttattttaattagctttatagtatggtttttggtggaaaactaatttttttattttaggataatgacaaaagatagacaattgaatatctttattcatatggtttctgcatcagcagacgaatataacaaaaacacagaagtcaaagatactaacaaagcttatgtcaagtctcctggttaaatattcccccctccaaagatgttctcagaattaaattgcatcgcagaaagtgatttaaattgtgtaccaacagtatgccaaaaaatgtatagcaataacaaaatgatctccaaaagagatcggaatattttaaatgggaaatttcattatttgtccttaataatataacccatatcaaaatttataccctccattaatttgtacaaatttagtccattgattacatgaccttctcattttacccttttttt

SEQ ID NO: 312024 - DNA, 1511 bp, Cannabis indica
gccaatatcatttgaatgtctgcttctatctgagagagagctgacgtgacggagcagtggattgattagtgaaggtaccaggagtctgccttcctatagcgagatcggtgtcttgctaatcgttatatgggttctttaagttgttataattagtataatgtatattatacgctaagtgttctaattgccaacacatctcgtcaacacctttttgtatgtagcgtggtgtatgtattatcgatgtcactcttatgatagtgtcttctgacgcaaaaatgtttctcgtcaatacgcgaatcaatagtttgtacatctttgtctcacttaagacaatacagtcattgagttatagatatgttctatcaactccgcatttaatgagttattccatttagtatcttttaatataattgccatgatatttgttgattcgtatcctccaagattacacatgtcatcttctgaagtaccaaccaaatttcaggtataatatacttaagatgtagtagcatcaccataaatgttgtggtgtattatattagtgcgccatggcacagttattaatgtagtggcatgttaaatatgataattatgctatatacttttttgttgggtcttggctcatgggtgctctaatgtccaggaaaggataaggcaacatcaaactagccatgagtttggggcttcgacggtagaatgtacatgttttgatcaagctagctagaccgcgagagttgggtcctaaatggagatttctttagaaattttattttcctgcttatgacgacttttatgtaaacaacttgtaatattttaaaaaatattttatgatctcgaatatgtaattattatcttggtttaattaaagtattttaattattataagtttgttttattcaaattcatttgatttagtatatcccgattaatgggatattaacacaatgtaatcgatatagagttcttttaattagggtattactaattgaaactagttagttgatagtaattgaaagttacgacaaaaaatattgtgttatgcatgtatttcgcatttggcaacactacaagctatcttcatagcttaaccttaatctaaggtttttttttttattttgaaaagctaaggttattttaatttggttacatgttattttaaaggtttaaattaaaattcattctccaaacaagaaaatttggattatttttaggtggttaagagtttttaaatgtagaattaatatctaaattgaacaattgagcaaaaacaccacctacaaaatagatagattaaacaatcgtttctattgttaagtgttgttactagaatttcacaacaccaagaagtgtaatttagctggtaaaagatagaattgtttgggagatgataaatgcgagtattcaacctaaaacggcgagtactccaataggaatgcgataacagacaataaagctggaaaaaatacagaagacaatgaaatatagtggttcagtcagattttgttctgctt

SEQ ID NO: 312025 - DNA, 1044 bp, Cannabis indica
ttaggggtggaccatcccatagtcatcccatagtaacaatccttccacttggactcttttgaatagactttttgattctgctcctaatttaccatggcttatttgtggtgatttaaatgactatctttcaattaacggtaaaaatgctaataatagtccccctaaccatgccataactagttttcagtcttctcttcacaagtaaaacttgttacccctcactcatattggtaccatatacaccaggaagcatggtccactccttcagtggctcgactggactatcgccaacaatacctggcagtctcttttccccatggcctccctcttccaccttgggttttattggaatgattatttagctttaaagatcgctctagacgatgaaattaggaaacctaggaatcttaacaattttattttttaaaatcattgtgtaacgccctaacaattaggcacgttacccaaggtgattaaaaaaccctaaccccctaaactggattactataaacgtaaacacgggtaatctcaactttaatcgaaaacagattgaaaataaagcctgaaataaactttactttgtaataaaaaataacatgtttcgggatcccaaaaatattttacaaaatattacaagtcttttcactagccgacttaggcggcaatatcagagtttcaaaagtacatcactggtagaccccaactcgctcggtcgagtgtggcccgaacatctacatacatcgcccagctcccacactcatggcagaccagagacaaatttaccatttcctgcacagtagaggtcccgtgagccaagcccaacaagatagtataattatcaataatcataattgacacatcacataaatattaatgctattttcacatttgtctgtatgacacaaacccgcgtgtaatacttacatgcctatttatgtctatgtggaatagacctacgtgttacgctcacacgtctatttatgtctatggggcgtagacctacatgttacactcacacgtctattttgttgggttttgtgccct

SEQ ID NO: 312026 - DNA, 806 bp, Cannabis indica
atttaactcggttttacaaattgaatgtaaattaaatatatacactttaaaatttaattcatatattagagttaacatgaatatatatatgtatgaacgtttgcctccaatttttcttatattagaaaatagtcaaataaattataatatcccataacgtaatagtgccatgcatgcatgcatagtacatgcatataaatatatatatatctcatatttaaattttaaatcaattaagatataattttttctacattctcaatgtatatggtagtatatatattttgtaaaattgttgttgatgttcaatgaacactaataaaaaattatttagcgatgttattactttaaaatattatatcactataaatagagaatacacccttgtattcttttcattatatatactccgtacctacaaattattagaaggagcataactatgataacaaacacacattgtatatatgtgactatatatcgatagtattaataattataaaaattatacaggaaggagagacatatatacattaaagaaaaagggtattagcattttttctaatggaactttgacatatactaaactgtatcctcttaacttttttgaccgttaaaaattctcactaaactattgagattgttagatttaaggacttttgtctaattttaataaaaaaaaaattctaacatggttgaaagttcaggaggtatgatttagtacatattaaaatttgacggatttggtagatatcaaaatttgaggagcatggtttagtacataaacaatcactgaaacagtaaaa

SEQ ID NO: 312027 - DNA, 4541 bp, Cannabis indica
tccggtctcaaccatttttccctatcctatgatgtttcactgggcgtccattatataggacttaggctgcgaacccacaaggcatgtaggttagacaatggtcaaagtattttcaagacctcatttacggtttaaacaaaaatctacccatatatgcaataaatcttatatagtttgcaaaaagtaaagcttatggaactgtgagttgagctcaacactggctttgactgtacatatcttgacgatcaccagtgaacaacctggtggctctgataccaaactgtaccgcctgtatttaaaaacttgttaaactaaaattaatcttattatattataattatataaccttatagttcgggatcctgagttttaaaatacaattgaaaatttcatgtactaatacaaagtctcgtaatatatttattttacaaacaacaagcaaccataaaatacaacttaaaatgttgaaagacagaaaccctccaggctgcacttttgcgatatgtataatcattatcaagctccaactcactgctcctccagcttagcttttcccttacctacagaaggtagcaagctgatgagtcaagagactcagtaagatatgcatggcatatatataagcaatgctatatcgactttatgcttaagtcgtcctgagctaaacagccgagctcaccaaatggttaagaacgttctcaacggaagcacgaccactgtaccatatgcactaaagtaccaactccatactcctgttggtagggcctttatcgtactcctaggagttactaagtgttgtaccacaagcacgacataccctctgatactagtgttggtaacactataactatcctaaaattctacattgtactaggacccttaaaataacttttccattagtgttagtagtgtaaacaattaataacaagcatacattcacatatatattatctatgctattttaccttgtttttgcgctcaggtgtgccgatcagcctgagtagaactgcagctcgacgctttatagggcccttggatcaaagattttcaattcctaccaacaatccttgaaacaaatcaagcagcccccaaacactagctgctcccttgagaattcgagagaaagagagagaaaaaggagagagaaagatcaatgtaaatttcctaacttttcaaataatataacttgattttttttctagaattatctaacctctatattaattaaaaccctcagatttcttaagtccaataaagacaaaagtcttccttagcaaattacccaaattgcccatagccaaaattccatgattaaataacaaccaaaggtattttagtaatttacaaaccacgacaatttcccgactctctaatgccttcgaatgatacctcagtattaataaaattctataacatacaaaacgcaactctctaatggcccaacgtcgccttctatcacttccgaacacagtcataggtaaacaagaaattcacatataacataattaacatatattgaaattaaataaatcttcaccaatatgcaatattataattaataattcaatttcataattaaaccctaattattgaataactcagcatatctccgcatatatcaattccttacccttgcccaagtttaagatgctggtatggaagatgtatactagacaagaagacccgctggcccacatcaattgcctcaagatgaaacttgttagccaaaatattattcgtgatgtgcggtgtcaaatctttccggtaaccctgtcagagatagctcaataatggtactttgagctagctccaacattcaattcttggaatgaattttttcgagaaaattctacatagttctcattttcgatgatgataccattatagctggaagaccttattgaggttaaacaacgacaagaagatcctttaaaggattacatccaaaggttcatggccaaggtcaccaaggccaaaggcctaatcgaagaaggccaatatacaaccatactaggcggcatccttccattttgtgacttttggaaagatatctaaaggatctacaccaacaacatgaaggagttccttgacagactttatggctttatcaagctggaggaagctgtctgtcaagcctaaatagagcaagtcggcaataggcagtctcagggtgccctacagccccatgacttctaaatgtgcttgcattcgctagcacttttgctcagacctctagtggcatgaacaatgggggcaagtgaaacaacaactttggaagaaacaaggccaaaaaggggaagtacaatacttctcccacaccacaaaactagaaagataaggaagagaagttcacttgtttcaacctcctaacagagaaactcgagaccatctacatggcccctcaaagaactgtcccatataagaagccccttcgcatcaaaacagagatgagaaagagggacatgtcgaagttttgccaatttcacaatgactttggccatgacaccaacaagtgtcagagtttgaagtgggagattgaattcctcataaggaagaacaatccccacctgggttgttatgtgcaaaatgaccaatctaaggcaaaatcaggggagatctgctacttactgctcacgaaaacatccgacctatactaaaggtgcccaaaatggagaccctatgccatctctagtggcgggtcacttaggggtcattattggtggaccccacattacaagcgagaccagcaaggctagggagcgatatgcttagacactttgtcatgagcctaaaaacaatatcctggccgtcaaagaaaggggctccaagaaaccaaagcttggagaacccactatctctttcagagaaggagatgtcgctcaagtcaatttcccacacaatgaccccttagtcattattgcacaaatcaggaatatgacaattgcaagatgcatggtggacaatggagcctcctccaacattttttcagatcaacatatgaaaagatggggctctagctaaccgaattggcaccctatacataagtaatgcatgtcttctttggccaaggcattgcacccatggggtacatccaactgcccctgactattggagagaatccaacaactagaactctgatggcgctgctcattgtaattgacatacccttagctttcaacaccatgataggtcaaccagccctatacaacctaaaggcggtgacaatcatctaccacctttgcttgaaaatcccaacaaggcataggataggatgtttgaggggagaccaagagtctatccatcattgttacaacttggccttggccaaagccaagaaagagaagatgcccggcaagagctctgatgaaaatcccaacaaaggggaataaagtccagcccaaagtggggacgcagacttagatcctcgctttagggatcttgcagacaactttggcctatagaagaattggaagaagtggaggttgatgtcactttttcaactagaagactaaacatggggaaagctttagcgctagaaataaaattgatactaataaaatttctaaaggcaaacgtggacctctttgcatggtcatatggagacatggtcggaataaatctctctgtgatgaatcatgctcttaacgttgatccaaacttctaaactgtgcaatagaaaagagggttgttggacaaagaacacacccaagtgctcagagatgaagtagaaaggttacgggcccatgacttcatcaccgaggcattccatccactttgggtatccaaccttgtgctggtgcccgaatcaaacaaaaagtggtgagtgtgcatagacttcaccaaccagaacaaagtatgtctaaaagattgctttctgcttccaaggattgactagctggtggatgctacagctggccgtgaaatcctaagtttaatggatgcatactcgggttacaaccagatcaagagaacacaagcttcatgacagacttggacctatactactacaaagtcatgcccttgggactgaaaaatgcaggggccacctaccagaggcttatgaacaaaatgttcaaagatctcattggctgcaatattgaggtgtataaggacgacatgctggtcaactccaaaaaggcacagggggaatatggaagatctagatgaatgcttcaagatcctccataagtacaacatgaagctcaaccccctaaagtgttcttttgggataggctcaggaaaattccttggcttcatagtcaataccagtggaataaaagcaaacccaaacaagatccaagcctttctggacatgaagtcacccataacaatcatagaagtacaaagcttgatgggacgcattattgcattaagctaattagtgtccaaatccacaaataaatgcatacttttcttcaacattcctagagggaacaaaaaatttgagtggatagagaagtgcaaaaaagtgttccaagagtagaaaaacaattggctcaacctcctatcctatcaaaacctctagataatgaagagctagg

SEQ ID NO: 312028 - DNA, 2165 bp, Cannabis indica
taatttttttaattatatatatgtatggattggattggatcggttacttttacaagctgtatctatgcccaggaaggtcgacggacttggccggagaaaaatgataacttcatgtagctataaatttaggacaagaaaccctattttttaaacgagaaataaggaatttaaattagttgtagatactatatattttatttttgaataaatagaatttttgcctccttaattttgatcatagtagagttttaccccttaaatttttctttgttgcaaaaatttccccttgaactacgaaaattattgtaaatatcctcttctagttatattttgttcatttttttaaaacaatgtgcttatgtggctatgcgttacatgtatatttgcagtataaggccctatttaataattttaagcaacttgaaatctagtttattggcatcaaacatgcaaacagtagctctatgaatgtacatgcatattctcataattcatcgttagattgatatttatacatttattttttgtctcgactattgagctgagctagattaacgttacgttagtgttatatcaataaattgtttaaagaattaagtagaatacaactatacgacatatttgcaacaattgttataattcgaaggaattttcgcaatagagagaaaagttcaaaagacaaaattttacaataatgataatttgggaggataaatcctatttattatttgttttttatattcacatattttactctttttttttcacattgaccacttttattgaaaaataatcaaagttaagtatatcataaagaatttgtaaaaaaatattcaactaaactagttcattatccgcccttaatgtatgcacaattaagagcacctatgatatagggatgttgctgaaggaattttaacaacaccaaataaatattataataataatataaggagaatacatgcgagtacttaacctagagtggcgagtattcaaactaaggacacaaaatactgaaaagaaattggaaatgtaaagaacacaagagagtatagtggttcagtcagatcacggtctgcttagtccactattgtaagaatttctgtcttgtacttatttcacgttggatcactcctttatatacaaagcaaatgtcctttgatttacacatagattgaattcatcatcaatccgtttgtacattgaattacaataattaaactaaaaaatataaatacaataaatgaagagcagtttctgcttaattcactaaatacagcagcgtatgcgacttctaggtgcgagttggctgttcatattcttgcataagctcgcaggcttaagatgcattcgagactagtcaagtctaagatgtctgcgtcctgttcaagtcacttatacagacattttgtaataagtcggtaacctaagacatgcaagtccttatcgatttatcaaggttgtagggtcatctggaccagctcgcagagtaaagaatcgatctttacaattcgcaggaggatctcaaaagtcctcgcatatatcttggtatatgtgagtctaaaaccatttcttggtcctacgctatgcgagccatacgaatgcgactaaacttggtcatggtcgcatcatctcgctgaatctagtccaggtgaggttcgtactcgaggggtcactcaatgacatctcaactttcctcgaggagagtaaattataagggggtgtttgttatggggaagtgttgagatgtgggaaaatttggaaggaaacctttgtttggtgtatttttaatgtgggaatgtggtgagtcccacaaaattttaatgaataatataaaaacctttctacacttgagttaaaaattcctccacatttgattcccatgcccacatcctcctgcaaaccaaaacatatatagacacctctttaatattatcttacaaggaatctaaaacctacaactctttaatatacaaacacctctttaatatacaaacacctctttaatattcccttgcccacagcctctcactcttataataaaaggtttaatgaaaaaatcaaaacctatggctttcactaaaacgatgatgaaccttgtgtttatcaactcaaggataatcaagtggtagtattcttggtcctttatgttgatgacattttga

SEQ ID NO: 312029 - DNA, 1681 bp, Cannabis indica
atatttttgtcaattaaatatgccaaaaatgtaattaacaatttgtatttcgagttgcttaaaatatttcataaataattataacaaaaatttgtataatttaacttttgtgagattacaaatttgactgtcaacttatttaaatcttctatatatattttggagaaattgattctgattgtaaaataagactgcttaatatttcgaatatgcatgaggcctttttctctttaatgtatttaggagttaaccttcgttctacaaaatgaaagtactcggattgtggatatataatagaaaagatacaaaagaatctccatggttggaccagttagtatttgtcgtttgtagagagagctcagttaatccattattggctcttggagattcgtaacttttggatgagtatctttatcttacctcaaaatattaccgctgaaatagatagaatgtgttgtaactttcttcgggggagaaaagggaaccgaagtaaacctcacttgacttcttgggatcaaatttgtcttccaaaagatcatggtgtattggattttagagataggaaaaaatagaatattgcgttaatggccaagtatatttgagttatttcaatcaagtatgattgtatatggattcgatgagttaatgcaatttatatgaggaacgaagatttttgggactttaaattgaataaggacaatagctggtacattaataagattatcaagcttcgaaaggtagttgacagacaagcttttacggaagctagttgctctagaaaattcaaagttaaattgttttaaaacactctgataaatgctgctaaggtcagttttcacatattgtcaaatcccccttgctccatatgggacatgcgatggagattgggggtacgaagtacgcggtaggatctattacctctttcggaggagctagctctcagagcaccctcgtctgggtatgctgcagcatacctttctcaaatctcctcaacctttgttaaagaattcagatgacagatccaactcagaagctggtcctctttagcaaccttcgtgagaatttttgctaagtcacaaacaatctcctctttgatctcttttggagcttgaatttggcctctcttgttgacattaccaatacttagaaaatttgcgatgattccatgctcgtggagcaatggtgtagtcactaaaccttcaactctcagttgggcttcagtgaaagctttgaattgggccactttgcaagcaaatcacaaagtatcaataattgcttggtaaagtcaaacatatagaagtagattcaacaagtatatcaactacttcatacttcataagagcaaaagattcatcaagggatcaagaattcaagaccctattcaaaagaggtcttaaaaagtttaaagtcaaaagtcaacctgaaagtcaaagtcaatgttaaagtcaactcttggagaaaagtcaactttggatcaaaatatgcaaatcaagctaggaagctcacctacatcaagattacaaacaatcaagtggtataagtttactttagtcttgttaaagtaatttgcatagtacactaggatttataagtttaaaagtttggctcactaacttgtgcgacaagttttttcacaaaataatatctaaattttctatattaatttttaagatcacatatc

SEQ ID NO: 312030 - DNA, 1302 bp, Cannabis indica
aacaacctaatattgaacttctaaaacgatgaacttctaaaacccaacaggtccctcagaagtctggcctctaggcctaatccagagggaagcatcacgaactggagctccactggccaagcactggcggagggccctctctttcctctccaggttctatgcaatgcgagataaaggtacatcatcatctaagtcaggaacctgtccatctccaaaataggctcactctacaattgaaactcctgcaactccataagtaggaggatacaagccatacttctagaagttagccacattggtcaaccggagtatgtttttctgttccactgagagagataagatgtggtttaccctatcccttatttccaaggtagtgatagaacgtctaaagaatggcacatgccagaattcattttgtccaatcgtccgaaggccataagcaataaagtacttcttggcatacccagtaaatttcaacaaggttgcactattagtgtcacccaaccattggtgaccgatctgattgaagtaaaagtacccaatcctattctgcttcggagtagacttcaaatcaaaatagtatttgatctcatagggaggctgaggccatcctagctccctatataagacaaacatcactgaaaggtacttgatgctttttaggtgatttgtgtcagactcattccaaaatatgcagcaatgtctaggaagtatggatgaagcagtagcactgccccttgctcaatgagatgctttaaccatgccaaccaacctagggaaagtcggtgcacccagtaatctctacgaggtatctcaccatggacacccttactaagcccccaacaagcatcatgctaaaagcctcatcagaaagggtagaagtgggagaggcccaactgtctccctgtgatctcgcatccaatatctcaagctcagaaaactgatccaagacatgatccaatccaagcattgaaggctcatcaagcttgttcagcggtttaccattagcatcataacgacccaagggacagtcggagaggatagtacaagtcctatacctcctcctcctaactgatgcagcctcctcaagatcgaacttagcatcgtgactcttaacctcctaattaatctctggatcaacatcagcacggggctaagtagcttcctctatgatcctgactcgagctgttgtagtcaccctggctacatgagggtcacatggaggcactctacagaaagtctgcttcgttctagccataattataaaataaataatggacctacgtgttgggttttatgccc

SEQ ID NO: 312031 - DNA, 724 bp, Cannabis indica
gatatagatagatatagattgatgaggtgtattatctatagtggaaatttagggtacaatccacgtttttacacctggcttgtttttatatatatattttgcagtccatttcaatctccttcgcccaaacattacacaaaatgaaacacacacatacatcattatatctatatatctatatatctatatgtgaattaatataataaattatggtgtcaaaaatagaagaagaagaaggggtagtacatcataatatgagtatagtttcaacttgttgtcaacttgatttcaagggcatatatatatatatatagaatatctttgaagaaaataattgcatgccctctaatttgtacctagtggagatctatatataagatcatcatcatgattatttgtaaagaatatagatgtagtgtaatttgattttgattgtgttatatattcctcatttggttcaatgtatattggcaatataaataaagatatgattagatatgtataaatatagttgttcatgttttgtctatacaagattccaaataattaatattgtgtttttgttcactatccaaaaaaaaataataatttagggtgacaactttaattattattttaattttaattataataagtattgtaattaaatatatatttaattactaaaatagtaaaaatagctgagcttaatttttgatatttttttaatacaactaacttgaag

SEQ ID NO: 312032 - DNA, 1294 bp, Cannabis indica
ttagtaaatttttaaaaaatttacaaggatgatactgtaactataacgaataccgctaataaaaaaacttttaaaaaaacatttcgacatatgattttagaaatggaagttgactaagaagttgtaaattgtaataggaggttgtaaccgtcaacctctagttacaacctttcagtcaacttttacgctcgaaaatatatgtcagaatattttttttcaattttttttttcgtggggtgttcgttagaggtccattccatttgctcaacttaatttagttgaaaaataataaaaataataaaagaaaagctcttgaagacacaataaagaaataaataaaaacaaaaagttgagtgagaatatgtaatgtaatggtggcgtttttcttgttaaaatactggtcataagttgagttgctcacaaagttgtcgagtggtacttttggctttgtaagtatatggaatcgaaggtttattagcatacatatatatgacaaattattattttatttatttttagaaaaatataaagaaaaaaagaagagaataaatcatttgataggatcagattttatacatttggggaagctttatctttctgagaatcccaaacactgcctaactaaaataacgaaaaggaaactataagaaggtcaagtcatctttatctcttattatatttttttcttcaatatattgacatctatgttatcttaaatatgatctttttggaagataaagataataggacagggtaaatttagtaaaacttctaatatgggcttcttaatgattatataaatgtatattttaattaaaatagacatagactaataaaaaattgtaattgataatggatatctccatttttctaaaattaaaaaattgtaataattattcctacattgaagagtttttttttcagcatttaaaattctattgctttacagtcctaaaatttatttgttcacgtgatcatagtcataatttagtggtttcaaacttttccttataaaaaagagattctaagttcgaattcaatttggcttaaatagtttaggcaaattctccttgtgttcatctcaaaaaatgattcaactattagtgtttcgccatgtaaataattataaacataattattttttatacgacaatgtagattataaatgttttaagaatatgggatattggcggctaaaccacctaaattttacggtttgtaacacttaactaccaaaactgaatttttggcggctaaactacctaaactctggttccgttttgctctgcacacc

SEQ ID NO: 312033 - DNA, 774 bp, Cannabis indica
ctcttcttccctaactctcatctacataatctatttcattcatcttttgaactttgcatacatgttcgataaagataaacctagaaactaagcaagaaaaacctgatcaatttttccagtgttttgtttttggtaaagttaaatgttaatcaatgtcatgtgtcaaagtttgagtgagataagtggataattttgagtccacttgctgagttgttaaaggttaagattgaccttgtgttttgtgtgtgtgagttgacttgtgtagggataagactgtaaaatcccaacaaatacaataccatgtaatacggcgtaccaaacaaaccctaaaagtaaagatttaaaatatcataaaaagtataactttttaaagacaaaataaaatatcaaaaaataactaatctaatttctaataataatataaaagactaatataaaactaagacttaccaaaaacaaacctaatctataaaaataaaaacaacaaaaacaaagcctgaaaagaaaacaaaaactaacaatttacactctacaaaagagaaaattactcaaaaaatcaaaactaaaaaaacatgtaaactgtcgtaaaaatattataattaaagctgatttaattaattaattagtagaaaaaataaattattttcatttttaattattgttaaatgaaaatattaaaattaattactgaaattttctcaaacggcaataacgcgcaacctattctacatatctttagaaaaaccaagcttcgatagccaacaaaacttacaa

SEQ ID NO: 312034 - DNA, 641 bp, Cannabis indica
aaaaacagtattaaaaattatttattttataaagttagtgcattaaaactaagtgtggttgtgcaccccattttaagctccactttttgtattggtacctttgttttggttagtcctttttcatggctttaagagtccaagtggaaatccttgccaagctttcattagaatgacatgacattattaatcataaaataaatctgaacaataataagatattaaaaattaaaataaatagaattattgtccctgaattataatttttgtagaattttgccttctgaacttttcttagttgcaaaaatccccccttccccaccgaaccatgcaaattgttgcaaatatctacctctaattatattcttctcattttttataacaacttacttatgttactatgagttacaagtataattttagtacaatgacttatttaataatttaaagctactttaaatttaatttattagcattaaatatacaaacaatagctttaagaatgtatatatatactttcataatttatcattagaccgctaattatatatttattttttgtctaaactcttaaattagactaaacttgtaggaaatttgctgcagttcccaacagcccctacacccaaacacctaacgttcaa

SEQ ID NO: 312035 - DNA, 1159 bp, Cannabis indica
tttaatgaaacttttagccctgtcatcaaaccagttaccatcagaatagtattaactattgctcttacaaaaggatgggttgtaagacaattagatgtcaataatgcttttctcaatggtgacctacatgaagagatatatatggttcaaccacctggttttgttgatcaatcagctcctcacaaagtgtgcaaactacaaaaggcaatttatggattgaagcaagccccaagggcctggtttgaaaaactatcttctgtcttgatatctcagggttttgtctcggctaaaaccgatccttctttgtttgttaagattaattcatcatatgttttgtatgtcctaatatatgttgatgatatcttaattactggatctaatgatgttcaagttaatgacttgataaccaggttacatgcctcatttgcactcaaagatcttggtgttttgaactacttccttggcattaaagctttacctacagctactggtgttttactctcacagaagaaatatattcaagaacttctctgtaaagctgaaatgcaaggagccaagactcataacactcccatgaacagtggcctaaaactatccaactatggcagtgatcctgttactgatccaaccttttatcggtcaatagtgggagcattacagtatgccacaatcacaagaccagacatagcttttagtgttaataaagtgtgtcaatatatgcataatcctcttcaatctcactgggttgctgtaaagagaattctaaggtacttggctggaactttagactatggtctcaagctgaacaaagtctccaatcttcaacttcaagcatactgtgatgcagattgggcagctgatcctgatgatagaaggtccactactggtttttgtgtcttcttggtgagaatttaatttcctggcagtccaagaagcaaccaacaatctcaaggtcttccactgaggctgagtttagaagcctagcagcagtagtttctgaacttacttgggttcaatctctgttagttgagcttcatgttcctcctacaatcactccaatggtgtggtgtgacaacataagttcagttatgcttgcctctaacccaatacttcatgctcgaacaaaacatatagagattgatctatattttgttcgaga

SEQ ID NO: 312036 - DNA, 1348 bp, Cannabis indica
gaggtagcccatgaaatgagattagcaaaagaagctgaagctgcgaaggcacgtcacattgctaaagctagccaagccattgagaaagaaattacaaagcgttcatcttacatgaccgactattagcattaatatttgactgtttgagaataaaactaaatataatagttgtaacttgtatttgatttatggtttgtaataattatgatggataatagtatgtgtaaagtatatgtataatgatggtgaaatgatagtttgaaatatatgatgggtaatagtagtagtagaataggtaatggattagttagatgggacaagtaagaaatgagttagataaagagttgagataatatggttagtagtaaattcaatttgtgatacataagctctttatatagttgtggaagtcggtggtgtaagcctcatattacaatatctagagctttctattttcatatattttactacattctctaatatattctacacttttctagttttcaattaatttacaagaacacaactagaattatctagaataaaatattctagatgtttacaagtttcttttagaaaaactattttggacatatgtatcaatttctaatactccttgatacatatttctctcactctgatcaagtctcgtaatagctcaaactttgtccttggtagtgccttagtaaatatatctgctaattattcttcagtcttgtagtgcttgagctctatttctttgtttgcttctgcttatctaataaaatgatacttgatgctatgtgctttattctactgtgaaatacgagattcgtcaccattgcttttgctaattaatttgctgtcacaacagatctttatagcctcttcttgtaagtctcccatgtcttcaagtattcttttaagccatatagcttggcttgaagtcattgctaccgcaatatactctgcttctacaaataattgcgaaacagttgcttatttttttgatacccaagaaaataatcatgatccaagtgtgaaagaatatcctgacgtgctcttcatgtcgtctatggatcctacccagtagctatttgtgtagccaattagttttgactcattcgtgacttcgtacgacattctgaagagttttgctcctaacaagtatctaaggattttcttggctgctccatagtgaacttgacttagatcatgcatgaatcttgataggagactaattgcatacattatgtctggtcttgtagtagttagatagagtaagttgcttattagacttgacttggcactaaaatgaacttagtgaaatcagatgcaactaactacagaaaagatgttagacaaacaa

SEQ ID NO: 312037 - DNA, 2153 bp, Cannabis indica
ttttcagccccaacacagatggcacaactcgaatccaaatttgttctactcttcatatgaatgaagctcttgaaggcagcctctatctcggtcttcccaacattattggtcgcaataaaaatgctatgtttggttttatcaataacaaagttattgctcgaatcaacaactgggatgggaaattcctatctcgtgcagggaaagaaaccctcctcaaaactgtcatccaatcgctgcccacctatgctatgagtgtatttcttttaccaattggtatgtgcaaggagatagagaaattaatggccaacttttggtggaaatccaacactagtaaagggcgtggtattatttggatgtcttgggatcaacttgccattcccaaagaagaaggaggtatggggtttagacacttacatgattttaatcttgacatgcttgcgaaacaatgatggcgtcttttgtgtaaccctgactcgcttgctgctagagtatacaaagcgaaatactttccacattttgactttctttcagctaagcttggtaacaatccaagctttgtttggcgtagcatttggggtgctcaagatgtggtttgcttgggtggtgctcgtgttattggtgatggtacaaacacaagtatagtgggttttccttagctgccaaatccccaaaacatgtttatcacttctaatcacccaagtttgcaacataattcggtcaactctttatttcagctagatggtcgtgcatgggatgtagatgtggtgactgacttgtttccaactcatgaagtcaacatcatcctgggaatccctttaagtagcacgacaggggccgatttttggtcttggatagctgaccataaaggctctttttttgtgcgaagtgcctacttcctactgcaacatgaaaaaccagcagctccaacaccctcgggtttcgggcgtaaactatggcctttgaagatcccacctaaagtgtctaacttcctgtggcgtgttatttctggttcactgcccacttgtgtcaatcttgttacaaaacatgtgccaattttagctcaatgtccagtttgtaatttacatccaaaaaccgcaatccactctcttctcagctgtgatttcgccaaatcctgctagtcaccatttggtatgctgattaatattgctgctccttcaacctttggcagctggttttagaacatgcagaatgtttgtgatacagagcaagtttgtagagcttcaatgctctgttgggctatatggaaatcacgaaaccaagttgtgtggaaaaaatgaaaatccaccattaacgatgttttagctacaacttctatcactcttgatcattgacgaaaagctcaggataaatttgctctatcatcactatcttttgataatggtgatgatggggccgagctttagactaaacccattgcaaatcatatcaagattaatgtagacgctacaatttttcatcatgagaactcctatggctttgatattgtagcgagagattatctgggcaagcttattgaagctaaaacatgttacaaagctagttcttactctgctgaagtcgtggaagctttggggatcaaggaagctcttagctgaataagagcaacaattggcataatatagagcttgagactaatagtcttctcactgtccaagcaatccgaagtagttaggggatgtcttccatttttggcttgattattcaggattgtcgtgaattattgtcttctctacttgatgtcaaaatacattttattaaacgaccagcaaatcgagttactcatgttattgctaggcatgctcgattttcctctggttgtagtattttcgaacataatgtttgggccgatttaaaggctctcctgtattcagaatgcttttaattcaatgaagttgatatttcatttaaaagaaatatacaaatactactttgactcctaaaaaaaaataaatgaacacaagtacattcttaattattttctcttccttttttggccaacatatgtactgtaatagcattattattgggcaccaatgaggtagcaccttataattgattagtaatattctctaaaacatttccaatagtattctttttttttagctaagaaactaaaatagagagacattttt

SEQ ID NO: 312038 - DNA, 506 bp, Cannabis indica
tttcaagttcgacgaccttgaaaacccaatcgaagaccaaaaatgtcataacggatttagttagtaatactaatgaaattgttgagataaattgattatagaattaccgagatattctaaggtacttgggttgaccaaatgccttaaggttagaagtttcttagtagccaaaaaatgatgagataatcttttattaatattattattattattaagttattattgttattatcttttgaaatacattttacctaatgtacctgttgacctcgtttttggccaacgacaatgagtcttaattgtaaaagataagtgatataatataaatgtaatataataaaataaataaaggacacaaagtgtttaaagaggttcggccccgagcagttcggtaatgtaacgcccttacttacgtaaaataagatgccataaataaactggcgttaagatactaatgttgcctttatttattttaaaaaaaaaaacacttttcaaaacatgggtac

SEQ ID NO: 312039 - DNA, 1710 bp, Cannabis indica
atctattgtaaaaagttttttttataaacaggggatccctatattacaatagtatttaaaatggaagtctttattttgaatttaattaaagatttaaattaaactacatttttccaaaatttatagattattgataataagtttataaaagcacacacgtggcgtccctgagggtcagggcgttacagtctcatttttagaaataggcattagagttataatttctcaattctagagattttattaaactctaggagtattatatatattaaatatgaattatttaatttttatgattttgctcggcgatgacgaaaagtgcaatggatggccgttagagtcacatgggtaagtttagaatttatttcttagtgggacaaacatttgagatatttagaatactgagtttaagcggggttataattttagatcattttactcctaagcttatcgttacttaaattggaagaaagaagggcattttggtaattttctttaatggattaggtggcttaatcctaggttggcagctggccactcaatttctaagcctaaagtttatttgatttaatttaataaaagaaaagggaaaatgtgataattcaaggtctctgtctctctcttattttcggttgcctaagaaccaaaagaaatcaagccaaactcatcaaaatttctaggttttcaacaaggattctaagcgattttagtggaggtaaaaccctaatttgatccttttctagtttgctaaattattgtaggttttattgggtttttgtgtatgcttaggggatttagtttctgtgttggttagggtttcatgtagggttgtcttcctcagagttaattggtgtattaggatagttttgagttgttgttagttgattttgggtttgagctagtttgatctcttggaactcaaacttgactcaactatggaatgttgtgattttatgcaaatttcatgctactatttcttggaatgtactgtttgaggttgatacaagtgttctagaaggtctagtatagtttggacacaaattgggcaagttttgaacttgtttgggttacctggtgcaaactggttaactggttttataggccctataaaaccggttaactagatcaggggcacgtttcctgaaaaagttcaatttgtcagttcgagttatttttagagccttagttggttaattctttgataattaggacattgttataatatttatcgataccagaacccttagtagtgagtttggattctcgaattaggttttggcatgttatttacccgtttatgtaaatgtgacttagggcatccatctagcatgaggttttccattcaggtcggccaactcacttgaattcaaaaatgaggtaagaatagcatagaatgtgttatatatgcgattatgtgtatgtgtgatatatgcatgctattgtgattcgtacactaccaacactagtacagtagcggtactgagtacgttggtatagtgtacgatgtttaaagagtacaacacggtgttaccaacactagtacgggtaggtatagagtgtctgtggtataacacttggtggtactcgaggtacgagataaccctacccacactcgtgcagtaacagtgttgggattttatgtcctaaataaaacccattacaatctaatctgatttgttatcaataaaagattagaagtcatttatgatt

SEQ ID NO: 312040 - DNA, 2782 bp, Cannabis indica
ctctcagaaattttatcaatgctcattttcttcgagcaacaaaccttttccaattttttgttttcttgtcaaaacatttgggtcgattttgatttcttctggttcttccactggaacaacatttttatttagttccccaagtcggggatccacatcttcatccccgccttgggcagttccctatttggcaatgtcttttcccttgtccgaactctgactagaggatacttccttcttagacttggttatggcaagattgtaaaattcctgtgcaacttgctcatttcctcttaggcacccgaccccattcttcgttggatacttaaggcacgaatgaaatatcgacgtaatagcctttaggtcatataaggttgttcggcctaacataacattaaaggctgatggaacatccaatatcaaaaattgtgccattacatttatgctcttcggagctttcccaacagtgaggggtaagcgaattggccctagaagtgcaacactctggccggagaaaccgtacggcgtgaagacaaggggttaattctttgagttggagccccattttgtcatatggtgttttgaacaagatatttgcagaggctccattatctatcatagtttggacctcattttacttccacgaccaacagatcattgtgcgggaaattaatcttgagagcatcttcatcattaaatgttatggtgggttcccctgcccgtggtatttttggcttccattctttgacggccaggacaacttcttcttgctcgtgctgtaaggttcgggtatacctctcccgggctttgcttgaatctctagctatgtgtgggactccaataatgacttgtaaatgtccatctactggtagtggcagtaaatcctggttattgtgtgcttgggcggtgcattgattttgatcggtcttgacatattgttgcacgtgcgggtttttctttcttattaagaattcaatttcccacttgaaattgttgcattcgttggtgtgatggccataatctacatgaaaatgccaaaacttggacatgtccctcttacttatgtcctttttcataggagcaagtttcttgtacggagctactgactgagtagccatgtagatagtctctaaatcctcagttaacacagagaaagcagtgagcttggaaggattttctctaggggcctgttcagctttgacaacgaaactttcccttttcccattgccttgcctgttgttgttgttacaccttttactgcccaaacttgaatttcttggttactgagggagctgaacagatgttccagcagagagagcttgtgattggtttggtttaagctcgacttttgctcgctgaatgacctcttaaagcttgatgaaaccatctgcacgaacgaggaagtcactcatggaatctactggtctgtctctcttgatgtccttccaaagtccagacttcgatgccccccagtattgtagttaatttcccttcttttgttaaccgggcgactttcatcgcctccgtcatgaatttgttgatataagctcggagaggctgtattggcctttgcttcacttcgaccaggtcctctaaatgcaatgggagttggcgagaagaagagaattgtgcatggaattttgaggagaaagccttccaagagttgaaccttcctggtgtcaacttaaaataccgttgctgggcggcttccgagagtgtggcaggaaaaactctgcagcatacatctcctcatactccttgtaggtccatttgcatttcaaaatatttaagatgtgataagggatattccttcctattatacatcttctacgtcagcatcttgaacttgtggagcaactctagaatattgatctctaaagagaaaggggatccacgtgcccagtccaactcgagatcattattcttctgaccggctaggccttggaacatgtttttttagttcatccaactgttcttgcatggatggattaacttgttcggtctcttggccgaaaaaagttacatcaggtcctctttgagctaaattttgagcacgggctgagtggctggtgagacatattgctcgtctaaccctctccttctgtttagatcatccttgagatcatgagatgctcccagtctattgaatacaaatatacaaggttgtccaactggttgattattttggccaagcacttgaccagaatcgcagtcttggcagagttattaggtattacccctcttgacaaactacaggacaaggtctagctgcctaccacttgacccagaggtggaactcgtgaccagtgattgggcggttgactattcagagtttgagaagcattccaagctagatctttgtctaactcactcagtgggatgctggtcgcaggttgctgattaatagcttgataggccattcgtatcaatacagtggcctgtcttgttcggttttcaatggctgcatgctgagccctcaacattttctcctctatatcaatccattcatcgaatagatgcctttgctcctcaaatgcaaggttcactgcaacacctagctcttcctggtcatgatgcagagtattagttggccttgcatgagtccaagagcatcacggaggttcaggatctcggtgtcgtctccaacagttgttcagacattcgttgctggtggaactccagtgcaggggatgcccaggttggttgctgaatttgtatttccagtctcttgcagaccaggtgcgattcagtaacaccctaactagcataggcgtattacgtgatt

SEQ ID NO: 312041 - DNA, 1015 bp, Cannabis indica
tataatatgccacattttaatcttcattatgttaaataacaaatatataacatgggtgtcaggctatggcacgggcttgcctgattagacaatacaatacacgattatcatattaaagcatagactttcctaattaggcaatgcgatataataaagatggttactttatgaggtaacatgtataaagtttatattattaaataaatatgacttctgttattagtataattattttatattgccaaatatttatactgacgtttaattgtgacaaatgtgagtagtgatttggatctcatcttatgattaatgtgtgatcgtttgattttgattctttgagtataaataataatatttgaataataaattatatgattgttgttattacttttcttgttgagtccttgtggctcgtgggtgctaagtggtgcaggtaaatgcaaagaaaagctagttcaaccatgaggtgacattcttcttcagcaatgtacatattaaccctgcccccctgcataccgagttgctaggagttgtttttgggccgtatctgtcatgtattttgatttagtattttgtcttgttgtcgtatttagtatatttaaaaaacttttacaacatggattctcggaacacaattctgttatgatgttcgtttctagtgttttattttagtgaaaaattttatattatcataaattttcataattaaatattttattagtactacactagtttataaaaatatacacatttataggatagggtgttatactggttaactaatatgttaatggcttggctaaataagttttattgttgaataatgattgtatgtggtttgaaaaaaattctttttgttattttttttattgttgtaaatgattctctttgatttataataatagttttttcttaaaaaataaattaaagagtaataaaagaaaaataaaatttaaaatagattaaaaaaacaaaaaaacaataaaaaaattacaaaaatacggttttatggaat

SEQ ID NO: 312042 - DNA, 3921 bp, Cannabis indica
ggtgcacgagagtttggtccctgttggatgctgcccgtgtggctactgtggtaatggtgtgtgcctccttgtggacatcaaggaatgatctggtttggcgtaagaagcaaatgtcaattgaagaaattgttgtcttttaatctctcccttgatcattagttacatgctcaaaataatcctctcattcagtggctgagcatttttacttttgaagacggcgttgagcaccagactaaacctgctgatgattttattaaggtaaatgtggatgcagctatttttcataatcgtgattgtcatagctttgcttgtgtggctataaatagcatttctcttcttttaagtgttatctctagttgttggcttagtgtttttcaatttggtcttgctgaaacaataggcgtgaaggaagctttaagttaaagcaagaggaacaattgggaaaaggtagtagtagaaacgaattgtcttgtgttggttcaagctatctgtaaccctcgtcctttgaactctgtaagagcttatctatgctaaaatctaccagaatccaatctatgagattgcaattcaagactagcaaaagctaactagccttgagaaatgattttatttatatagaggatgagtacaaggcaaaagcaagaattaaagaaaacagaaagcaactgaaagttgttacaaagaaacagtagtaacagttttagctaattaactaactaaacagttagttaaggaacagtagtaactgtatcatcccccctcaagcgaaagggtgttgtacacacatgaagcttgtgcttgaggtaatgaaatcgatccgtggacaggggctttgtgagaatgtctgctgtttggtcacaagaaggaacatatcgaactttaacttgttttgctaagatttgatcacgaatgaagtgaagatcgatttcgatgtattttgatcgagcatgaaagaccggatttgcagctaatgaagctgctcctaagttgtcaacccatataattggtggtttagggagatgaactttaagttcactgagaacagagcatagccatcgtaattctgcagctgtgtttgcaagggccctaaattcactttccgtactcgatctagccactacaggttgcttttttgcagaccacgacaccaggtttcccccaaagaaaattgcataaccacccgtggaccgtcggtcatctgggcaactcgcccaatcagcatccgagtatgcttgaagacaaagttgtggtgcaggcctgatgagaagtccctcatgaatcgtccctttaaggtacttgaataaccttttacatgcttcccaatggactgttgttggagcgtgaatgaattgacttaacttattgacaatgaatgcaacatccagctgagttaaggtcaagtattgtaaggctcccaacgtgcttctatacagtgtttgatccataaatggctctccctcagatagagatagtttgtgtgtagagcttgtgggatttggagatggtttagcaccttccatatggagtttgaccagtaaatcagagacatgtttggtctgtgataagtacattccagtggcatttcgagctatttccacccctaaaaaatagtgtaagggtccaagattattgatagagaagacttgattcagttcctcaataagggtgttgatgattatgttgcttggccctgtgatgattatatcatctacatacacaagaagcacaattaaatccttgtcagagcctcggatacatagagaagtgtctgaacgagatgctgaaaatcctttctgaaataatgatgtggtgcttgctttagaccatataaagctttgtgaagcttggatacatgagttggtttctcagcatcaacaaaggcaggggctgaggcatatacacagtttcttggagtgagccatttaagaatgcattcgagacatccagctggtttattggccaattatttgttacagcaatggtgagtagcaatcgaattgttgctggtttaacaaccggactgaatgtgtctgtgaaatcaatccctggagttagaaggtaaccctttgctacaagcctagacttgagcttatttactgaaccatctgaatttaacttgatccgatgcacccatttgttctcaaccaaggtcattgatgaatcataaggaaccagggtccatgttccatttttttttagtgctatattcatctttcatggctttaaaccatttaggatcggccagggcttgtttaagagtctttggttcatttggagttagggtttatggactccattcttggatcttgttgtcatgggatgagtatttgtggcttgttgaggaagaggtaactgaccagaggttgggtttatggtgggtgaatttatgtctgatggtggtattgtgtctggagatatagtgttggtagagggggcatctggtgtatgtgtatggggctcagttagctcacagttgggtgcatctggtgtaggtataataggctgaggatgagtagggagagatgttgaacttgcagatgtagcaccagcagtaggtgtgtcaacaacaataggatttgagttagataaggcattttccataggaatagtaaagaatgaagtagttggaaataatgtggagggtgaggattgtacctgttgttgttgtgagatagattttgctggaaattcttgctcattaaagattacatttcgagcaatatatgttctccctgtttggcttctgcacaagtagcctttgtgctgcatagagtaccccacaaagatgcattttgctgatcgaatctctagtttatgagactggtatggccgtaagtgaggatagcaagagcacccaaatggcttaagaaagctgtagtcaggttgctgttggaagagacattcataaggtgaaatatcactaataacagatgtagggaacctgttaataacaaatacagtatgttggaatgctagccaccagtatgctaagtcaagaccagattcagcaagtaaagtgagcccagtttctgtgatatgtcgatgctttctctcgacccgaccattttgctcataattctttactcacctccccagtcagattggactgtctttatgggaagatcaaactgtttctcaacaagctttttaaactctagaaatatggaaaaggcttgggattttactgttaaaggaaaaatccatgtaaacctactaaaatcatcaacaaacacaatgtaatacttgtatccttctagagaagtaatatgggagggaccccaaagatcagtgtggagcaactcaagtggttgagaagctcgagaagttgacagagaatagggtaatttgtggctttttcccattttacatgcttcatagaatctaagtgtctttaggttatatgaaatatttatattttgtaagattttggccaaaattttaggtgctgggtgacataattttgagtgccatatattaacatcagaattcacaccagaactggtgtataggcaaacaggagactcacttttattaatgtcagtagtattacaagaaggtgcaactggtgaaacagctgaaatacaattggaaagacaattcttagactttaaaccagaaacatgtgactcaatattgtctgaggtaaaagccatagtggtggccatgtgacattgaaggtccagatcaggttctgaagtgggttggtggggaagcatgtagaggccatttttaactctccctttgagtaggacatttgttaggttatttttagtattaattttagattaagtttagtatatttttaattaagttttaatcgtgtttggagcatctttacgcttgttatcttttatttttgcagatttaaaatagaagaagattagaaaaatatcagagaaaaagatgggaaaaagataaaaa

SEQ ID NO: 312043 - DNA, 807 bp, Cannabis indica
actactactctctctctctctctctctctctctctctctctctctctctctctctctctctctctctctctctctctctctcttcttcttcttcttcgtgtccaccatggaagatctggtggcttagccagaggcggtgatcgtgatgctgcacctttagatatggagatgttgccacagttgtcaaggaggtctcgacagagacttgtgaaggttaggacacaggttgagctctgatgagtcaaaaaagtctgctctcagatctgcccaatcgataacttcgactgtcaccttttcccgtggcaaatccctaatcatatggaaactcatcaaggacgacaagacctacggatttccccactataggctgacaggcaactcccacttcattcaggacgtcattctctcatctgacggtcagtttgctctctccaaatcttgggatggtgagcttcgtttatgcgatctcgctgtcagagtctcagctagggttttggagagacaaccatagcgaacagattctggagtttcgtttggactcagaagcctactccctcaattttaaagattaggtttcccgattggagccatttagagtattattccaaagcttaaataaggtgtggtggtggtgagaagaagaagaagaaggataagaagaacgatgttaaggaaaaaaaggattatcttgttgtattgatcaattttggcgttttcggattgagtggattttgattgattttcagggaaatgcacaaaaaagaaaggaataagaaagaagaaagaataaaagaaaaaggaaataaa

SEQ ID NO: 312044 - DNA, 930 bp, Cannabis indica
ttttttttaattaatgttattttttttggaagaaaatatagaacttttattaatgtgtcaaattagtcaaaagacaagactgtacctcaataaaaacatcacttctattgaactctcgatctggaaaagaacaagatgctctagcaagactatgagcaaccatgttagcagatcgtttgataaaaaataaagaaacattgtttaaagatgcaagaaatttatgacaatcttctataataaccacaaaagaagaaagcatatgtaatgaatttcgaatagcttgtaatgctacatgcaatttgactccagctccatttttcgccatgattgagtttgaattcagcttagcgttttttttataccaattgctttagccaaattcgaagcgcctataccagcaaaactggccgacttagccatcactaattccccttgagagtctcaagcgactatgccataatcaaacgcagctcgataatagaaaatggaggcatcaatagttatcttgattgtattctcttgcggcttaacccgaaatttaactccatcaccaacttcaaaaattgaaaaagaagcctctatatctccactttgggccaacttccattgcacaagacaactcgtagatgagataagaacatcatccactgtagcatacttttgattccaaaccaaatcgttttgagccttccataacccccaagacaacataacaacatcccaacactttattaaataagttagtttatttaaagggtaaataccattttgaactttatattttgcaaaagttacagattggaccatctgttttcttaaatgacaaaatagactctgtattttccaaaatggtaaaaataagatcctgagcttaattttcgacaactttttttttaatataaccaacttgaagacaattcctaacacaaa

SEQ ID NO: 312045 - DNA, 2453 bp, Cannabis indica
agggggtccccttgtcgaagccctctcaaaggaataacatgcccaacgacatggccattgatattaaacttgaaagttgcaatggacaggcaagtcatgattaaggagataaacttagagggaaagtcaactttttgcataatcttattcaggaaaatccattccactctgtcaaaagccttagccatgtccaacttgaccgacatccaaccaatcttgcccttcgtcctatttttgatggagtggagaatttcttgagccataagaatattatcataaattaatgagaagacctttgcggaaagcacttcgactaggtgaaatggagtttataaccaacttaagtctattggcgagtaccttggagatgattttatagatagttgtgcacaggctaagaggaagatagtctttcagggtcaaggaattttaatttttggtatgagggtgacaaaggtggtattaaagtgggatatatcagactgattattaaggaagttgagaacagcctcaatcacctctcgtcccacaacatgccaattttttaggtagaactaattgttgaacccattaatgcccagggatttatcatgggccatgtagagtaaggctctcttgacttcaaggggcgtaaaagcctcttccaaagattgacagtggctagagtcaagggtggagaaaattccttgtgagggcattgtcaatcaaattgcactgattgtgactttattgtcagtttcatttctacacccattttttattttctattttaattttaatttttattttactattctttaatttatactcaattttataggtcatatccctattatgtgtattacgaactctaattttaataagttattgtaaggttatatttggtactttaattataaaagaggatatttatcaattaaaattattttggagttatatttggtaattgtataataaaaaaaaaaggtagttttcaacttatctcaaatctttttctattcaattaaaaacaagaattatttcataaaatatccaaaaatgacactttaacgttactgcaacactatactgtattttcacaatgttttctttctgaaaaacagtcatttgtaaaaccatataaaaacaaatccgtaaaaaaaaaatagatgatttgtgtaaatttttcaaacagttttaactacaaaagggcctttctctagtagtgtatatacacatatgtaaacaattgggcttaaaatttgacgttgattgccattgattggcccaataatttattttcaatgtaaatcttgaatctaaaaagaaattggaaaataatataattatggaattttttataaataaactctgttatgctaaaacaaaattattccatatatattgatattatagcaaagcctcattaaaaaacccctaaaaagcaaaacccaaagggaaaaactctataagggaaaaagagtacaatgcgataaagtacatgtatatgatattgatacaaatattatggtacgcataatctattagattaccaaatgccctaataatatgtcaaataaactaaaaaaatgtgtcaaataaacaaaattattttaccaagatgattatgttaagatgactatatcttgattgtcataattttacttatttggcacatatgttatatattagtgtatttgacatatatttttttttttaattcatttggtaataccatatagtcgactacactatattcaaaggcttaattaatatatgggattgatgatgagagtatcaatcaaattcttgagcaatgttggttgtgtaaaaccgtcaccttctctgtacatctcatggttcactcgtacaagattgagaactctcattaagagtggtctaggaatagcgattggatagagaagatcttcattgagatccttccatgaatcattaacttgttcgttaagtttctctatagcttcttcatctgttacaccatattgtttgatgtaacactccacagcagaagccactacatcttttgataattttcttcgatccgactacaacatatatataaatatcaataatatatgcatcaaaaacttatgttgtaactaaaagattgttacaaaagctaatgattatttcttttagtgattatggggatgaacttgcaatttatttgcactataataacaatatatgacatgttttcaatatatgacactataatatttcttatagcaatactcaatatatattagggtttttttttaatattatacttaaaagtgattttatttataaaaatacctttaagaaaattatttatacaaatatcgttgtgtcacgtcagcatacactccgaaattcaaaacaattaccgaaaatggaaaaaattggaaaaatctcgtttctagaaatttttgctttttgggagttttgaaaaagtaactatttagttgctt

SEQ ID NO: 312046 - DNA, 540 bp, Cannabis indica
aattgtatgtatctcgtcatgttgtttttcttgagcatataccttttcttactattcctagcactcctcataatttgataaaatcagatcttattcaaattaacccattctctgagtctgagtctgaaccatccactactcccacagtttcttttcctcttcattactctcggatgcatcgtattgaaaggtctcaagaattagatactggtactttgcaacctgaaattactcctccattagatattgatactttgcaacctaaaatcgtcttccccctccttctatagttgttccaaatcctccttagattgtggaccctcctccttgctatcctctgcgcattcgtaagtctactcgccaaccaaattttacatactcttcttcttctacttcttttactttgtttttagcatctattcattgtctttctaagcctctgtcctataaagtggcggttattgaccccctttggcagcgtgctgtgaatgaggaactctttactttgaaaaaagactcatacttgggatttggtacttt

SEQ ID NO: 312047 - DNA, 2773 bp, Cannabis indica
cacttctccttgcgcatttgggggagtttttctaccgcatttttgtaaataacaaactttaaaaatagtatatttgaaattaataaacaatataaatgtttatttttgcttgtaggagtataaatgtttatttagagtaatattaaactaaaatagaaaaaatccgttaattaattatgagatcacttagacagattagttagttggttaagagttggttgtttagagttgtccaaacaactctgttattatagtcctgttgttcattaaatacatatttattttttcattactttttttttcatttgtattatggtatcagagtcacaatcatagcgtgcttatctctgtctcttcttttttcaactccttttgttgttcttctcttccatgtgttcatggctcgaggaagagctcaaactcgaagcataacaaaatgtgttagtatgccaggatttggtaagattatatggaagaaagaattgcaggccaagctgcatgatcaaaatcgatctcaggaaggcatatgatactgttgaatgggactttattgaggaaatgatggtagcttttgggtttccaaatcagttcatttccctcataatggattgcataagaactccaaagttttccttgcttctcaatggctccatgcgtggattttttaatgccagaagaggattaaggcaaggggatcccatgtcccctttgctctttgtggatggaatacttgtctaaaatacttaagaaggttggggaatggccaggtttcaagattcatgacaggtgctcaagtctgaagttaaatcacctctgctttgcagatgacctcctaattttcagcaatggtgactttgtttccgtcatgttgatgcttaaaggagtgaagctgttctctgcaacttctggcctccttcccaatgaacaaaaaactgctatatattgctcgggcatggcaaatgtggaagttgacagaatactcgaaggatctaactttaagagaagctctgtccctttcagatacttgggaatccccatatgttcaaagaagatcagcaagtctgaatgccaggaactccttgagaaaatggttagcagaattcggtcttggagctcaaggaacatctcttacatgggaagagtaaccttgatcaatgctgtcttgatttctattcatacgtattgggctcaaataataattttgcctaagaagttactcaaagatataaaagccatttatagatccttcttatggaaaggaatacagggaggaccagggcctggtttaattgcatgggaaagtgtctgcaactcaaagagctcggggggattaggcttcagaaacattcagcaatggaacattgcagcccttgccaggtatgtatgggatattgcaagcaaaaaagatttcatatttgtgaaatggatacactctgtatacttgaaagaacagtaatggtatgagtatgatgctcccaatgattgtagctggtattggatgaaaattgttggagttaagaatcgattgaaaggaaaagttgaccttgctggttttttgctacagaagtataaaattcagcaagggtatcacttgttattctccaagagaaatttccttggtatagagatgtatgggatagacttatcattccaaagcacaaattcatactttggttggttatgtggggcagattaaacagtaaggaaaaactagctaaatatgatatgaatatagatgaaacttgtctcttatgtgggaaggagaaggaatcgattaggcaccttttctttgcttgtgattacagcagcaaatgcctacatgaagtcaaaacttaactgctatggagaataaaagcagaatcattacacagcctgctgacaaacatcaagaataacaaaactatttcagcaacccgaagaagcatgctgaaagtagttctagctggacgcatgtttattacatttgggaggctaggaatgatgttttatggaaccaaaaggtgaggcatatcaaggcaatggtgaaacgcatacaatgggaaagcaagctccggattataaaaattatgcctaggaaaactaaagatgtagataaagagtggattgtgaatatctaattctttgctgaaaattgtaattgtgtaatagcctataaaaaaaaagtgtgaatgggggaaaggaagaggaagaactcggctgtaatcacaataagttgtaaattgttgtaaaaatgttgtttgagtaatacaagaaccttattcatacaaaaaaaaaaaaaaccaaggagatggttctaatgattttaacagggatgaatcaaatagattctctattcttgaacctggtggtagattgtttattgatgatgctcgaaaactcatactttatctccactagagatcactcaggagcaagttcagttcccaagattttaacttattgtgaaaactataggtattggagatgttcaatgattctggtcttcattgctagaaacaatattaaattcacgggattgaaggtttcttgaacttgatgatgttgatcatgaagattacgatatgtcatatagatgcaacaatctggtaatttcatgttgtgtcaactaaaatggcaaataacataatgtatctagacaatatgggtaagcgtatgggtaagcgtgtcccgacatgctaagtgtgtcactatatcattttacttttttcaactttaattaatattattcaaaaaaaaaactttaattatatataaatataatcagatattttat

SEQ ID NO: 312048 - DNA, 710 bp, Cannabis indica
gggtcgttaatggctgctctctcctcttcctcttcttcttgttcatggtcttggggtaaggactgctccctcctcttcctcttcttgttcatggtcatgggtttttcagataaaaaaatgggaaagggaagagaatgggtcggggaagaatgagatctgacactttgactgtgtcaggtggcagggtattaggggcgacttttgttgcccttaatagtataagcgggaaaattcccgctcttgggcaatggataattttcaatttattaggggcgacttttgtcgcccctaatagtgacttgtcgcgtctaatatttttaggggcgatatttgtcgcccctaatactgtaccaattaaaaaaaataaaaatcaaatttttttagaggcgacacttttcagtcaccgctaatacctataaagtcgccccaaaatgtgtcgcccctaatatctcaaattcttttataccataaaataaaaaaaaaatccttaattatctcttccttagaaaagaaaatctattaagactttgttagttatttatatctatttttcgctttttttttttttgggtcgctaatcaataattacatatggtttatgtttttaataaaattgttagtgctcagacacgaccggctaataacctgtgcaacctgggcagttgcacagggccccaaaataataggggactattattattattatttta

SEQ ID NO: 312049 - DNA, 776 bp, Cannabis indica
cagtattttgtaaaaataacctcaaatttcagtatttttgtaagtttctcaatgtgattcgacgaagagataaattcaaagaagagagagtatttggagagagaatcattttttcttggaacaaaaataaagatttttaaagtatttttttctttatgtagttttggttttcacatatttgaatacttgcacagttttaaattctatacgttttttattttatttttttttccataaaaaagtaaatttaatgttattttcccatatgaaattttctcattttaaaaacaatccagaatgagctatttatatcaaatattcacaaaattattatagcaaaacttcagcacaattaatcaaatttaataactttttgatttattaaatattagagttagtctgacattactaatatgtggaaataaattattatatataagatgaatagactatactcttctcattgtcaattagttttgagattgaacctcattcatcttattttaaattctaaataatatgagaagtcaaactaaaagtgatataaaagagctattatcttaagggagatgttagagtcacacatcactaagtgtaaaaatataacactatatataagatatatgaattactttttccattatcaattaatttgagataaaaccccgtacaatttaccgtgagctgtttgttagaatgtgggaataagatgaatgaggttccatcccaaaaccaattagcaatgggaggagtagcccattcatcttatatatcac

SEQ ID NO: 312050 - DNA, 3170 bp, Cannabis indica
agttgtcacctatcgactatcaagatgaagtctgttgtcctgaagatatgaacactctaggtctaaccgcccatataatcttcattagctcgagctcactattgttcagcatttgctttacttttacttacacatataaataataactgtgagttgatagactcagtaagataaacataaacataacataaatataaactagattataactaggcacccatacacccaattacaatcctatctaatgtcccacatgtactgactctagaacattcgtacgataaatcctagcttatatatgttgatatctcagtgcatctcaatgtgcactttaccaatatcctgatatgcaactctaatggctactaatatgcctaacatatatttattggtaattcggtacaactctatgtatacctattgtaatgacaactgacatgcacgctaaaaatgtattcataaatgcaatcattatactaatcttaccttgattctaaattcaggtgtgtcggtcaacctgagtggaaactgctgctcgaaaatttacaggcccttaagtcacaacatatgtaaaactgataagtgatatgttaaatcacttttcagtgacttaaactcgaaactaaaagttttcctatcaataattagagtggaaatacccaaaatatcgagaaaatactaaaaaataagattttgagaaaaatactttaaaaaaatgggaggtcatttttcctagtcttgcttgctaaaaacggtctcccatttttaacttcaaaatctcattaagtctcatttctcaagaaattcaatcccaaatcacctacatctgtctagaatacctatttaggccataataaacataatccaactaaaaattccatcatctactaacaaaataaaaaaccaccattaaaagttcaagcttgagcttaaaaactcaacataagtttaaacacaactaaagccaacataacctgcttaaagaaactcaattaactttacaatatccctagaaaataaacccagtcatacagaacctagctccaacaattgcatgaaaaactaattttaacttagaaaattcaaagaaaactaagagaaaaagcttaccttgacttcccttcactaactactgagattaggtactggaatatgcttggttttttatctgaaaaagttgagaaaccacttagctctccttggtagttttagccgaacaagaaagtaagaaagagaggttttgcatgctatctaataaacaaatgcccttatgtgccaaacaatttaagacacctcaagaggtgtggacatgaaagccacctaggtttgaacatttaagagtgtttggttgcacatcctatgtgcatatcaaacaagacaaatcgaagccaagggctctaaggtgtttgtttttgggatatctagagggattcaagggatacaaactatggtgccttgaaccaagacacaagagatgcttgataagaagagatgttgtgtttaaggaagaggaaatgacaatgaagaccaaggttagtcctgaaatcgttcaaacaacactgctagaactggaaggaaggcatattgaggtggaccaatcacatgacaactcttcacagttagaagacacaactgagaatgagagtggttaaggtgatctaagcagctgccaactagcaagagatagagaaagaagataaagcaggccactaaacatgcttggttatgctgattttattgcttatgcattgactgtggtagaggaaatggatagctctaaaccaactagctatcaagaagtagttaatgggaaagatggaacaacttggttacaagctatagatgaggaaaaggtctctctagtgaagaacaagacctggataatggtcagaaaataagaggggtacaaatcggtaggctagtggattttcaagcacaaaaaaggaattcctagtgtcgaacccaccagattcaaagaaaggttggttgcaaatggttttacacagaaagaaagtgtagattttaatgagatattctcaccagtggtcaaaaaagtctcgattagggccatgatgtctaaagctgctaattcagcctagaagttgaccaaatggatgtaagaactactttcttacatagagaacttgaggataaagtctacatggaggttccgaaagggtttgacaaagaatattcaaaccatgtttgcttactcaagtaattactctatgggctagcttaagcaagctccaaggtagtggaatctcaaatttaactccaacatgatcaagataggattcatcaaaagtaagtatgatccttgagtctattatagtgatcacatttacttattatatgttgatgatattctaataattggaaaggaaagatcaaagttaaatgatctcaagatgaaactcaatgaagagtttgaaatgaaagaccttggaaaggctaaaagaatttttagaatagacatacatagacatactcaggcttgtattactctatcacaaagcaactacctgcaaaaggttctagaaaagtttggtatgaacaaatgatagccagttgctactcctattgctcaacattttcaactatcaacatctcagtctccaaaaaatgaaactgagagaatcaagatgaccatatataatcccatatgccaactgtgttgggagtcttatgtactccatggtgtgcaccatacctgatcaggcacatgccatgagtgttattagtagatacatctcaaatccaggcataaaacactgagaagtattaaaatagattatgagatatgtaaaaggtatattaaacacatgcattgtgttcaacagtgaataccaacataaagaaaaagttactagctttgttgactcagactttgctgtaaatatagacactagaaggagcattacatgctatgtgttcactgtgttaggaggttgtgtaagctggaagtctaacctacaaaacttattgcattgtcatccacagaagcaggatatatggctgcaattgaggctatcaaggaggctatctgatcaaagggattgacaaatgaattgggattcaactcagaggacattgctttccattgtgagaaccaaagtactttacatctcatgaaaaatccaatgtttcatgagaggtcaaaacacatt

SEQ ID NO: 312051 - DNA, 2431 bp, Cannabis indica
taatcccaaacagatgagattagctggattagttatctagacttttaatatgcccaaacactggattggacaaattagcctgtctaatccaatcgagtcatgcataccaaacaggccgagaagatagtaacggaaagaaatacatttttgatcgtgggaacgttagaacacgggatcgatgctaaaaatcaagacgagaaaatgtctttgtttactaattaattaaccacgttaaaaactattttaattaatactataaattttctctaaaaaagatggtgcacaccataccagctcgggttacttggtggtggcacgcgtgtggtgtgtaggtgagcctttgtgtgactcctccttcttccacaaaagtgggtaccctttgggacccaatccaattgttcatatgtacaatatatatacacttataaataaatgttcccaaacaatgtgggactagtcctctaagcacttcaaaaatgctcatttctaatttttaataattcacaaatatgttctaacaatttcctacttgaatttttaaaaaatattttcttcgagcagtaatctaaacaataaagttgagtatagacaaaggtattttatcgatttgaacatttgtgtagtgaatgcaacttataatatactagagtgattcgtaatcttgaactctatctctaccatgtaccacgcacaatctttctagggtgtacgcagttcgtgcttcaatggtcgtggacgtctatctcactatagaacactctagaaatttgtccaaaacttcataggaagcggccccactcccacattcacgtaagttattctatcaagaatactcttgtagctcgatactccatccaacatagagtatagatctcattaagagtttctattatgtcaaccttctatcgcttcagaaattcatacttcatattttttataataatatcatgatctcattcttatcacattataacttgttattacccattaaatatatttcttaggatctccagtctataggttgggttaccattatgagtgaacataaacattcactttattaacttcagcattcaatttaaacattcattcaatagcataccatatctccacaaaaatctcatccttagttaaagtaaacaaatttatccctatagtgttggaattattttaccaggatctagatttactaacaattatgttattaacatcctaaatatgaacttctaaaccgatatgaaataaacacttataaagtattagaaaccttacagtggttgcagcggagtataatgttgtcacatataactaaaaattaattattaaataatattgtcatttaatatattaattaattagacttatcaaagtatcttaattaacaaataaatctaagaaactctttcttcacaatttagccattgcttagtgaaaattcataaactagacatagtctaattttagaattataattgattaatcaaaatcaattcactgagtcttacaatagtattgtctcaactagtatggggaccatgggcctatatatttgacttccaataagcagctctagaatttaccaggtaaattcactgacttttatccattgttataatcccctataatcaatgatcctctatagatgatttacattgtataaggattaatttaccgttacacccttcaatgtttttatccttaaaacacttagccacctataaataatatttcagtgaactaaacataatcactgaaatgagtactcaaccatttatctctctttagtcaagctcaaaggaaatcatcatttcacttctatgccctgatagaagctatagattctatatctatgtttagcgctcccactcaattgcactaccatgttcccaaaatgtacgcattactttgaccaaaaagtaggcttaactaacaaattaaagaacatgtataatagtcttgagattgaacctaaccatgtcaagattaagatcatttgatctaggatcaactaggtaatattaaactctattatcgcggaaaatttatcatatctgattcaaagttcaatatcggtcccttccgatacatactccatgcttccaactcaagctttactttaaccaatgccctggtaaggatatatcacttatccaaggtgcaagtaaactatgttttagattatcatatccgttaaactctatgtattgataaatctaggaatatatatttaatcacataatcttgattactctccactgtgctgacaacacaataaacaagaatattaatttgataagggtttggatgaatttataaatcaaataaacatatatataataacatgaaccaaatgacacataaaataagtgatgaaaacacttctgtctctttattgatatttaaatgatagagattacattaaaatagagtt

SEQ ID NO: 312052 - DNA, 564 bp, Cannabis indica
tcaatttgtgtgcaaaatatttttttgaatattatgaacataatgttgatatactgttgacaaattttttttagttaaattgttgataatatgttgacaagtaatcgacatcctgtcgatagtggtcatcaatgccctttgcttacatatcatcgacattatattgatatgctatcgataaacaattgataaactgtaaaaaactcaaattttgagagaaaaccaaatttagtgttttagaccaaaaaatagcaaaataataccagttcaaacaaacaccacacacacaatgaaaacatactacatattattcctaatatctaaaaaatggttagaacacaacttacctactataatggtgaataattcttcagattagggtgtggtttagttgtccaatgtctaccactgagagaaagatcgaaaaataggaaagttagtgatcgtgagagagtgagctgtgagagagaactgagagagagaatgtagagagagggagagagagaaagagagcgagagtggtagagggagtgagtgattttttttttggtaaatatcattttg

SEQ ID NO: 312053 - DNA, 1338 bp, Cannabis indica
tatgaattgaaagaaaaaagttaaaaatatttagtataattaaagatatatattttatataaaataaaattattaaaataaagtctctttacaaatttttagaatgtaaataaaattattctttttttatgtacgtgtaaaatgtcgatcatgcccttactatcacccaatttttatttttgtttattctttttttttgttagtttcggttacataagtttaaattagcatttcgcttgtggagaatttgtgatagaagtccacaaatgcaaaaaaaaaacaccaatattgattcactgagaaaaatatattattgctataagtgtaattaaatattaaattaaaattaaattttagacctaaaacgaaattaaatttcaaaatccctttataaatagtataataatttttagaataatagttatagtaattaggtatatagtggtaaaaaaatttaaaaactcctattataaaataaaatttaagaattgatcacatattctcctattataaaatgacactctcaattattatgctaaatctttttttttttgcaattttaattcttaaagcccaaaaagtatgtatatttgtctcacgagccttattcaatataatttaaaataatattttttattgaaatattattaactatttataaaataccacctttaaattgttctaaagttagataaaatcccctatatattaatatgctaattattaaacggtggtttttggaattgagaatatgtttgagctgttcaattctaatatgagtctcaaaatttgacatcattttgaggacctactttttcttttattggttgacttgaattgaagaaaagtaattagtagcataagcaaataaaatgattgaatatcacaacttaaactgctttaagatttaatatctttattactatcacattcattgaatatttgttgaaaaccggcctttatttttttactttttttagaacatattttcacattttcctacctccttagcatatatggaaaaaaagaaaagctatatgaactattataaagctgatttggaaaatttgtgagtatacattctaattccaaaaataaaaaactgtaagggaccactttggggggcgcttttataggtagctatcaagtggtttcaattttccaatcttttctagagccaaagcaattatttatctttttgctcttgaaataacaattttgaatggtgtaacgtccccgcttcaagcctccattgggtccttacacccacgaaatgaatggctcttatacacgagtacgtcactctggctacttcatggactgatgactgaccctaca

SEQ ID NO: 312054 - DNA, 514 bp, Cannabis indica
ctacatttgagcatgacaagattttgcctatttcctactcttggcaaaagtttctcccctatgtgtggcaagcctttgccattatctattatggatgttcctgctactggggaggctcttgcctctaatggccgttcttcctcgactgttcctttagctcctctggaagggtttagtcctgcaacttggcaagcactactacaaaaatatcattttgcttcagtttttaagtgacatataaagaatttgcgtcggtttgtgtaactgacgctataaccgtagacgcaaatagtcttattttttacttcacttagtaacagatgctaaaagttttctcctcagttcctaaccgaagcaaatagtaaagcactaacgcaaattggtttttgcttcggttatgaaccgaagcaaacataaactaacagaccaccacaactagggttgtaccaaaaaactcgtaaaccacccagaccgaataaaccgcccaaaccaaactaaaaaaactgaaaaaaaa

SEQ ID NO: 312055 - DNA, 1774 bp, Cannabis indica
aatgtgagttcaaaccaagatgcaaatgtacctggggtagccggacagtgaacaccaaggtgctgccaacatgcagtagccaaagaatactcaactaaggcatgagaggtgttttcaggttgtgtagcacacatggggcaaaggatagaaacatttacatgttaggtgacaaggtttaggcaagttgggaggtagttagtcaaggcacgccacaacatattttttacttttgggggtattttcagctgccacaactctttccagaacccgaagttgttagatacaggtcgagaggacttgctttgttgcagcagcgagtacgcactacttacacttaaaactcccatttgattcaccattccagtaccagccgtcatcatcaagagtatgacttaacaggaggccgaggatgagagaagcatctatgggattaaacatatcaaggactaaatcatgatcccaacgtggcaaatcagtcgagaataatgcagaaacattctgatttaagagcccaggattgttagttgtaacatatggattgtccttgtcaggaagccacggagcatcaagaatactggtatatataccagtccgaatagtgcgacgggctccaagtttgagaagcttttgggtgctccaaatgctgcgccaaacgaagctggggttggaaccaagatcaacactgagaaagtcagaagtgggaaagtactttgctttatagaccagactaacaagtgagcttggattgcataagagacgccaaccttgtttagcaagcatagcaaggttgaaatcacttaagtgacgaaatcccattcccccaaagtgtttatgagtagccattctctcccaagacatccatataatcccattccccttgcttgaactagttttccacaaaaaccgagccataagcttttcaatctcatcacaagtaccagtaggaattagaaagacactcatggtgtatgtaggaagtgattgaataaccgttttaagaataatttctttgcccgctctagaaagaaacttgtcatgccaactattcaatcgatttataactttgttcttaaaaaaccccaaaatagcattcttgtttcaaccaatggtattgaggagtcccaaatagtggctgccttcagaagctttaaccatgtcaagaatactgcagatgctatcacaaatagagcagcttgtattagggctgaagaagatattagacttagatgcattgactttctggccaaaagcattctcaaaagagtgaagcaggtggagaagattggtggcagcctcgctggtagcttggtaaaataaatagctgtcatcgacaaagagcatgtgggtgatagagggagcacggttagcaacacaaataccacgaagactagctcttgattcggcttgttgtatcaaagaggagaacccttcagcacaaataataaagagagatgtggaaagagggtcgccttggcggattcctcgggaaggaacaataggacctacggttcggccattgtggacaacagtgtagcggaccgaagacacacatggcatgatcaaatttatccattgtgagcttttattcctggacgccttatcactgataatgtcatggttgcctttgaagtcatgcactacttgaaaagaaagacgaaaggaaaaaaggggtatatggaaattaaattggacatgagtaaagcctatgatcgtgttgaatggggctatcttcatgctatcatttctaaaatgaaaaacgatttttgaatcaaaa

SEQ ID NO: 312056 - DNA, 896 bp, Cannabis indica
agatcctggtaaaataattcccaacaaatacttagggctgagtgtaacacattagttactttccgagatagccaccttaatttttatatttggaattcccttctcgtaaactgaattactcataggtttgacagttggtaccctagattctacgtctagataaactttaatgagtcgtattatcgtatagccgagcaatatggcaccatgacagatagggcaagtcatgtagacatgagttgggattgaaaaccaatcaagccatttgatatattaaatattacaagctgtagggattttgacggatattacgatccttctaccccctctagtgatagctcaccttctactagtagttttggtaaattccttaggtggaaaattacactccacactcccctttcatttgtctttaaataattgtaacactttattttgcctcgcagacatgcgttataaggatgttatggaccaaaaagggaataaaaggggaaccaactcagggtttcctatagataccgaggtggagccttctaaaaggcgaaagaaaaccactggccacataaagaagaaagtatctgagtctatcgacctcgaggtctttgaaatagagacccatgaacagactcctcctccggttgatcccaacaccagagcacctcctcctaatacaacccatgcctctacttcctcgagccatgccattgaaacattgtctaccgtagcggggaagactagttcagaattttccctagtttgggactgcctactggcgctaactcaaggctctcctcccccgatatggatataatcaatcatgggaatccagaagaaatgctttcgaggatcttgcatcatgccctcatggtaagtttactgtattaatccatatattt

SEQ ID NO: 312057 - DNA, 1408 bp, Cannabis indica
taatctaatctataaggttcttttatctcagaagcatgtggtctttttgaatgagacacttgagccttccttcactggaacaatttttcaactctcggagtattttgatggagctttcctcaagcaccctaaggcttctgttggtggaactccatctactactgctacaggttccagttttgcttctattgatgtgcaagaagtcaagcaggaagtgaccttgatgaaaaattgcttggctaacatggaggaggttcaataagaaatgtccaaacaattgtccactttgatcaagctttatggggcttaagttttgtgttctctttcctttcctttaacttgtttcgtgattttttgttggacttgttttattttctttttgtctttggtccttatagataaacaaaaaagggggtaatggttttaatttcttgtgttgtatactcaactctggactcttttttcaaggggagttgaggttggtgtaatgatgtgtttctcatggggagtttaatatatgattttgctaactttattttgtaggtatatattatttaaaaatattttgattacctaaagttccaatgggggagtttgtaaagtcattttttagcaaaaaaggtgtcaaaatattttttttatttaatatgtatttttcttgtgcaattaaactatttttattatagtgatttcgcgcctctaattactattttcttttaaggaaagattcattctcagcttgtctcattttgtttaggaaatttcttataagagaagaaattttcttatggaaagttgtctagttttaggaaactttgacttttattttttttaatgattttggttttgccttgataagatcagatcatataaactatatttggcaggtttgaagtccaaattcgtgatcttggtcaaatttggaaagtttcctttctagtcctgatcttttgttgtagagttcgattatgttgctgtaaatcaggaaattttttaaggaatttttgtacagttgtaaaattaatttttgtgattgtctctagggttactatgttctacaaatagaacatagagagtagccaaacgatttacgtcttttagttttcatttttgcgtattttcttatttgtcaggagagagttctttttgtgagaacctagttgttcaactatattttagtgtttatgttattgttcttatactgctcttaggatcggttgaacaacttgattgaacaagagaaaggttttcgggagaagactagttcaagccttacttcgggaggaagtaagtactcacacatcaaggacgaagggagttcgctgtttgatggtgtttcaaaatcagattcgtgaagtgaattacaaaagatcgtggcgaagatttagagggagtctaaacttgttta

SEQ ID NO: 312058 - DNA, 1073 bp, Cannabis indica
aaaaaaataaaaaaaattaacaactatttgataaaaaaaaatcaatccaaacaaaaagtagagcaagcaaatttccaaaaagtagaatcaaagtaagaaaaaaactaattgtgattcaaagatgagaaaaaaaataaaaaatatataattaccatcctaagagggtactgttagaaaatttcactttgctaaagtgtaattaattttacctatgcattttatcctacaaaccataattacctatctcaatatggaaatatagccatgtggagcttttattctcatgcatcttttagttttcaaataaagaaaatggcaatagtactagtgtttagtgatcatagtaatatgccatgataattttattgcctcacccttgagccctctacagtctagatattttttattttattttttgatgcattgtgttaaaatttgggattaaaagaataaggttctattttaaaattaattggtataataagaggagtaactcatttatcttatatatgataatttatttccacacattagcaatataggactaacatctaatacactctcctcacgtttgggcctagaaagtgtggaccccgacactagaaactgacacacattgaccgaaaggtcctaaatggagagattaaggctcatctttttggaccggccgacgacactttgtgctcacaacggatcacaagagactcttttggaaatcaaatactcataagagtttagtttgactcttatgagtatttgatttcatcttaaaaccaattgacaatgagagaagtagttcattcatcttatatatgacaatttattttcacacattaacaatgtgagactaactctaatacattgggatgataattatttggattttcggagttggtgattgaaatatgaagaataaaataatatcacgggacatatgattatcaataaagaagatgcttattgagaaaacttgtatattaatttaagggtaaatagcggcataagtatactcaaaatttcaagtttgtatatgacataatctcaatgtttatttttagtggcataagtaccca

SEQ ID NO: 312059 - DNA, 1874 bp, Cannabis indica
tttaatggtctttctttaatttatcaacaaaagtcttgtatattataacaattttatttgtaagggttcgtctttaataaattgtgtagacccttattattatattcagccacaatatttcaaattttgagccccagagggaaaatctacaaattaaacctgactataaaatcagagggcatacttaatactactactaataattaacacattgcaacattttttttaagatggaacgacccaagggagttaaaaaggaaggggatagaggtcattgccattccaataccaagtgttatctaattctatagccatttgtgccaagttatgcctgcttgaattccctttcctccggatatggttaagggagacagcgggaaaagaagataacacttctcgcactgaatttacaatttctccatagctcgataagatactctcttgagtctgaatatcagagataagattcacgcaatctacttcaacttggtggataccaatatcactgtctttgcaccatcggagtgcttcaagtaaagcccatccttctgtagtttttggtggcatctgtccttggcggctcatagctgtggcagctatcacttgtcccaaagaatttcggactaaataatctcccattcctgtttttctcattttttcctgaaacagcaccatcaacatttagttttaagcatcatatagctggaggggaccatttcgttaccttctcatgactaggcttttgagactgcgtcgtgttatatttttgagattgttggtaaaaagccaagtattcttctgcctcctgttgaatcctgtttgggtttccaaactggttcctaaaaataaaagcattcctgctactccaacacttccaaagaatgcaagtaaaaaggttaaaagattcagatgaaaagtttgtctaaatatataaaagtatatctaatacatgtattcctcgtaactattcagagcatgtttaaagggcgtacctgagcacacctttttcatatccttacgatcaaacaaagcatgctggacagactcaaagtgtatgtgacaacgagaacaaatgggagagtggagacattttctgttataaagattctcagcagtaggaatggtgttgagacaaatgatagatgaaatgttttatcttagggggagtatgaaggccccagagggattttcaccaagatctaagagtgtcagaactggagggggagggctgggtagtgtaagtggaggcttttgcaacatgataactggattttaccgagtaatggcccgagggggtatgctgccagaaaaaagaatcattttggttattgtcaggagggggcagagaaaggatctcattgataatgtcatgtgggaagtatttatggagaagggggatgtttcaatcaccatttgagagaagcagatcagagacatgggtaaggtgacttgggagggaaatggggggaaaacgacaatttgggatccaatggtcatttagaatgttagtggtggccccattaccaattcttttacaaagaccaacttttaggagggattttccccaatgtaagctctgccagacataagaaggcgagtggcctaaagaagcttccaaaaaagtagaccgaggaaagtatttggacttgaaaaggttggcaaggagggaggattgattcgtttgaattctccatgcttgctttgcaagcatggttttgttgaaaggtttaagcgatctaaaccctaatcctcatatgctttttgaattgcaaagggatctcctatttttccaatgaagtttacgttatccatccctagctccccaccaaaaatttgccatttctttctcaacaaagtattggaaattattttac

SEQ ID NO: 312060 - DNA, 803 bp, Cannabis indica
tagaaaaacaaacaaatatattatctataaatactattaactattatttaatcagtttgtattaattgtatgtatatgtagacatatgatgttcatattcctataattatattcacttgatcaaccaaaaccaaagataaataggcgctacttaaatttaattttgttgtgatgttgtttgcttgtttaatttttttagtcaaaattgtctaaaggagttagcaactactcttgttaatttggagggttttcatcttttgttactgaattttgttgctgaaatgaaaatatgtgtgaaatgccatgatttgtgttttaattgtatgttgaatgaatgagttcattttgatgaatttgtgtgttgtaaaagcttcaattttgtggttttcctttagattattttgcatgagttttgggttgttaattgggatttaaggctattgaaattgaggtggattctttggagtttaagcttggatttctgagttttaagcttgaaggtttgaagctttgaagttcaagcttgaatttttgagtaattgtggcactttgtgatttttgatttggttttagtttctgttaattgggctatattccattaaagatttagacctaattgtgatgttgttattatttaatcgtgtggttgaacaagtttgagttcaagaactcaaagtgtaacaccctaactagcataggcgtattacgtgatttttaaacatactgtgcagctcgttgctaatcaacgaggtttatgaaaatcgtgattaattaaaatttttccttttaattaaacttataaa

SEQ ID NO: 312061 - DNA, 707 bp, Cannabis indica
atatatgtgtgtgtggttaaatgttagttattttttcgttttgatgttaaattgtttctattttcaacttgagttgtttctattttcagtgtgagtttttccatttttaatgggagatgtttctattttttatgatagttgagattaaatattagttgtttctattttttgaggttaagttgtttctattttttgaggttaagttgtttctattttttatgatatgtgtttctatttgtgcctgtggctaaatgctagtcattttcattttgagcttaaattatttttattattaatttgagttgttaattccatttttggcatatttaattgacaaaaatattttattatttaatgtatatttcggctggagtgtttaatatggtttccctatttgtgtatatctaaacttggaaggaaagttgtctagctttcctatttatggaaattgaggtaaatatgttaagttttgattacacatttattcttttctaaccagctgttaatctgatcttgtgttgagtttcccattttcttagatcaggtttcttgaagagaaaaccggagctaaactttccttttctataaaaggaaagttgtagttactgcccacgattctgtaggtacagaaacgaaaattcctagactgattgaagaattattttagggaagtttctcgtgggttgaggtcttgttcagaccgaatg

SEQ ID NO: 312062 - DNA, 619 bp, Cannabis indica
aaatgcacattaattaagaaatattttgacaactaaattagccaaaaaaggacctaacagatataatattgaaaaattgaatgaaataattattggtttagctaacattgatcataaaatagatgaagaaaatcaagcaatcatattactcaaattattgctgatggcagatccagaagttaaggcgggaattaagtatggcagggatgtgatctcgttggagggtgttcatgcagcattaaagtcaaaggactttgaattgcaacttgagaaggagactagaaaacaagaagcatatcttgaaaaatgaagaagtccaaagagaggatcatcaagaaacagccaaacaccattaagatcgaagttgaaactcaaagacaattgacaatgttactaatgtggaaaaattggtcacattaaaagattttgtagtcaattgaagaatcaacctgattccagaccaaactacgatgacaagagatgcaacaaaaactagaaccagtacttaatgtttagagaaattaaagataagaccctgcagctgttgctaagagtaatggagatagaagttcagatgcagagttattttctattttagaaaataataacaataaagagt

SEQ ID NO: 312063 - DNA, 1887 bp, Cannabis indica
tattttgaaaacagggggaccccatggttaataccaattatcttctatcatatagtctatgtgtcaaattattaattatcataatttaattacccacacttttgatataattatatagtatctaacgaagaattttataaaagcacacacgtggcgtccgtgttggacagggcgttacatctaggatcaactcagaccctaaccccagcctcagacctcagacctcagacccggacccatatcttgcccatggacctggaccggaacctaaacacgtagccatacccaaattcggatctagactcgaccaagacctatatgtattatttaagtatatattcttactcaggttgtatatattatttaagtattatttaagtatatattcttactcagattgtgactttatatgaaaaaataaaatagtttattatgaaataaattctacatctatatatgtattttttttttgtaattgatatttatctatgtacattttattctattattttatttctgatatcatctgtattaatctctccagctaggatttgtgatgtccaaggagcgttcgtgaggtgaatctaactttgatggagtctacattcacaatgctgactagacatattagaatttcatctgcacacttttcatatctgatcagacaaaatttcgccatttaaagaatttttgtaaagaaactaattaataattttctttatattcatacctttgatctcagttttggggtgtcaattatccctataaataacacctaaaccaacaacaaaagagtgaactcttccactccttaatttttttatatttatagaagagagtatttaaaaagtgtacatgatagtttttctgctattccttagtaagttcgtgttctttgtgattaattttgtgtgaagcaaattctcaaaaagaagaacataaagaataacctataggagaagattcatctaagtcttgcatcgggagaaagcaagcaccgctatctttgcgagaatatttctacaaacattgcatcgataggaaggaagcattcattaagtaatttgaagagagttcaactgttggtgttttaaggagattcattcagcaaatataagtacatcaagcttgcggcaaaattattaaagggggtctaagttttgtttaactcaattactttgtacttattgaaatttggctaatgaatcttatctctatgtgtggccctgtagaatagtagtaatctgcaatgattgttgagaccatatataaaatattgtttatcattttaatttctacaattttactttttacactattattttgacctatcaggttcagtttttttatggagaagatttctattcttcaaataattttataacagttctgcattgattaaattattagttattttcacttggtaattttaaaaaagggattttcaaaaaaaaaaaaaatcataatcactatttttttcaaaacacttaggttatgtttggttagtaggaatgaaatattggaataataataagaatgagaataaaaatagaaatagaatataataaaatttaatatacataaaaagaattattaaacattaactcatcttgcattaactcaaccctctagactagaaaaattagggctaagctccctaacctcatcaatacttttgctctgtactcctttcgtctactttagtttgttaagtgtcgaagttgactaccacaatgtacacaagtgtacacgtcgtgaaatttcattggtccacctaatattaataattttgatgaataaggtgaaaattcattgcacaaactcttatttacatcctataagcaataaaaaatggcctcaataatttctatacaatttatctacaaa

SEQ ID NO: 312064 - DNA, 3453 bp, Cannabis indica
atgtctgcgttcttgtataatcgcgcttatggacatcttataaagagctgatagaacctagacacgcgagtctatatcggtttatcaaagctgttgggtcattgggaccagctcgcattatagagagttgatgtccatgttttcgcaggaagatcgagaggatactcgcacatatcctggtacatgcaagttaaatccgttctttggtcctacataatgggagttacacgaatgcgattagactttggtcatatttgcatcgtctcgctgattctagctcatgcgaggtttaaactcgaggagtctccaatggacatcttagcttttcttggaaaaatgaatacatgtgtcctccaaacaggagtttggtctcgagtttttaagtgagagaaatctcactataacaatagcagtataggcctaagtctatcataaagcttgtgtactcttgatctggtagatgcatcttaatctgattggaacctgagtacacgtccatgaagcttaagacttcatggaaagttgtggcatcaacaaactggtcaattcttagaagcaaaaagtagtcctttagacatgctttgttaaggttggtgaagtcaatgcacactctccactttctatttggtttgggcagaagcctagggttggatacccaaagtggagagaatgcctcggttatgatgtcgtgggcttgtatcctctcgacttcatctctgagcacttaggcacgttctgtgcccaacaacttcctattctatagtataggttagatgttttgatcgatgttgagggcatgggtcatcatagaggggtctattcgcactaattttatttttggtgctaaacccttcttgatcttcagtcttctataagtccaaagttgtgtgtaggattcccaaagtgaggatctatgtctgcatactcgtttttggctggacttcattaacctttgttgggcccttcttcagagctcctaacgggcatcttctctttcttagctttgcataggaccaagttgtaataatgacgggcaaactgttggtctcccttcaaacatcctatatgccttgttgggaatttctggtagaggtagtagatggatgtcactgccttcaagttgtacaaggctggtcgacctaccatggtgttgaaagttgagggaacattgattatgacgaactgcaccatcagagttctggtcgttggagttactccaatagtgatcaagggcaatctaatgtaccccatgggaacaatgccttagccaaagaggccacacattacttgagtgcaaggtgacaagtcagtaagctggagccccatcttttcatagttaatttgaaaagaatgttggataaagccccgttgtctacgatgcatcttgccacagtcatcttaccgatctgtgtagtactgaccagggggtcattgtgcaagaattaacttgagcaccatctccttctgtgaaagagatagtgggctccccaagctttggttgcttggacccctttcttcgatggccaagatctcactttaaggctcgtgacagattgtctaagcgtagcgctcccaaactttgctggtctcgcctataatatggggtctgctaataatgacccctaagtgacccgccattggaggtggcatacggtctccattctaggcaccttgtggctgagttatgcagatggggattattcttccttattaggaattcaatctccctcttaaatttttgaaactcattggtgtcatggccgaagttattgtaaaattgacagaactttgacatgtccctcttgctcaactcctttttgatgggaggggtcttcttatatgggactgttccctgagtggccatgaagctggcctcaggtttctccgtcaagagggtgaagtaggtgtacttctcctccttgtcattttggtttcatggcatgggagaagttttgtacttctcattatttttactatttcttccaaaggtgttgttgttgcacttgcccttagtgtttttaccactagaggtttgggtagagttacaagtacctgcctgtgcgcttggaaaattatggggctacaggatgccctgtgactgtctattttcgacttgccctatctgggcttgttgaataatttcctccaacttgataaaaccaccgactctgtctaggaactgcttcatgttgttggtcgagatcctttggatatctttattgaagtcacttagtggaagaatgcccccagtatggctatatatcaacctttttcagttaggcctttgaccttggagggctcagccatgaacctttggatgtaatcctttaaaggttctccttgtcattgtttgactttgacaaggtcttcaagctaagatggtataagcgttgaggacgagaattatgtgtagaattcttaggaaatctcattccatgaattgaacctccatggagccagcttaaagtaccattactgagctatttctaacaaagttgccaagaatatccgacactacacataaccagtaattttttgtagatcgagttgcatctcaaaatatttgatgtgtgctagtgggtcttctcgcccctatatacatcttccatattgtcatcttaaacttggataaggtctaaagtttttggaccagctaggcccttgaccatatcccttatttggtccaactatgcttgtacagaaggatccgttactgtggggacttagctgactggccctccttagacagggtgtacacccaaatgtgccaaggtctggctggccataatttgggagagtgtatggtggaggccagccaaccttgagcttggttgctcgccttggtcggccattcccaggtagggagattggtcctagccagccaagcctatgttgggcaggtgttcatggccgaccaaccctatatagggtagggcctagctgctcgtaatccctcaattggttggtgcagccggtgtggtgataggggtaatgttatagtgagactcgagaccagacccctgtttagaggacacgtatactcagatttccaatgaaagctgagatgtccatgagggactcctcgaagttttaaacctcgcttaagatagaatcagcgagagacagcgagcatgaccaaagtctgatcgcattcgagacaagagagtagctcgcatatatcgaattatatgcgagtatcctccccgtgtccgtgtataaaccaggagaccgactttctataaatgcgagttggtcctaagaaccctgcagccttgataaaccaatatagacttgcatgtctaggttctatcagctcgtcatgcgatgtccacaaaaggcgactatctaaggacgcagacatcttaaacataatgataaacctgcgagtttaacatcggaatatgaacagtcaactcgcagattcggaagacgcatacgttgatgaacttagta

SEQ ID NO: 312065 - DNA, 1196 bp, Cannabis indica
atatatatatataaaaaactaaaaaaatttctaaaatatcaaaataaataaatagcataccaaaaaaactaatttaggaagtatactacaaatttttccaatataataataatgggaacgttgtccaactatatttactaaaattaaataatagacaaaaagattatcatttgtaaaatattaataccaatctctcataatttcatgtcatgcaaaaatttattttacattattacacgaatagtataaaaggcataagtattaatagatacataaaacaaagcactgaaatttcatattcataaatttactaaatttgtgatccaaaatgccttagattttgtataaatatataaatatgccaaaataatatttgagataagattatcccaaaaacacatcactatctaattccaaagtgaaagctgaaattggtaaagaatatttatatacatttagataatgggtttggtccacaaattctttttgagatgcctttgttattaggcaacaaatataataattaaaaaagaaaaaagaaagtagagtcgtcaatttcaatatatttatctaatataagttattatcattatatattgagacacaagtaaatcaatactagccacaaaaagtaaatgagttaagggtgtatactagactaaatttagtatttttgggtttatttagatatcatttaattatatattagatattaaattttactatctgatctcatttaattaatttaaatcatccaatcaatttaatattagatcgaatccatttaatattttaggtctaatatatattagatgaatttaatctggttaaataaatattagatcaaaaatattagatggatctgatctaatacagagatttatattcattggatggaaccaatctaatctaatgtttatcgaatcggtttgattcaattgagtatatagcattgaattggatcggttgaagaaattcaacatccaatgtataattagattggacctaaatggattggattacttaaagaaattcaacatccaaggaacaactcgaactgagagctaatgagaactgattaatttataatttatataattatgggtaaataccattttggaccctgtgttttgcaaaagttacaaattggaccctgtgttttgttaaatgacaaaatagaccctatattttctaaa

SEQ ID NO: 312066 - DNA, 1696 bp, Cannabis indica
atcagattgtaatgggttttatttagggcacaaaacccaacattatatacctcttgcattcactattgaagatgatggtgaaatgggaaatctggtttaaaattcaaaaaagaatattttgagagtctaaagtgatgaaaaaagaggaaatgggtttggaaaatccatttatactttgaccaagatcctcgcaatttgaaatggatggcccatatctcctcttccaaaaagcacaacatgattcgatggatgggaagttaaaaggttggcatttaaaactcactcctagcatttattcttcatcattacacgccttgagtattgtacgcattaatggagaggtcatggcaatcgtcttgtcatcattgcaacttctcccaagaaatgcgcccctagcacgcgcatgtggtacacatccatattgaaggtgttgcatgcgtgccactcttatggtgccttcaacttatttcctttacttgatgtagctcatatgatacatccgtgatcctaacaatcaccacgtgtcaaaaacttatcgcgaaagagaaggaagaagattgcaagctcctgaatctcaaagaatcctagaagcttagggggtcaatattatctgtgtttttgagcatgtggtacatgtcatataaagggattaacctcataatctcgctaatcaaaatcctcaattacaaccctatcacgaagaagcctcacaaattcaagaacaaataaagactaatggataagcgaaagtccacactaccttatcctagcttcccggacgcagaagcatattatctctcccagacccggagtgctccgaatatggaagtctgcccaactgatacccagatgggtactcaaagggcctattgcagatatcgactacccaagaatgtcttggacgtctacctttggtgcaacctagatcgcccagtgacggttataatttttgacacaagatcagatcttgttcgttgtgtccaggcatgctagtgtgcgcgtctcatccacctttttgccagacagttatatcagacctctacttttaaaggtgaaacctttgagtgacatgtgccctctacttttaaaggttaaacctttagatgacacgtgttcacaacgtacaaatggtccccaattgtccagctgcagcacacacgagcacaattatttccaaagggacccaatagtcagctctcttttgcatgtaatttatcccattagtgagcttttagcagaaaccctaggtaagtcatgggcatgtccatacccactcttagcctataactagccttctatttccatacgaaacctaaatagcaaaagttttgtcaatattactttaaatctttttcttcttcaacagaaactaaaggtacagagttagggcttcttgctaaatactgtaaacaaatcaaatacgccattaaaggctaatagactaactcataaattaaaattaattaatacctcaacgacataaaaaaaaaaaaatcttaatatctttatcactgtctataattgctcaacatcaaatgatgtattatgagctaaagcttgatgttttgaaatgacattagataaaatggtttcaaaaattataataaaacaggaattattataaactttgtctttagatatgcgaaatatgatatttgatagagattttttctattatagaccaaaaatagatgaa

SEQ ID NO: 312067 - DNA, 2051 bp, Cannabis indica
ttagcaagaagcatcttgtttgttattccaccatgaaggaactccatggttgagtgtatgtgacttggggtgactttatttaggaaattttcccatgaagcgtgcgagtcagagcaaaacacgttagaaacacttggattggtccatggggccagtcgttagtccaggaagtagccagactgatgcactcgtgtataagagccatcatttcgtgggattaaaggcccaatgaaggcttgaagcggggatgttaccggggtgacgtataaaagaacgtcaggaagagtagtggtatcactaaggtaaagaagattacctgaattacttaaggtgatacagtaatgatggagagtactttataattgattggatagtcaatatggtatataaggagaccattgaaattctgggaaaggattactttattaagaaattatagaaaggcatactcaccttgaatgagaaaaagcttataaactgagatgcaatttaatggacatgtaattgagtgattggtgaatgttggatcacaaagtagtttgtttactaaacaacaagctattagttgagtgtaaaataagttttagagtggttaactaagtatgaagatagtgatgattgcaagggagcaatggtggcgtatgaactagggagtaaaaccttagtggtaatgatgggaaaagtatatgttggtcttagatgttgatgaattagcatcactaacgggggactcactataagtttacatagtaattcatgctaagggattatcaataaaatagagactatacttcaggtatgtatatttctgcatgtgtttgaaaaattatcaagattattttaaaacatagaaaagaaacttcaagatcaaggaataatctttgattaattgttattagttgaaaatttggtaaatgggtatttccagtttagttgtgggtacctggtatgagcagtgttgcctctaccgtataggtttaatcaatttactttataatagtggttaaccgtaaatgattggaaaatttaaaagttgtgtcaattcaagggaaattgatacaagttaaaataagtggagatgaacaagatttaagttgacaataagatgggaattcctcaagtttaagtaaacaagactgatgaggaattgcaagaggttaatgaagtgagtgatgaaaactgaattttattaacaaaagaatgaaaacaagaaatacaattaggaacgacaaagaagcatctactttctgataaatcaccatgagcttaccttggagttaagaatacttaacttggggtgatctcaagatgggaaatcaaaccgagagtcatctcggaaagtgtacgagtgaggacaaagtacgttagaaagattcatattatgatgcagaattagtagtcgttccagagattatcaagtggaagggatgagttaataagtagagattgataaggtattgagatgagtatatagtagtggacggaaagaagaagtgctctaattgaatatctatcgttaacgaatacttaacttgttattaagttaagttagtagaccaatttaggaggtcccatgggaggaataaaaagacataattatgaattatggactatgggatcttatgatttcaaccaagtagttgtggttggacatactgagttaatatgttgtctaccattgcaaataatttatacgataaataaggatatcgaatttatacgaaggagtagtctaatgaaattccaagattgatatatttggctatgatgttaagactaaaagaaagttattgagaaccatggaggttaaagtaaaaataatatgatgttttattcttgaaaggttcgtaacctgagaagatcaatggaatattagaaacatgttgtgagcatatttgataaaggttaaattaaattagaataattacttttcctgacgaagtgtttgtctaaaagtgataattaaatgtactattggttaggtattttaataagtgtggtacgagaaaaatattagacacatgttcactggagtaagtaggccaggtagc

SEQ ID NO: 312068 - DNA, 588 bp, Cannabis indica
atatctaaaattgctcaatcacagtttaaattaaaaaattgctcaattaattttaaaataaatatcttataccaacattcaatatatataaaatacattctaaacattcaatatatataatacattctatatataataatttttattttttatttaatattttaaaaataaattaactaatttttaaacttatctatgtatcacaattatatatatatattacttttcaattaacttttaaatttatttatcacaactatatttattatttttgttcatcacttgtgtttctcttcgattttcttcaaggatccctactattatagtaaagactcggtttgaccgagttaaaaagaaaaaattatatatatgtatgataataaataaataaatatatatatatatatgtatataaaaaataaagtagagcccgcaaactccatcactggcgcgacttcagcgacccctctctagttaccgtccggccccacgcgccagaccattcaaacccctaggccccgacgacctcaacccccaaccagcatcgtgttgggttttatgtcctaaataaaactccattttaatgta

SEQ ID NO: 312069 - DNA, 2547 bp, Cannabis indica
ttctttttgtttttaaaattttgatttctaattataaaattgaaaagttaaaaacagttttatagaacatgtttttgaaaaatattttcatttttctacttttaaaaacagaaaactaattaaaaaagtgttaccaaacgccaccttgacatctctattggggatctaaataattttattttatttttactgaatactttgaatatattaaaacatactattctagaataaaatgagcgaaacaaaacaaaacaagtctagattgccataagagaggccaactcctcgaggaaaataaaaccagaaaaagaatgattagaagcctacttagaaagattatgagcaagtacattacgtgaacaaggaactcacaaaatatccacctccgagagaagatccacaacttccaaaaaaactccgacaagcgccaatccggagcttctcaatcatggataccaaggattggcaatccaaggcaatcaccacatgggaccaaccacgagtactacagagattaatcgcatgaaacaaggcccaagtctccgtttctaacaggttactcgcctcaattctgattgtcagcgcctcaatcgactcctttaccccctctgtgatcacgattctcgttgtagaacggaagtccttgcaagctacatcaacaaatataaccaaactaccatggttcaatcgttgttcatccacaaacttggccatctgcaagttagagcttggggactcttaagctgcaacaagagagttacaggcagcatcaactctggctaaaataccagtacaagtaggcctcaactgagtggaaatagttgctggtaattggaggtcctaagtcacaattctagactaaccaatcagtgttgccctaacacttttggggacttaaattcaaaactaaaagtttctctatcgatatatgtcatggagataccctaagtattgagaaaacactcaatcagggtcccatgaaaagtctcaaaatagacattccgttttaaaagcggacccccaaattttgcctaaatcggacgattcgaaactcgactgcctgatttaaaacttgcataactcattcaattctaagccaaacattaccaaatttttcaaggtacctaaaaaaatcataattaacatttttcataaagaatcaaattaaatggtcgtcctaaaactgcctaaatcggacggtctgaaaccttcatatccgagtttggaaatctcatagctcatccaatcttgagctaaatcttaccaaattttgcaaagcacctataaacgtcataatgaaaatttttcctgaagaaacctaacccaattcacaacaaaattcaagttatcacaactaagtcaagtttgagttcttgcataacttttgctacaatcactctttgctacaaccactcaaacctgcataacttttgctacaaccactcaaaccacttctaaacagtcctaaataaccttaataagcttttctaaccttcctaaacttcctcaatatgtcctactataaacagcaactgataactaacaaaaaccctaaaaaccataaaaatgagttagggtttaccttggattacatggagatgctaggggctgaataccttgatgaattccaactatgaaggggcttgaaaatggtgcaaaatgttgggttttgctctggttttggcaggcacaaaaagagggagaagagaaggtaaattttgactttttctttcttcctttgaatatagttttggttttggttttccttttgcttttgtttttcctttttgttttctcctcaagctgctggtcaccaataaatggtgagtcacaaccctaaaaaacttcaaaaaaaaaaggtgactaatcacttagggcaaaaagactaaaatgcccttacttccccacaaagttatctcgtaaccctaggggtaaaatggtccaattctgttatttcattaaatcttgatattctaagatatctaatattactgtcccataaaatacttattgtatccatgtgactaaaattgccatccgacccatttctactgttaccgggcgtaaaaatataaaaaaaatataaaaattcacatatagcatgcatatcacacctataattcaataaaatctctataattgagaaataataatcataacacatattttcatgaagatatgatctataaagcataaaatacataaataattacataatcagattaattagtgctaaatgtcccactaatctcatgtctaagtataacaatcatcacaccttgtattccagagatcgtcacacaaacaaataccaaaccttgtgaaggcacctctctcagctatgctaggcccccttcagaaatttggatcaagtagccacgcgatgttgtgccaaaatgtgatgcaaatatatcacataacaaagtagaatttacaaagaatatgagaaaaaagttaagtttttacttttacatggcatattttttagggaaatttgattttatatacttaaaaactaaaaaatttattcttaaaccaaaacctttt

SEQ ID NO: 312070 - DNA, 676 bp, Cannabis indica
ggggttgaggcgtttgggtccgtagagggtcagggtttttagggttgtgggttttgggaaaatggacgagacgagggtcggagcacagtactcctaatccgtccgttagtgtcgcacaagtaaagagaaagagagagattaatgagagaggaagagagagagagagagaaatgatgattttggttttagggttttcaattaaagaaaaaagaaaaaataattttttttatatttttaattattttattaatatttatattattaatattaagtgaactaatgaaaattttccacgtgtacacttaagtactttgtgacagtccactttggtacttaaaagactaaaatagatggaagaactacagagcaaaataattctcgaatctagagagtataaccataatttttgagtgagggaattaaactgtaataaacataaaagtatagaaaatttggctgcaaattatcttttttttaatgaaaatagtgatttggtactctttacgttttgagagtccaatcaatcaatatcaatatatatatatataaaggaaagcattaaggagttgaggtggcaatttgtatgagtttttcaccctcttccttgatttctcaattttctcatttatttataattttttttatatattatcaaataattaatgtgtcttttcat

SEQ ID NO: 312071 - DNA, 2389 bp, Cannabis indica
aaaaaaaaaagaaaagaaaagtctaatcgtggacaaaacattcttttttttgaaacctagattctcatcaactcattttagttttttaggctatttaataaaaatacagttatgccaacaatcaataacaccattagactgcacaaatagctacaattaagatacaaaatttacactgtcaacatccaaagcttataagtttattaaacattgagaactgaaatacccacatacaatggcattcatgcagcactgaaatacccacatttatcatagttgacaaaactgattagtatattattttttaaagaaaataaaatataataatttcctattctaacttataatatataactattatttgaagtaatcatcaaatgaaagaaatgtctcttgattcattttaagctatacgatatatagttattgaaacaagtaattgtacctactcaataatgcagccattgaataagtgactttgcacaagtagctggccctataattattttcaaactacatatatacattatacacacaagtagtgtccatttgccaaattactaagggccttaaataaactatccaaagattataatactcttgttcacagacctttaataaaagattttctcctctgtgatcaatctattttgttgacaatataaaccaaaatcttctttttcacattttgcttccttgctctttagactttagatctctcttctgttagagagtgaaaatcacatgaaataaaaagagctttattattattattaaactaaagtattgcagaacttgcaattgtcaaactaaagtattcgattttgggattcattttaaacaaggatatatgcagagtatacttaattaattagacatttgaattgagatataaatacatacatgtaagtatgtagtgatcatataaatacatatatatatacatatactatatgcatttgaagtgaagaatataggtaacatgtcttgcaaattaccctgtcccccttagattcttaagggaatttctgacctaccataccaaacttcaagtatgggagagatatattgtgtccttgtaatctatttctttttattttgcaattttttcaatcaataaaaaaaaaaaaacaattaaatcacaagctgaatacaattaaactgtacaaaaccacaatggcaaacacaaaccgccatagctctcacaaaaactaattacatattaaattctctataaatcttctttccagtgtgggaaaatttctttcttttataaagtataatatgtgtattgctactttaactcttctcaagatcaataaacacaaaccatttgaaagatcacaaatataaagaacttgacaaatacatattgtgagaataaagccatttatacagaaccaccataatcaatgagtcgaaagatattaataacgtttagtaaaataactaagagaatgcattaaatatcaacaagcaaatcattttcacacatcaaagaaggaaagggatagagatagaaagagagaaaagacacagaaaactgaagcgaggtagtaagggaaccaaccacaatacaagaccaattaaggcaagccaccaccaaaagttggcatccatgaatgttggaagtgggcattaatgatgcgaaaagaaagaagaaggaaaaaaaattaaactcatcaaagctctagccattataaacagagagaagcttcaaaatactagaaatgagagaaaacaggcaagatttggcttgacaattttttattacaatatcacaagcacaaaaaaatggagtgcataaaccacgaatcaccatgacccaattctgaaatagcaggaataaaatggcaaacaaacaataagagaatacaaaaactcccaaaacccaaaatcaaaaatcgaagaacagagcacgaggaaaactttttatgtaaaaaaaaatacatacccattatagctctgaagattcactaagaagaatcatgttttgtctaaaagagtttttttttggttctatcaaacaaatgaagaggatgtcgggtggtaagcttaagcgtctccctttatatgcgcgtatacatacataaaatataggcacatacaccacaatggagaacacattgtacatccaaaatcacacaaaataaaacaataacattgcacattcaaaatcacacaaaacaaaacaatcacatttcacattcaaaatcacacaaaataaaaaaaaaaaatacttgaatttcattcttaataacataacgattgaacctaaaacctaaaatcaaatttaaaatcttaccttgctcgttgtggcatgctgccccatggcacacccacaatagggccattttgtaacatgagcatgccttggtgcttgatcatt

SEQ ID NO: 312072 - DNA, 763 bp, Cannabis indica
ggttggaccaatagcgatattgacatataggagagtgctaggtaccactagtgccctttagcatttctctataattacttaataattttttacatcattcattaaaattatattacggggcaccgatgtccctagcataactatagagtgacattttataattgattaacggttttctataattattattaaagtaaaataatatgatatgatattaaattatactcaataacgatattaagtattaaataccataggtgccctttaatatttctctttattatattaaagagtattcttattgggcactagtggtacccaacatcttctacaggtgacgcttcacgactggttaatgatatttcttgaaagttaatttcttgagtaatatgagacccaatacttaataacattaataacaatatgataccgaagaaggtgctagatactaatagtgacttttagctattctttatattaaaatatgtggtagccaatattaaaaaaaaaatcatcaataacatcaataaaagtgtattgaaagtgttttggaccgagaattaagaaagcgaaatgctataatgcactaatagtgtactgtactagtacttttcaatgggagatgtaaaagttgagttatatattgtacaaaaagtagtttaatttgtgatacttttatatcaacttttaatattgtgctccaatgaataattttaaatcttgatgtaaaatttaatatgttatttaatgcctatttaataat

SEQ ID NO: 312073 - DNA, 1344 bp, Cannabis indica
attaagtgttctaaaaagtaaatttaaataactattgcatttagatttttagaaagaaaaaaaaagaagaaaaagaagacaatagtgtaaagacaaaaaatgagtaaaaatattactagttaggttctactattactatcacatttgttcaactttattactattagatcaacaattaagagctaaaaaagtatccctaccataggaacaaaactaatgtctctaccataaacataaatatttcctatatatatgtttgagagaactatttgttttcaataatctttccttttaggacttacctaaactctagtctattttcaatcatgaaactactaataacataatcaagggagataaaccccaaggtcagggtaggaataggtaaatttagactaaagagtcaaatgatttattctctattaagtgagcctatctgggccagaccttaaatcgtgctcctccttgcattgttactcctactatgtggaataaaattcggaattcgaaaattttggagcatcacaagattttttggtggagcattctctctaacgccctacctattctctccattctagctaaaagattgcatatggaggaagtttcctgtccgatttgtggagagggagaaaaaacgatggaacccgtttttttattaaaactttgccttttacctttggagatctttctcatgggatatttttccagttttagaatctggagcccgtgtgtggaattgagttaaatttctttaaaatctaaaggctagaggtgtggacggtcaggagttgttcttgtatgcttcaattgtagtcgacacgatatggaaagcccgtaatgataagatccacaatcattctatgtgtaatattaaacaatatattgactttttctatatatgttacacatattatggttcttgtttgtttgtttccccaatgacaattgacaactaagtctcctacttggtccccttctttggaagaccaggtcaaaatcaaacgtgatattaaagttggttgcagttcgatgtgtgtgatggctttggctaaggatcataaggagacaattttgtaagcggcttccaaagtgctcaatttctctgaccctctaattggagaatttgtggcatgtctgttagctgtggaatcgacagtctcaaagaagcataattttgtgttgattgagagtgactctgagaaggttatcaatacgctcctattggggtattggtaactatgagattcaatgtaaacaactctcaaatcttttgttaagttgtagttttacttttatttctagacaatgtaattttacggcccataatgtgattaagtgggc

SEQ ID NO: 312074 - DNA, 1246 bp, Cannabis indica
gcacaaaacccaacacagtctttgtaactttttgtacaagattgtaggaaatatttttgcgaatagactaaggccatttatggagcaattaatctccctggttcaatcaacatttatggctgatagatggatagcagaatcgtctatcttaacgtaagagattatccacaagattaacaagaagagaggtaaaggtggtttgatggctatcaaattatatattcacaaagcctatgatagattagaatggactttccttcaaagggtcttaagagaaaatggattcaatgaaagagcttgtaagttgattatggtatgtgtctcttcagtttcatactctgtccctcttaatggctgacctctaaagaaatttcagcctaaatgaggtttgagacaaggagattccatgtcttcattcttatttttgttatgtcgagaagtgctttctaagattattagtagggaaggagctagagcaagagagatcccatgtctcctttcttatttttgttatgtcatgaagtgcttttgaagcttattagtagggaagatacatgggatcaagatagcaaggaatgcccctatttattatctcatatttgctgatgataccatcttcttcgtaagagctaatgaaaatgaagccaaagtttttcttgatttcttaaagaagtatgaagaatggccaggccaattatgtagcaaatcaaaatcaagcgttttgatttctaagaacctgtgccatgcaagaagagaaattctccttcaaactctacaggtgcaagctgttttaggtgacgaggaatcttcaaaggaaggaagagagaggaatacaatgctcttaaggataaaataaaagcaaaacttgaagggtggaggtcaagtcttctttcctatgcgaggaggatgacattaattaaatctatttctttgagcatgtcagtctatgctatggccactcagaaggttcctcatatagtttgtagagagaaagatgcaattattagaaaattctggtggaatggaaacaaagatatagatagattttggccttgaagtcttgggaacagttgtgtcagccaaaggcttcaggtggattgggttttcgatgttttgaagatattaatagagtaatgttggctaagcttgcgtggagtttggcaagtgttgttgctaaaccatggacaaactgtattgtaacgtccccgcttcaagcctccattaggtccttacacccacagaatga

SEQ ID NO: 312075 - DNA, 537 bp, Cannabis indica
gcacctaaatttccctttaaaaataaaatactttgcgtatagagcttccacatccacattacccacaaacaagaaccttgaccatagaaaaatcgcccattcccttttgtgcatccgttgtggtagagatgtagaattgatttgacatgccttgttcttttgcaagagtgttagaagaatttggaaaggtataattctctatccttatttatattattcaaatactattttctttcatgaaattatttttaatatattttctaacacgagcaaagaggatgtgaaaattttttctatgtatagctttggttttttttggcataacaggaacaaggagaccaagaatcagaccccggatcaagtccatgctatcctcaagcttgctgacaacttcttggtcgatttcaaagcagttgctactacccaaagttcatcactaccaactgccaagcttgctgccacagtcacttggacacctccaccacaaggtctctcaaagctcaatacagatgcatccactgttggatatattttacc

SEQ ID NO: 312076 - DNA, 614 bp, Cannabis indica
catgtctcatattttctagtactaaaacaaaaaacagtactagacatttgaaagaaacttatcttcatcttcatcaagaactcaaatgcttgaaacttgaatacaaaacaaattcttagtatgatgatgatgttgagttaagatcaagtttgttccatatgttttaaatcccttcttctattgtttcttcaagaattatacatttcattttgttttcttgatatccaagagacaccgaaaatgcttgcactatcaactcattcatctttaaattcaaagaactcattctgtccatcaagttttcatcaagataagatccatatgatatgtattcatcatttgtcataaccacattcatctcaggataaccaaaaacaacttcaacacacaaaatttctttgacttttagacaatttgttatcgaaaatatatttagcaatggggtatttagtacaggttcgagttcctttcctaatagcaatcggaaggttgagatctgattcagggacggacccattaagattgatgtaagggctgttgtgacagtcagtagtcccgtgatccgtaaaggaaaataccgggtaagttgtgcaatcccacatcgcctggggaag

SEQ ID NO: 312077 - DNA, 1433 bp, Cannabis indica
aagtgcgaggtgtccgacaaaagcgtcgcaaaatggaccccgcgaggtaccaagcgttgatagaggaagtagatcaccttttggcatgtggcttcataagggagtcattctacccaaactggttagcaaatcccgtactagtgcccaagcctaatggctcatggcacacatgtgttgatttcactgatttaaataaagcttgtccaaaggatagttttcccctacctagcattgaccaacttgtcgatgctaccgctggtcatgaacttctcagtttcatggatgcatattcgggatataaccaaattccaatgtatgaaccagaccaagaacatacctcttttattacagattgaggtctgtattgttacaaggtaatgcctttcgatttgataaataaaggagtgacgtatcaaaggctagtaaacatgatgttcgcggatctaatcggcgagactatggaagtatatgttgacgacatgctcgtaaagtctcaacatgcgaaggaccatgtcacccacctacaagaaatgttccagatactgcgacgattcaaaatgcgactcaaccctctcaaatgagtctttggagttggatgaggaaaattccttagctttatggtgaactagcgagggattgaagctaaccctacgaaaatcaaagccttggtggaaatgcgatctctgaccaaaccaaaagaggtccaaagccttaaagggaaagtcgcagctttaaatcgctttatatcacgttcctctgacaaatgcaaataattttttcaaattttaaaaggaaataagaagtttcaatggactgagaagtgcgaagaagcttttcaggccctcaaatcgcatttggggcagtcttcaattctttctaaaccgatgcgtagagaagtcttatccatctacctcgcggtgtctgaatatgcgattagttcggtactaatccgcgaggaccaagggaggcaatacctagtgtacaatttcagcaagcatcttttagacactgagactcgttatccacagatggagaaattggcatttgcactggtaatagcgtcgagaaaattgcgaccttacttccaggcccataccattgtagttttaacaaactatcttttgaggtaagttttagcgaaaccagaggcctcgggtagattgttgaaatggtcagtggagctaagctagttcgacatcaaatataaacctaaattcctgattaagggacaagcccttacaaatttcatactcgaatttccaagtagcaaagtggaaattatcgaagagcggattgatcctgacataccgagcaatgaaggatggaccttatatgttgattgaacatccaatagggaaggctcaggggtggtataatactcataagccccagtaattttaaggtacatgttgcacttagatttgaattttctg

SEQ ID NO: 312078 - DNA, 641 bp, Cannabis indica
tgactctgagattgagtctgatggtcttcggtttccactatatctgcccagttcagatcctcttcattccctttcccatcgcctaggtcagactttgctacctccaagtttgcttctccttcttccacaatcgcatctgcaacaacaacttcttcaagaacagtacaaacctcagccggtcggctttcctcctcacttctagtgccatattccacactcatctctcggattacaggctttcggatccctcggcgcctcttcgccatggaaggaagctggagagaacacacaggcctccctctaccctattaatgttattaattccattccattttatactataccaatcatcacaattcttattcagttattgattccatagtttttaccaaacaaaagaatagaaattccattccattctattcctatttctattaccattggcattcttattccatttttatcttgtaaccaaacgccaccttacttctttgtcttgcaagttacaaggatatttccgccccattcaaaacaaaaaaagaaaaagggagattatatttacacccctcaaacttataactacaccccattactaagtttaccccaattaaatattgtttttataatcacaccccatcaca

SEQ ID NO: 312079 - DNA, 3938 bp, Cannabis indica
aaaaagaaaaaaactaagaaacagtaaaattaactggaaacaaacagaaaacgtaaaggaaaaccaaagaaagacaaacttacaggccgggtgaaagctcgctgacgagctccattggcggcaaagttacgaggagcagcggtaggcaagcgtccgcggcgaagcccccgaggatcccgaaggcggtcggtaatctgaaaatgttcggagaaaatcaaagaaagaaaacagtggagtacaatatacatagagaaatgaaagaaagaaaatcagacctcgcgttgctggcgctgaagttcatcgatctccttgcgaagatcgtcttctgatttctccgcgaaagaggttgccatggattaaatggcgtatgggagtggtgttgagagtgacaaaacccttcgagaattttcttctgaatgaattgaatgccctatttcttcttcttcttcacttaagttggcggtgttcgccccaagaaacttcataaataccctttcactatttcaattttggataaataccactaaccatgtcacaaacacaaaatatactaatttaaaaaaaaaaaataagaagtaatttgtgattgaactatctatgcctttggatttagtattgatgatctcatttttagtcaaagaggtagagtccataaaatgacgatatgaggtttgaattatgaaaataataaagaattataaacgaaacaagatttatagaggttcggcccctgaaatggtaatgacttactcccctttcagttgtatttatttaaaagataacaagatcacatgaatctagtcaagtgagtttcttgttatctctagaagttataagtaatttggcgacgtaatagctatcttgagaatgcaaaattcaatccctgaatagtgaatattatgtactaatttatagggaaaaagatgtagcatctttacatttaattactgtcaacccggaaagtaatcttggtgatgtgaacatcaatgtgtgacaagtgccaagaaagaaaacatcctggaattagtagtcctgggtcatagcagtcgacctgggagggatccctagccttgtgcccaagttgactttggggttccaactcactatcttttagtattctatactgtgaagatatgaagaatccaagtccaaggcctgaaagctgaacatacatgaaacagcacccgaaagtcaactcgagcgcttagggtttcttctagtgctcaagttgacattccaactagagttttagtttccaggtccatctttgtgcaaatgtgtcaaactttgtactaggacatgaagtagacatgtcacaaacatatgtgagacatcaaaataagatttggagcactttcatttttaagcacccggagcaccaggtgccttaggcacctagcgcccaagttgatattttgtcaacctggggcgcttctaagcatcaaattgaagaattatctcatgcattctattcgtcttcatgaaaaacaaggaaacaaatatgttcagggaagaaatagactgacttggaggctagaaagaggacacagtgcccaggttgacattttgtcaaccttggccaattccaaaaagtttttttaatactaagtgtttttcaggaatcaaatggaaccatctggtggcctaaaactggacttagcgcccaggttgatattttgtcaacctaggctgtttccaattatgtttttgaaaaagtcttccaagaatttttttctgtcattagaaataatgaagatataattaaatcgaggaaaaatgagaatcatgaggggtagaaaactgagtctatcgccaaggtttacaattaacctagtgcactggcatctatcatccaaatgcaaattatgttgtgagcattctctctgacatggtgaaaaacggggtaggagacctcgtcctcgattcaagaaccttagaagtatcaaaaaggcttcccaaaagctccaaagagagcacccaacgaccaggctgacaagtgacctagtgcactgggttttgctaatccgattctaattccgtctaaagcgttcgtctagtttttcatggtagacaagagctatgaactcaaacaagtcaaattcataacttcatattttactttttcggcaaagtgactaagtcgtgaatcagacagttttgagtctcccaattccgtgaaacagcagcatctccgagaattggtgaatgacttcaccaaaacataaaaactagctaagtgatgtcaaaatattacgtaggcatcaaaaagtacatctttaacacgttttcccttggcccaacgaccaggtggacgtcatatgtcaacctggtcactagatgtcaacctagttgttagtcccagaacaaccttcaataaaacaaccataactcactcaatattgatatgattgacacaattcaacttgcatttcgaagttatttcaatgatctttcaagtcatgtgccacactccaatctcaattatgaagttatcaatgccaaattttttcctcaagagagttacaaatttaagttacaactaacccaaaatgggtcccgcggatgcaactcaagctctgaaaattaacgaccgacctccggagtcaatttcaccgttagattatcatcaatgataaaaaatatcctaaatgtatttttccatatttttgggaatatttattattattttaataggacatctttccttataaaaggaaagctcctctagtccatttttcacattcaaaaaagtaccaataaggtcagagcatctctctctaaaaagtagagtttgcagacttagctatttttttgtattcaatctcgtgagaataaaaactctcgtgagaataaaaactacaaagtagacgtagctccattactgtcgtgacatagttacatctaactttcatctcgtttatacatacaagcgagttggctagatttctgcgtcatgattttggtactttcattgagagccacaactcaagaagtcacttacaagatggttgcaactttatccacaagtgtggaaagaaccatacctactggccagcagactgggggcatgccagtagctagaactagtgatgggactacacttacatctcaagtgctaggtggaggcctcagaacttgctctgcagcttgtcccccaaggccaccaactgctactggtactgagatcagtcaacatattccacctgggaaccacgtgtggagttaaaagaccctgaggaggtagatcattaggttgaacaacttagccaaagaatgggtgacctataacaacagatacgagattctctcgacaaacaacatgaacagtttcaaaactggttcatgaagaattagaggattgttgagaatcagcacactgagcaagagcagcaaagggctaacctgtctcaacaaattagggaagcttatcgctccaatcgcagaacaactatcctaagaagagtttccaagctagcaagagagatattccatcagccaattggccacgtgggaactagcactcagggggaaactctcaatgcacgaaacacttttaccatgcccggtagtcgtgcaaacactcaacgtacaataggactgaggctcttcaaagggaagcaaactttgagtaagagtctgaaaggactcaagctcgagcgcgccaaccaataggtcttcccataatgttgagtgaccacgtgatattgagagaaccaatcgatctcctccataaggttctcctcatcgttcaaataatactaggccttgtgaccttgtaaaagggaagggacttgcgactgacactgagggagaaagattggactatacttctatcttgaaggttataaaatttgaagagtaaggactaacgagccacgtcatgttggaaatattttaccaggatctagatttactaccatgtatgtttcattaacatc

SEQ ID NO: 312080 - DNA, 1775 bp, Cannabis indica
ttcttggtggacgccatgcatcatcggcctcttattagccttccgatgccagcacccaagacccttactccaaccagagttgtgccttttggtgagggtggttcaggcatgacacctccttttgtgccatggaacccttcttgggagcagacatgtgcctctcattatacgggggcggtctaatagttcctgtcctaatatttaagggaggattgggatggcatacgggggttcccccactaggcttgtgcgagcaactcttccgctcctctgtttgggtgagttttctttcttccatcctttcctttgttattattttatttattttttttgtttgaccatacttcatgcagatggtcgtcgcgtctcaagaggtggtctcacaaggtggggcctcacggttttccttaacctattacgcactcctaggtgagttggaatctgttaaaggggaaagggacaggctatccaccctagtgtcctcccacgatgtctgcatccgagaattagagggtaatctcgcagcggaaggaggcccaagagcagacagtcgcagaccttgctgcctatggtgactataaggtgacatttaacctgtcccttgacaaagttacgagggagcgagacaacgcccattcccagcttgttgacatccgtgcacagcttgtcgcggatgcggccgagaaggacaaagcaacacgctagatgaagagcgcccacaagaacaagaagaacctcgagcactaggtaggcgaactctagtcttgtgttcaggaattgagggaagaactaaaggcagccagccaaaggtcagctgagcacgatggtgccatggtagaccaggctctgtacaacgtttggcgtattaatcctaacactgattttagctctttcggtcctgaagcagttcagtaggtcgctgaatggagagcccactttgaccagtctaggggcagttactgagttgatctccgcttttccactaccatatattttgttggtgacaccctctagttatgttagtatgggtgtctgttataatttttgataactgtactgaacttatttattttcactgctcttcattttttttttggattggtggctaatatcttaccggggggcgtttcccaatccccccgctagtggattttactcattgttcctggttattggatctcaccacttttggatttttaactttactgcgtggtttttcttctctttcttttgttgttcacgagggagatgatggttctatgaaccgactcgacctcttacatgtgtttattatttttaagggagataattgttctgtgaaccgactcgaccttttacgcatgttcattatttatgtactttagagagtatgcggcatgcctttactaggttcttttttttctcagattggtggaagtagctactgttggaaattattttaccaggaccttagatctactcacaagtatgtcgattaacaccctaaatatgaactttctaaaacgatgaaataaacacatataaagtttaggaaaccttcaattgggtgcagcggaattaaatgactccttccgttcaggtctctaacccttgtatcctttctgtagcagagtattatcaagatcttaacctggatctctttccctgaatctttgatgctgaaactcctttgctgatgatatttcttcacgatcttcctcactatgattgagatattgcttcctgtgtgtgggcactactctaatcactaaggtgtttcaaaattatcaaggaag

SEQ ID NO: 312081 - DNA, 1027 bp, Cannabis indica
aagtacaatagcgatggtagtttgaacggctcaaagctcgcttagatgcacaaggatatactcaacaagaaggattagacttctttgatactttctcacctgtggcaaagatggttactttcaaactcttattggctattgttactattaaacaacggcatactttacaactagacattaataatgctttccccaatggagatttggaagaagaagtttacatgcaaatcccgcaaggtctcacccttcctccaaatatcacgggcaccaaccttgtatgtaaacttcacaaatctatcttatgtcttcgtcaatcttcaaggcaatggtataagaagctcaccgatgctcttttgtaagaaggattcacccaatcactagcggattacactctttttactcgaggaacacacaacaactttgttgtacttttagtctatgtccacgatataatacttgcaagaccaaactgacagcttctacaccatttgcaagatgctctacaagcaagattcaaacttaagactctcggccccctcaagtattttctcagttttaagattgcaagagccaactccaacctctttctctctcaacgcaagtatacacttcaattacttcaagacacggggtatactgacagtaaaccggccaaagcaccaatggatcctcgttcacgtctcaatgatcaagatggcgacctccttcacaacccttcacactatagacaagttattggacgtctcctgtacttaactttgtctcggctagatatcactttcgctgtcaacactctcagccagtttatgtcctcaccatgaacacctcatttgacggctttgcatcaccttctccgctacctcaaagtctcaccaggacaaggcatcttatattcatctacatcctctcttcacctacgcagcttctccgactctgattgggatacttgtccaatgacacgtcgatccactactggtttttgtatctttattggtgactgccttatctcttggaagactaagaaaca

SEQ ID NO: 312082 - DNA, 858 bp, Cannabis indica
gggtgactagggaaaaattgattttatagggaaggttagaaaggctcaaacgtccaaagatggcctaaatcatttctaagggacaagtctaactaggatttagcttcaaggagatgaactaactaattttaaatgttaaaagtatatatatgtagcaatcgtatgagaaatgcaaagcatggtgggaaaataaaagtataaactagtgaggagagactaaagagaaacatccagaacatccaacaattcagcatgaaaaggcaacaaataaaattaggcaacaacaataatggaatgagcgaaaaatataatcatcgagcagaacactaggccacagaaaaaaaaactcataaatctttgaatgtcaaactaacaaccacataaacgacataaaattaaagttccaacaacaaaagataatacacaagtagcacaatacaaaataaaaatgacacataacagaaaaatagaaattagcttaggtattagaaaactccctctactctgagtcctcgtggggctcctccatagtcgaagctgatggtccaccccacgggtcgagaacttgctaagggaacggcaggaacttgggctcaaattgtggcgtcaccctcctaaattcacgctccataactgcgttgcgcttccgctcatattcccacatagagtgcaaacggccacacattttctgatatgtttgctgccaaatatcattgctatagcaattgaacataacttttccaccccaaacttagttctttgcccaatttgaaatttcttcacttccacaaccttcttcacgtgaccttctgcacagaaaaaaaaaattctcaaattcaccatgacatttatttaaac

SEQ ID NO: 312083 - DNA, 1061 bp, Cannabis indica
tttttatttttattttttttaggatttcatttaagtcaagtgcgggtccgagtccagagtcggggttccggttcgggtcccgagccggggtcctagtctgggtcgaggttagtctggagtcggggtctacatctgggactggggttggggtccaagtttgggtcccgaaccagtgtttgactttgggtctggggtctgaatcctaggtcgggttcggggttcaggtcttgatcctagtttgaatctggggccagctagtagggatgcacatggggtggaaaattagcaggaagtgctccccctgaccccatcctcgttaaggattttaatcccttttcctgcttattccccatctgagatggggcgagaaatcccctaatgggggcgggaacgggacagtgaatcccttaataagaaaataatttttttaataaaaaaataaatatataaaaatatttaactatatgaaaatcaaaatattacacatttaataatattcaatatactaattattatctaaaacataacttaaaattcataaaaagatactaatatactaaaaaaaaaaatcatacataaattataaaatattaaacgtgtctccgtcggggcagggagtgtcatccccgtcccctgtttaacattcggggacaaaataatccccgtccccaccttgttccccatttagaaggggaattctcgcaccattaggggtgggtcccgcggagcccatccccatagaggaaatgtgcatctctagggccaaggtttgagttcgagtccgagtccaagaatcccggtccaggtcagggtcgccactagggtctgggtttggggtcaggtctgggttcgacatcgaaggttcaagatcagggtccggggtcctggtttggttccttgtcgcgttttgaggtttgggttcgggtccctgtatgggtcgggcaggcccggccctgaaatgtagtgggctatagggtaaaaattattttttggccccttatttagaaaaaaaatggtatttttcaaaatcagcaaaaaaattgtgtaattttaaaagggca

SEQ ID NO: 312084 - DNA, 971 bp, Cannabis indica
ttattttattttattttttggttcatttttattttaagtgtttgggtggattttacacttggtttgttgtttcaggtggttttggaacacaatttagagccttgaaggtgatttggaagtttagagattttgctaaatttttgatggaattttgctgcagcatttctgtgaagcacaaaaggaattttggttcatgtggagaacctccgcctgctgcagcatttttctagcaaaattttagcaaaagtgatacatgttcaaagagcgctcaacaagattttttgctgaacttttgtggaaattttgctacagcaagcgtaatatcactcacattacgagatgaaaggtccatatattacatattactcctattttacttatatatatattattactattattattaaaaaaaaaagaaaaaaaagaattttttttatatatattaatattatttttattttaatatatcctattattacataaaaaaaaattaaatttcaaacaatttttcctaccctacctgactttccccccagccccatcatctccttcaacctccatcaccactgcttgaagaaaaaccccattcagccgaacccaaccccagaacccgtttgcctccgccctccattgcaccttcgaaccccaacccagaaaaccaacccccttcttcctcgaccagccaccgtccgacctccccatcgccccctgcttcgatttgctcagacccgcacctgccccaacctccaccattcgacctccatcccagaaaccgacgacccagccgctttcacctccgccccttgctccattgttccaggcaaacccgaccacaactctgttcgaccccccttctccgtttacctcaggaccgaacctccatctcagccattgcaccgcccccactcgtgagagccagccaaaccgcactcgaccacaacagccgccccttgccttgctccgatttgccc

SEQ ID NO: 312085 - DNA, 1786 bp, Cannabis indica
tgtaaaaattctttcaacaacattcacattgcacggcattcaaccatgctatggtttgtatggcttcaaagtatgttcttggttctttgatagaagagacagtaaaaataaaagctttgtgagtttcagacaaatttgagtatgagataaacttattaatgttatgaggtgtggaagaatgatcttggatgagtgaataacactcaaaatcttttaggtagcttggtggcttcaattgtctatttgatcttcttggaggatcctggggttgctgttatgtgtcgatgacaggtgcctctattgtaacagtaggagaaaaatcttcccgagtttgatcagcattggctcctgtttcatgtacctgaattgagggatttaatgtatcgctagaacctgtaggatactcacaaataggggtgttagatatcacagaatgaggaagtacagtttgagtaaaggggtcgatgtcactatcctcagtattaagtttttgaaatggaaatatgttttcgtgaaacactacatttcgagacacaaacatatgtttattgttgatatcataaagtttataccctttaataccttggggatatcccataagaacacaagtacgagcccttgaggaaaatttgcttctatgagcagataaagtagttgcaaaaacaagacacccaaaagaacgtaaatgttgatattcaggccgtttatcaaagagcaatttgtagggtgttttgttgtttaatagagtagtaggaattctatttattagatacgcagcagacaatatgcattcagtccaaaattttataggaatttttgattgaaagtatagagatcgtgcgacattgagcaagtgctgatgctttctttcagcaacagcgttttgctcaggtgttttaacacaagagaactcatgcataatgccgtgcttagcaaacagttctttaaacaccatttctggtgcattatcagaatggaaaactctaaaaacctactttaattgagtatgtatgtaagtcaagaactgaggtataatgaagctaacatcagatttgtgatgcattaaaaaaatccatgtgaatctagaaaagtcatcaaccaaagtaagaaaatatctgtgatttgtgtgtgatacaatgtgatatggtccccaaacatcacactgaataatatcaaagattttattagaaacactattactattttggaaaggaagttttctttgttttgcaataggataaacatagcatggtgtacttttgtgtaaatcaacaattttacaattcaaagtatctttaagcaaattcaaacgcttgttggatagatgtccaagaagagagtgccaggtctcagccgagacagagaaaacatgaccagaattcggtgtagtatcaagaatgtaaagatctttgacagtactacctcttccaatcgtcctcttgctggcattgtcttgctgacacaatgttatatttgaaaataagagcatacaaaacatcggttaagaccatattgttccctaatttgacaatcctactttggttcacgatgagatattcattattagggagaattagtttagttgagggtatcttacatatacattgaaaaagttttggattagaacatatatgtctagttggtcatgtgtcaaacaatccaagaatcatgcaatggagggatagaattatgagatagtatgatacctgtgttacccatggaggtactaggtgttgggtttgtgccctaaataaaacccattttaatataatcagatttactagtt

SEQ ID NO: 312086 - DNA, 1029 bp, Cannabis indica
agtggttacgttgtagtagtgttaataatcatgatatgaacatctttgtcctagttttatagcccatatctagttttacattaatttagtattgtgtcatggagggaaatggattgttggtggtggtggcacatcaaattaactacaccaaaatttttgacatcctataatattttgctattatttcctctaaatagattcaccatatttcatgtatacttagattgaaaaagttttcattgcagcatgaagtgtactatgtaacaaaggtgtctttagcagagattgttaacttagaaagaacatcttccttagattcccacactaaacagtagtaattagttcagtacactaacacactaacttgtactagtattattatgtcatttttattattccaacacagatccatatataatgttacattagagcagttatgtatcctaaaggtgttttgttaacacatgaatgaaaccattgtattttcctgtcttctgttaaagagtgattgacctctttttggaaacatattttatcatttataccttttgccatggggatatatatgatattcagtgaagcttgttaagtttgccacgttctgttttatagcccatatctagttttgcatgtgctcactatgttcatgttaattctctgtaattactgaaattaatacacattacataattattgagttacaatatagctttgtattgtgttgtgtgtgcaaacatatatataaaatatcttgttgtatgtgtgcattatttttttattttcttttatgtgatatgatgaagaattattcagtggattgtatgaataatggtaagtttcttttgctcaattattgtcattgtaggataatggctcgcttaactgtaagtgaaagacaaattttgagaaagaagaagatcatgactctttatatgtattggatgaatgtgttgcatgtagtgcaatggttttttaaattatgggaaaaaattattgaacatagtattgaatcaagctctttgggaagac

SEQ ID NO: 312087 - DNA, 527 bp, Cannabis indica
tataatttcatatatgcaatgagtatttttttattaacctttttgttaataaaaaaaattggtttcttatgaattacataatttgcatacataaccaacatttttttttattttctataaaacagtgcagtatcttttaaataattgcttaatatatacatacaacatgtaaatttactctaatagatcatagatcttgattttagatgcttttttttttcttctaacctttttgttattcatttattaattattatcaatttatctacatttttaaagagtgtcataaaatatttaaaattacattacaattatcattataatatatattttttatattgatggtctaaaataacaattctatactttcatttaagcgtaaatacagaaattaaactggtactcacacatgtcgcgtggcaagatgtgtcccacatcttgccgtactgtatttttatcagtccagatcaccatattcttataatatatgtcaactaagataaatattatttatattttttaattat

SEQ ID NO: 312088 - DNA, 2153 bp, Cannabis indica
acaacatggtcaaaaggtaccaacacaccgctctcaagcagagggttgtaggtgctggtagtagccttgcacctcgtactcttgtcgggtgtcaggtgatccctgattgcaggcctatggtcctgggttgcaagttagtggtccccagttacaggagagtgatctcgagttgcaggtgtgtcgttccgagttgcaggtgcgtggtccctagctgcaaacgtgtggttttgagctgcaggtgcgaggtctcccgattacaagtttaggggtccccacctgcacgccttaggtgagtggccatggtgtacctttggtcgggccctcagaccatgcaggtccattatcaccgctacttgtactcccttgcattcaaaggtttcagaaggcgtgggagtatgccttcctctgcacatcgtgtccccggagttcccatccaacttcacccatgcaatctcatacttgactcccttctcccacaacctcccacttggcttcctcttctcacaacttcacacttggcgccctcctttcacaactccacacttggctccccctacacacactcgcccgtcccccctcgcacacacgactcgcgtgcgagccccccatgggcttggatgcgagcctctccactggcacgcccatgatacccactcgaccatcccccttcgcacacacacggctcaccgcgagtccccctccactcgcatgcccatctcgcacacacgcctgtctcctcctctcacacatggccatctcctccccgcacacacgactcacgtgcgagcccccatgggcttgcaggtgagccccctaccccctcgcaccatgccaaactcacccttcaccactcacccacggcttgcatgtgtgccccccatgagttgacatgcgagctcccatacacttgctcggacactccccgcacacgacgtctatccacacatgtatagcttctccctctttcacctacgggtcgaacggatgctccaccacttgtatgaaggttctacgactcaccgaaatgcccccagctcaccccaatggcccatggacttgaacaatcccccatggggtcgcacaatagctagggagtcgcttaacagcctactggctcgcatgggagccgtcaactcgcataccaagctgtcacaatttggtagtcatagtaatttggccataactttctcaatatacatcagaattagatgaatcaaagtgcattggaaagataagaaagagatctttgaatcttatgtctgtggcaagatccaattctgaacatatcactcgaaaaatcctctaacaattgtaacctagtgagttaatctttactaactctactcatgagttgttacggggttgaactccaagttgcatggatataccccgagacttgtaagcatggatttccaagattaatgatccttaggccgtatgcgttgactcagtcattcttttgaccgaatcttacagttgatgtctctcgactgctggggccgattgttgactaatctggaaaatcaactcttctaatttttggggttaacacttgcccctcagtctacaagaattattttaagtgttcttgaagactgtataagttggggggatctaccttgctgaggcatgagatcctctcagttatctctaagacagtgctccctttatacggggggcttcccttggttgaagtttactttgcgccaatatgtcaagcaacaattttacttggccttggctgaatgactttgagggaggctcgttggcccaataatatttgtaactggcgttggccgagtgacactggggttactctctcgccaagccatctttgtaatcagcgttggctgagcgactgtagggtcactctttggccaagccatcttcgtaactggcgttggctgagtgacactagggtcactctctatccaagccatctttgtaactggcattggccgagcaactctagggtcactctctggctaagccatcttcgtaattggcgttggccgagcaactctaggggtcactctttagccaagccattttttgctgtggtaggcagccatatactatgggggagtttgggctatttgagcagtctccctcttattgtaaatccatccttttgcttggatgggagggagctt

SEQ ID NO: 312089 - DNA, 2373 bp, Cannabis indica
cctcaaatttagccaaccgacagaggagtcaaatttcatattaatgtttgtcgcgtgctatacaattagaataggaaagtaaatagatacataattttatagaggttcggcccctttatttagtgggtaatgacatactcttcttttagttgtattgataccagaaataataccacttagatcactatagtaatgggatctaaagtggctctcttaagattacaatatagaaaccagagttggtaaatctcaagtgagaatagagcactggacgtgtgagagagagatgagatgcattatcagacttagagcataaggcttagggtttgagacatagggttttagggcttgactaatgctctttatataggagagcttacatcactaatatccatcaaaaataggtaaataaaactatcatttacataattgttattcaactatgtaccaaaagctgacacgtgtcctacaaaaggaatatgaatcaactcaaagaatataataatgacgttatattaaatgcaacttaaataactcgttctaattaaatacaagcttgacagaaatattcaaactcgatgactgcttagtcttatgcgagacaagaataaaactattaaactacaattggccagatatatgttttcctcgattggggtagatagagtaataaaatgaacaatacgagatatccaaagatctccagaatcattgactctcccatgagaataaagtgaaatttatgacactcaaccgcttcacattgtacacaataaagaagtcatcttgtaacatcaatacaaataaagaggtacaacgagatgaattacttcaacacttagtgtttttcttctcaagacggatacgaaggataactaatatttggcaaactacaaccttccaagtcagcataaccgtttaaaagataaatacaaggagcagtggggtagttattagatattattccatgtgtgaatatatgaaacgtgggaaatatccacgtttcattagcagttgtaaatgaatcaatcccaattaaaataactgcctacctatattcttataaatatgggcagaatccttgagaaagtggatggtaaaaaatagagagaaaatcttattatttcaaatattgagattctattctgtattccaaaaaagtatccttaataataaggactcatggagtatatagattttaattagaaaaccacataaaatatctgttgttatttaatatcatttatttttgtagtgtatttattgcaaaaaaggttatttatttagttaacaaatatctacggtaacaataataaattaataaaatactaatgaccaaattgcccctcaaaaataagggagttgctgatattttctctctatttttatgggcttgtaaagcccaattcgtggtttgacttgttgtccacagatgagaattgtgtaccaaagtctgccgtgccaaaagttggccatccatgcacatgtagggtgcaagctggctggccatatgatgtccaaaagctagtctacctatgctggccatagggccagctaggcgtggctggccaaccctcttgaggtggctagttcatcattttgtcatccctcataactactcagacctctcattggctgtagtgatgagtagatggcttggctttcttattgcaagttgtactcccacgtggattgatactggccatgtggacatgctaggttaggcgaataaaaatcaggataatattttcgcccgagtccctgtgcagatgtttgtgcggataggtacttttcagcttagttgggactgatgttgccttaactggcagacattgaaatataactagtctttgaaatattttttcttgactgtctgatcacgttcttagcagtaagttagctacattactcttctgcatgctttttatttacatggtgcatggcaagtgaaataaggggtcccacaaaagctatataagcttatgggagggaaatcacttctcacttcccagattttaaatctccctctagaaaaagcatttcttgaaagctcttccttctctctagaggccgacacccaaagtgctccgtttcttgggatttttcatgccattttaacgattctagcttcccatcgtcttcatcaatagtttctagtagtgggtaagcttccaaatcccattattctcttattcatttgactttttcgtggtttttttgaagcttttttcctttccactttgaatatttttttttattttcacattagattgtaatctttttggtgttttgatctgtatgatagttttaggatgcataatgtgtgatttcctaacgaaaaagatctgatttttcaccttcatttgtgtattc

SEQ ID NO: 312090 - DNA, 744 bp, Cannabis indica
aaaaaaaatatggaaaataaataaaaaaaataaaaatgttgtaagtgatacataagcatttttttttttattttgtctaagaaattgtagtaatccacattttatatttatactttagttttgttagctggacttaataaagtcaataataatagtcctagtgcatggtttgtgcatattagagccacttgaagagataattaatattaaagaaatctgcaaggaaaaagtaaactgaagttggagatgaaattcaacaataaatgtgtaaaattttagggacattttgtcataattataattaaatattgcaataatatctaataattaatgagtatattaatagcatgcatatgtatagctgcaattaataccacaaataattaatacttaggaaagagctccttcctatcttaattttctttaataagatattaatcaatttgatataacatcaccaaaccacttctcaatctaagggcatgtttggaaaactaaaagaaaattggaattgagtgtaaatgaaagtaattctacaattttatgtatttgtctaactatataattatactgtaactatataattagaaataattaatagactttaattacactctctaattctcatgcccacatgagaattcggtgtaattataatgtgtaattagtaaaaactttctattttaaatattatgtattaaaatgtattattttttttatataattactaactattttactaaa

SEQ ID NO: 312091 - DNA, 1348 bp, Cannabis indica
atagacttaaatgatcattacattgcaggtgcggattggggattgtgccgtcagactttattgcgtgtagtagtcccaacacgtttcctcccatgcggcattaaatgcgaaatgactgctcaggggaagcctgacacctcgcggagacgctttaatgttatttaggcttccgggagcatagggggctccgtatgctctctccgggaggcatgtcccggatgctgcctaattagataaagacttagcaaataattcaagtatttaggatgtttgatccacgtatccctgttcggttggtccacgtatattgggcaaaatcaggggcaacaactatcaaaaggataaacaaattgtgattcataatatttaataagttttcttcaccatattaagcatcattatcaagcaattatcatcgataggataattaattacttataatgatctttatctaatattagaggaagatacaatatttaaatacattaacatttacatgctcgtcattaccaaataattttacatgtttaatcttacgatatgtaagaaaataagcactaattgtttaaataaaacataaatgtatgtcataacaaaataatattagttacaaagattatgaataaattaatgaattaatattatgcaaaaagtaagatgtggaaatgatagaatgttaaaaatgaaataaattggtgaaaagtggcccaaaaaatgaccttgctcgcgcccccatgcgcccattttagttttttttaaattgtcgtacgacatgtcattttggaaaaacgacatgtcatttggtggaaaatgacatgcagcagggtcataaacgactcgtcgttttgtgctgcaaagggggttgaaccttatgtgcgtacgacatggcgttttgcccgacaaaggcaaatgccatgtcatttttgtcgtctctgtcacccaaaaacccaactcgcgggtctgcgggtctactattcggatataccatctccggccaccaaattcgatgccatttgagaggttttgttccattttcaatcctttatcaatttctaacatccattttcacaaaaaaaaaaaaaagaactttacccataaaacataaatttaaaaaatgaatttcaccattaatgaccacctccacaacaatgaaaaataaaaaaaaataaccatccaaaacatatataaacgcatttaaaataataaatctcatatttacataacattaaacatatttctctaaaaaataaaaaaataatgaatttcagatttgaaaataaaatgggttagttcaaaatattatggagttctaaaatcaaatatactagctcttgatatcagttgttaa

SEQ ID NO: 312092 - DNA, 987 bp, Cannabis indica
cctcattgtcatcttcatctgggaagattgtattatccaaggcacatcgagtagtagtagtagtagtagagaagataggcttacaattactattagtattattggaaccatataataatggatatgaatatgaatgaagtaacaatctctttccttttatgtgtaagtagttgttccatactccataattattattactattaccacatctacatctacagtggtgggactggggaggacttgttatgtttatgctgctcatctctctagcttccactttctgcaaattattgattaagtcaacacaagatgttaatactaataatgaaaattagaggtagctgtaagaagaaattgagtagtgaagtgaacctgatttgatttgattgaatagaagaggcaaaaatgatgttccaactgtagcagagcagctaaagaagcaacaacaatggaggatggatgaatgaatggatgtcattagttattactgctaatgaatgtaatggtatagggcaatgacaaccactcacgtgtctacagatacatacagataaatatcatttgttttttgtaatttatgtattatagttaggctttcttttgtatcataatttaatttcaaccacaaaaaatcaattgaacacgaaaatggggccacccatctaacaattataacccacaattttgacattattgccattaaaatgaccagtcaaaatcaaaattacaagtattttttttcttcagtaaattccatattgctttcattaattcgtattattaattgaaagaaatagcatttattattattattattcttaattaattaaaaatccacatcatcttatattatgaattcgattgggttatcactttcacttccattcccaagggcattatggtaatctcacttctttcttccctaaaacgctgaacatagagagagagagagagagagagagagagagagagagagagtagtagtat

SEQ ID NO: 312093 - DNA, 509 bp, Cannabis indica
ggcacaaaacccaacaaaaccatccataggtgttgtccatacatcattttggataaaagggcgcctaaggatatcattaacatgcactatgacgtatgtttttgagaaaatccttaattaccatgatcaccagattcataaaaactacgagagtgttgattagttcaaaggcatatctaaaagtttgtattaaccgtacctagtatggaaaatactacttgaaatattcttttctcagattctcaattaatgataacttgagcagaggtcattctttagggtaactactttcccccaaactgattaaaccactcgtaactccttaacagaaggtacttattcttgattaaaaactttgttatggtgataatctaataagttctactagaaatacatttaagaactcttataccactctaattttcaaggttgaattgtcttggccagatagtatccaacaccattgcaaatgattctatgtatctatcccatgatggatctttattttt

SEQ ID NO: 312094 - DNA, 1272 bp, Cannabis indica
aattctaggttgtgagagacaaaagaccagaagtatcatctttgacgaatatgaagccaaccttgggaatccttaaaggctttttggagttgctttagtaaaatagagacaaaggtaaaacaaccttaatgatagtattcaattaacaatagttaaggcagatataactaccaacttttctaccgttggaggcaagttatgggatgatttgaaagggcacccaatcaaattgataaatgaatttaacgaaagggcacttatatatgtttgaaaggaagaagatcggtcagagataaaggtattatgagatggctgaagaaataaacccagctcgagcaacatagaaaaaaacattacaaacacgtgtaagagcgaagagccacatggaaagagaaaggatgaatccaaggaattatccaagaataaaaagaagccaaacaaatacaaaaaaatacaacctagtttatattgtgtgtactaagctgaatgagacacgtgaaaacatattcctcataaacaagaatagggtcactttttgcaaaccagaacctataagaaatgcaaggaataaataggaccagaataaatatcgttgctttcacaaagatatcagccacacaaccgaggagtgtcaacaactttaaagatgagattgaaagtgtcatgtcacaaaaatactttaggaagtatgtgagaaataagggaaatgaaaaaaatcaacccaacaatcaaattccaaataaaaatgtctagccaccatcagttgatggcgaaaaatattttggtaatttttggagggcccatctcgcaggaataagtaacatagcccaataacaatatgccaatcaagtaaaaaatcaaatcctcaggttagcacctgaagtgctaaagcgtgccgaaattgaggaaccactgattaccttgactaaagaccatgtgacacacgtgggttttccacatacaaaacctcttgtaataactgtccaactcccaaataaaaggataaagtgagttttagttgacaatggaagttcattaacatcctattcgaagaaacacgttagggtagcgtttggaaagaccacaatgtaattggatttgtgtgtaattggaggtaattacacaatttggcaagtttgtctgaccatgtaattacactgtaactgtgtaattggaagtaattgaggggttcgaattacggtctccaattctcatggcaccccatgagaattgaatgtattacactgtgtaattactaaaactttccatatt

SEQ ID NO: 312095 - DNA, 616 bp, Cannabis indica
ttttaaaaaaaaagaaaaattattttatagttacaaatttttaacatattgagcttttatcaatgttaaaaaaaaactgactaagttgtaatattgtattttgtcagatatttccaataaacatgaaggggtcagcgggaagtctggtgacattggtgagctggttagggtcttggattatatcatattttttcaacttcttaatgaattggagctcatcaggtaatatttttatacaaaataatttaattgatgaaaaaaaacaaacagagactaatttaggaggataatattggtattttggtcagggacattttttggattctcatgcatatgtgggttaaccgtttggtttgtcgccatgttggtaccggagacaaagggaagaacgctagaagaaatacaagcatccttgaatcccatttctaaaaacacatgattcactattcactatcacacattttaatttattaatcatgtccaacaaaacatcaatctataacaaagatcccagctggtaaaagaacttgaaggagcggtatattataatatagattgtaaaatttggattttttttatgaggaaaaaaaatcgatattttattattattattttt

SEQ ID NO: 312096 - DNA, 1237 bp, Cannabis indica
ttttttaactaaagaaaattaaaaggcaacacttataaaagtgttgtctcctagagtgttgccaaaaatataggtataaggcaacacttataaaagtgttaccatatgttgtaacttaataaagacatataacaacactaattataaaagtgttgccatatgactacttattttaaatttataattgaattttaaataatatcatcactatttttttaaataaataatattttaattgtatgacatcgaaatctataatggattatttttttattataataagaaaatttaaagttatataaatttaaatgaataataacacagtctgaataaattaaatatctaaatttattttcatacaatcaaaatacattatgtaagtctgctacaatatttgataagaatttttattataaggttaaaaattttacaacaagtgtaatatcactttccaaaaaatgagggtatacaaaatgtacgtaatatttatttctctagaaattttattctttatatctcgaagttttctgaagctccaaaaattgattaattgtcttcattccattttgtatctcgttgaagaaacaattcaacctgcaatgaacaaaaaagaacagtaaatacatggttataaatttacattactaataatgtgaatttatacataaacaaaacttggcaaaggaattaattattatggtgaatattatggtgaatatatatatatatatatattattagtaaaggatagttcacttcactgcacaattcgtgtgcaaaatgagaaaaaatgacgattaatataaaacctcatataagtaaataatcataaagataatgtgaaaagcacaagaaaaagtctgataaataaaccaaagaagtacaataaaataaaaattaaaaaattacctttattgaacaaaaacaaaaaatgtgccataaatttgaggagagcactctcaaatcaaattgatcatgaataatgttgatgccaaaatctttaaataatatattaataataacaaacatataagagatagagaaaggggttttggagatttttgaaaaattgcttgatatcaatggtggtttggggagagaaatagtgggtagtttttatatttttcttggtagctcacatttatctttataaatgatagaagttacaccccactaaaataatataacaaattttatttttattttttttctatttttattaaaaacgtacactttt

SEQ ID NO: 312097 - DNA, 709 bp, Cannabis indica
tttttttattgatctaaattaatgaaaaagaaagaagaagagcttaacaacaacaattcgattacctaagatttttaatcattttaactctagtaaatgtgtttgttgttaatgttgtccatagattaactaagtattttaatacgactgaacaatattatgcctcctctccggtactgaacaattttttagctaagtatttttgtccagtactcatattcaatctttcaactagaacatgttaatatatgtaatgtttaaaggcagcctttcttttatttagaataaatacaaatacaataaaagagttctttttaaagaaaacttagctaataatggttcatagttgaattcaaaataaattctttatttgtatattgtttgttatttgaaaaagtattgctattaggtattagtactgtttagcactattataagataaccccttaagaatgagtagcgatattctataacaattattatattaaattaaattgtgtgagagactcgacacttgattttgattttgttaatagtaataagacacttagtggtgctaagcattagtatttacttataaatttctaatagactctcaatttactgttgattaaactattatttagctctagaaaatgaaaaaaaaaaaataaaaaaattgaagactaaaacacaaaatcaacatgttataaatttttaaaaatttatt

SEQ ID NO: 312098 - DNA, 3010 bp, Cannabis indica
gctttactcatgtctaatttcatcaccgagtaacatcaccttctagttgtaacgcctcgtagattatataataactcataagctaccattgcattatttgtaattcggcgacctccaatgaaagcactttgagaagagtgtattatagagtctagccatggttgtaaacgatgaacccaaactgtagatacaattttgtgaagaacattgcacaaactaatcggtctgaaatctttcatattgttggctgctttagttttggggactagagtgacaatcgtagaattaatagaagacatatctccttgcccattcaaatattctaagactgctttaataactacattcccaatatcattccaataattttggtagaacattccattcatacaatcttctccaagacttttatcggaaggcatagaaaatactgcttctttcacttcattctcaacaaaaggaagcaaaaatgaattgttcatctctgaagtgactcgacacggcacaacagaaaggatagcctcaatttcttcttcagaaggataagaggacataaaaagaaaggtgtagtaactttctattataccttggatgtccattggattctgtacaccaaatcccttctgaattaaaaggccctaataatcagcacagaaaaatattcaatcacatataatttccataatttatcgtaagtttgaaaatatattttttgacaaaatggtaataaaacaaaaatattcaagtacaatactagaaaatcagaaaagagaggaaaatacctaaggggtgccaatgcaaaattctaaagttattttcttataataaatttcttacaaatataacaagttatacatagaccctcctcatatcaattaatattttggacaatagtagtaatagtagaagaataccaaaaacgatgtcacatttaacagaaatttaataaacagtggttgttatgtcttttggaattagtatcatcagtcccttattaaaagacatttttgtttatatcaatatacacaaaatattttgacgaaatatatcttttgaaaataattttactttttttaattaaaaaatatatttatataatggtgacagagggcaccaaaacttattaccaatcgcaccctaagttttttgaaaacaaaaaaacaccttaagcatacaaaataaaattttaattgcatatttttatggaataaacatacataatttttttatataaaaatatttgagaaattttcacacgagcacaaaaaaaagtaaaaaattaatatatatacgaatacacgaagaattatacttttatacagtaatacataatttaattacacaatatacggtgtcatcatcaataacaccttcgttactctctgcccaaaaataaatgatagagacaccattattcttgggccaagctttttaaaacaaaaaaataaacaacaacacaatgaaaaatcctaaaaaaaacttctctatttaattagccaggttaaaaaaaacatcagaaaatgtcaatccatcaacaacaaaatcctataaaataaatctgcttgaaaacaagtacgatacatccgaaacccaaatctcaaaataaactaggtaagatatatactacgtatctaaaattgtaatttcaatgttgcaaatcatacaataaagagttaaaaaattatttatcggaggtccctattaattaaatgcaaaatgatattcaaaacaggtatgaaacatcataagcacaaaactcgaaatgaacggggtaagatctatactacataatctaaaattattgtttaaatattggagatcatattagaatgacatgaaaaattattgatcggagctccctatcaaatctaaaaaaaagttacaaggtattgaatcactatataataaatagaaattaattttgataattactaattggataatatattgaggattgcctgctattgattgaaaaaaaattaatttgaaaaaaatgaaaaaaaaacatataataaggaatgtttattgttgattgcttgtttaatttatgtaataaatttgtatttatgtatctataatacatataaagttgagtttcatatattttgaaacgttaatttattttggtcatatatataaatatatattattgatttattgttaataatttgcaacaaaattgatcttgctaattgtgtgttagtaattataaattttattttgataaataattaatatttttttaaaaaataaatgatatttattgttgattgattggttaatttatgtaatttaattatttttattttctataaatctaactgagttaatttgtaaaaaaatagaatcaatattcgttctagttcaaagcaatgaacattcggatgagaacaatcggtacattaattttgaagctactgggatatgcttccaagaaaactgtaaatgtacagaagtagtggacaaactgttgcgaaaatataactgcaagagaaacacaactaatctacaaatgcagtttcagatacaatctgaatatccaacattaaagatcacaaatgatgaaagcctagagtcttacttgcagttaaaatcaagagaaaaggacatgacaaaatattctttgtgcataaatatggtccacacaaataccattttttactgaggttgacacagggcaagaagtccacatgcttgaatataaaactcagtcagggggaacatcaacaaacaaaaaacacaaaagaagatgatgaggcattcgactttgttgactatgcacaaatagttgttgcaaaaatgatagaaaaactaacaagatagacaattgatcaacaagaaatcaacaatgaagaagcattggtcatcacagataaataacattcaaaaattgaaaagggcagacgtacaaagataataaaacattgaagagtgtcctcagctactttgtaataaaacaacaatttcaatacaaggtaaaaaaatcttgcacaaaggaatttcaaattga

SEQ ID NO: 312099 - DNA, 1279 bp, Cannabis indica
ttttttttatgattttagattaattaattttaaattttatttattttaaaatatttatttaaatggcccaataaaattataccatgtgtacactacgttgatgtggacaatactctgtgtatacatggacatgcctacatgatacttaatagctaaatttgaataaaaaatgtaaattgctaatggtattgtagttttagagattttatcggtaaaatttgaattttaggggttaagtacaagcaaagtaaaagtattgagagttttaccgcaattatccattaataattactagagtgacctttacaaatggtctaatactctcaaatgtttgtttacgtgaaataccattcatactctaatgcattgatgatgccacattactcattttatttagcttcatcaactatatatacatgtattttgtaggtttatatggagaagacaattaataattttttgttatgtgtaggcaaagttcaaaattaaatcaatcctaatgatggcaacattcttttcactgacaaccccaattggtattgcaattggcattggaatttcgagtgtttacaatgaaaatagtccaacctcattaatagttgaagggcttttcaatgctgctgcagctggtattttgatttacatggccttggttgacctattagctgctgatttcatgaacccaagaatgctaaacaatattaggcttcaattaggggcaaatctctctcttcttcttggtgctggttgtatgtctgttttggcaaaatgggcttgacaccaattaagcactacatataaatattatatatatatatgctcacatgttctgatttatatatacatacatattgttttgctcttctttttaatttccggtgtgcctataatttgcattcttttgtttgttcttaatttatgtttggatttgaaattgttttgaagtttatattatttgatttgcattttccatggagaccaagcttttactagcttttccatgtactataactttgttaacaaattttttttaaaaaaaattttgttaacaattgatttacattgataataaatttttttgtatttgattatgttgtttctaatataccactactctattaatttattatacacaatattgtcccatatgaactaaatataaaaaatactgagcgccatttataaatgtgagttcactataaaaaatcttacttttagtcacaacaatatttgtgactaaagataaaaaaattgtaactaattaattataaattattat

SEQ ID NO: 312100 - DNA, 1092 bp, Cannabis indica
atatacgttgctggagtaatcatcgatgtttctaatcgttgatggataaatcaccaaagcaagttgtaagcaattatcggtggagcattcagtgaagcaattagctgagaaatcatcaatgtagaacatagtaaccccaaaaaacttccaccaggaacaactcgcacccccagtctcacccctcccccaatggcaccccagaaaccccaatcaccaacccagcaacagaccccacagcccccaaccagccaaccttcaacccgaaaaaacccacccctgaaaccagaaaccagaaacccaacctccctgtcaccccgaccgcactccttgaagaaacaaaacagagccaacccaatcgcaacccaatctcactatcaaaaccgaaaacaagaaacaagcacaaaacaacccaaaacacacgaaacaaacacaaaagaatcacaccatgtcacaagacaagacaatcaaacggacggcgaccatcgagtgaacaacaacgagcggaagacggcgcttctcctggaacccaggcagacggtgcttctcctggaactctagcagacggcgcttctcctggaaccctatttgtggaaaattctattaaacaatgtgatggagaaaacaaatctatttagttatgatattttaatttaattaattcatattgttagttatataataagaaaaaaaataataaaaaatagaaaaaatggagaaaaaagaatgagtactttaaagcgtttttagaccgccacgtcactgccttaccagcatagtcaaaaaaaaatttcaaactactaaaaaattagaaaatttttgataagtgtcttatataagtttgttattggaaaaaaaataaaaaatacttgaacgtatgtaaaagaaagtcggagagaaaattatagatgagaggatagaaagagtttgtgagtaaataaaaaggctctatctatccactggagatatagttccttggtatatgtgttaaatgtatttgtaaaagggaaatttgaaattccatgcttataatagtctaaattttttttccctaaattcataattattaaaattggtcatatatgaccacattac

SEQ ID NO: 312101 - DNA, 1399 bp, Cannabis indica
ttgctccatataaattgtctcatcaatgtcaccattgaaaaatattgttttaacatccatctgatgtaactcaatgtcaaagtgagcaacaagtgccaatattattctaaaagagtctttccatgaaaccggagagaaagtctctgtataattaatgctttgtttctgagtatatccttttgctacaagacgtgccataaatctcaccacattaccatattcatccttcttagttttaaatatccatttacaaccaattggttttaaaccttctggtaatgggacagcttctcaaatcttattgtcttgcatagacttattctcttcattcatagcctcattcatttggggtttttctacagaagaaccggttaaccgtttccccaggcagggcccaaagaaccggttcaccagttgggaatctggtctaccagttgaggcacgaccaaaacccttaattcttgtgttttcctagaatttagaacgtttccatgttgtttagcgatagggttatctctgattttaagtataggttgctgggaaggtttgcccaagttatttacccatttatgtgaatgtgacatagggcttccgttcaattcgtgaattttccattcaaaatcgaccagcatgtttaaatctggaaaagaggtaagattaccataaattatgtatatgtatgtgtatatgtatgaaaatgcatgctagctatattgttatacactaccaacactgatatggttacgatacggagtgcactggtatagtgtatagtatttaaggtatgttagggtgttaccaacactagtataagtgtgtacgtagtgcatgtggtacaacacccaatagtaccccgagagtaaggttcgtccctaccaacattagtacgggagatgtacttcagtgcatgtgatatagaggtcgtacttctattaagaacattcttaaccatttgataaaccttgtagttaggcaaatgaaggcctaaagacaagtcgatattacattgtatattttatgcatatcttattgagtttgttgactcaccagtatgttacaatgtgcaggtaaaggaaaagttaaggctgaggtgcagtgagttttggagctcagcagtgattgtacatatcgcagtagtacaacctggagagttttggtcttgaaatattttgtggttaacttttgtagtcaccatgtgacgtattatataaatatgttatgttgccaaaattatcttttgaaatcaggatcccagctttgtaaaattatatgtatatatatatatgtttatattggttatataattaaagtttaagtccaagtgatttgcaaactggtcattacataaattatgaagctatcgtcgtcaaaattcactctcaagggagttacaaaaata

SEQ ID NO: 312102 - DNA, 2571 bp, Cannabis indica
attccatttctattcctattcctattcctattcccattcttatgtttttattcctcccaaccaaacgccaccttaatgtttccagactaagataaaaggtcacaacaagatatccccaagtaccaatagtaagaggttaaatgcacacttgagtatgcattaaactaggctcctactgttgagtgggagccatcaaagatgtaatcaaacaatgaacattggaagacaatcaagaaagaatctctaaaaatgacatatatgttagattatagggatgtgtatttagaatccctaaatctaaatcaactcaaaacttaatatttaaaatgatggttactctgggagtcgagaaatcattctaaaaagttgtaaagacccatatataataatttagttccaccaatgaagctaaataacttagttacttttgaaaaggcaccagaaagttcttgactatctaattcctattccattttggatagaattagagtcatgtcttatgtatattcagatacacttaacaagcaataaagaattaaatatccctagaggagtaatatatataagaaaaattgatgttgcataatatgttaagaacacaaaaggaagtaataatggagaaagctattgctaaccatagccttacaatttctgttatttgggtatagtcaaacatactacacttgatatggatatcaagacaatggtttaattgaaatgcgcttctagtttaatgctaatgcaagtgggagtttattgagattttctgctctaaataaaactaattttaatataatcttatttgttatcaatagaaaattagaagtcatttaagttaacatgttattttcatgattatggtttaatatacaatttttgataaattcagaacatattgttattcacaattacagtgatgtcatcattagttgatcttagatcaataaaacttaatcctgatatggttaggttctagcttaactgtattatttgtgttctttgagttgttcgttaaagctgaccaattagatcgacccaatacctatatcttgggaacatggtagtacaattgagtgggagcgctaatcatagatacaaaatctatagcttctatattgacatagaagtgaaatgataaatttctaaggataatatacattggagggtagaacggtaaatttgttcctactcgatataaatcgtctattaaggatctttgattatttgaattataacaatggataattaatatcatatttatatttagaacatatagagcgttttatataattaagagtgcaaatccaaatctatagtggagttaggatgaataaataagttaggaaatttacttggtaaaatctaaatctacttattggaagatttattatataggcctatagtcctcgcaatggtgtgggttttgcctcttgtttcgaatcctctttcttaaactgagggtaatccttcttaaagtgccccaccattctacactagaaacatgttttctagttacattccccaggatgatgcttcttacaacgaggacactcaggataggaataagtatgacgtccacctctaccttggttcccacgaaacctcttactctgacctgagtcacctggtgccaattttttttctcatttgtaatcattgttggaatcaccaccatccctaccataaccaggagtaggaaaagtagtggtcccaccaacacttggagtcccttgaggctcctaaagaaactcaactgcacctttagctcaaagagccttctcaaccatctcggcataagttattgtgtcatttgtattaatgaccaaattatgtctggcattcaaacccgcaaagaatttttccttcttactaaaatctgtgggtactagacctgaagccaacttagctagtcaatcaaacttagttatatactctgtcactgacatggtctctccctgaaccagctcagtgaactcttttcttttagtactacgaacagcctcattgtagtacttggcattaaatagctctcgaaactcttcccaagtcattgtagtgacgttccgcgtgagggacaccgtttcccaccacacgagtgcgtcctcttagaactaaaacatggcacaggtcacctgatcatttccaatgacacccataaaattcaagattctttcaataactgtcagccactgctcaaccttcatgacatcaggtcctcctagaaagactggaggcatttgtttgcagaatcactcatacaatggttccatgcagttactagcaacaagttgttctactggcaccactagagccaaagcaggtagcatttgttgaggaggcataacaggaggaccctgctgtctcaaattctagatcttttcatcttgctaattaatttgggcttgcatttgcgcaaacctttgctcccaatcttgaggatcatgtggtagattttcataaccaccaccttaaaatctactacggacctgttgggttttatgccctaaataaaactcatttcatataatcagatttacttattgataaagatcagaaataacattttatgtt

SEQ ID NO: 312103 - DNA, 1367 bp, Cannabis indica
atttatttttaaatatgtaatactaatatatatttaaatataaaaatatattaaacttataataattaattaaatatatttattatatattttagacaattctttaaataaagaagatgttggagtgctcttagttgttaaagttagaataaaaaaattatattgtaaagttagtattacatattgtgaaaaataattattattgagaaataatttaaataaaataactattatagaatctttttaataaaaattaaatatggacatatgcggtcggtaaccaacttgaggcaatttagttcacatcaaatcatatttaataaaccacttgaggctagctcaagtgaccataggagagtgcatgtgtgtagaagtcctgagttcgagtcccaaattatgtatggttgtaatataaacacttaaataaaaagaaatcatatttaataaaaattaagaaacaaagtgcacttcgcaaatagttttttaagttttacccattaataaaaaaaaataacacacacacagatatcttcaaagtgagtaaaaaattaaaaattgaagaatgctcacataaaataaaactcagtatatatataaatctataaagtacttatcatacaatttgaaaaattattgttatcaccgtatctcacttgtagttgctactatattcaaagtcgatgtcatcaccgtatcttacttatagtcatcaatattaaatactactatcctttccaatatgttcactttgtatataaaacaaatcaaacaatgatcgatcaatacttacaaaatcaaaccgttgttatcaccttatctcacttgtagacgtaaaggtcgatgttatcaccatatctcacttgtaattatcactattcttcttcccaataagtttattttgtatataaaacaaattaaacgatgatcaataaatactcacttataaaatcaaaacactatatattatcactatacctcatttttttaacaataagattgttatattataaataaatatcttttatattttaattttttgtagttattaattaataaatcaaaattttaaatatggaatagatttagagtattaatttataaattataaatttaaaatatatagtatgatgtcatctaactaatatatattttttttaattattattatgtttttatttgctacaatataatactatatttgtctctctcttttattctttttttataataacaatttaaaattaaaattaacattaataataaagaatggctggaaaccttgtaaagttttttttttttaggttctccttaatggagaatgctatttgtttgtacaaagagttttgagcaatgaaattcacttgatt

SEQ ID NO: 312104 - DNA, 1063 bp, Cannabis indica
taaaataatttccaacatttttatcaaattactctctaatcctcgaggctattaaggccaactttaatgacaaatttgatgagttccgaaagaagtggggtgttggcatcatgggaagtaaatcacaagcaaaaacaaaagccacggaagccgcacagagaatgaattaagaagattgagcattttctgttattgtgagttagtagtttttcttttttttaaaaaaagaccaaggaggagttgtttgaagcacattttgttatgggctgttatagaatatcctgataatctttattttttaaaaaaaatcattacatggtgtttttcttttcgacatgattttttcatttgtctttttagaacccctttaaagattatctttatgcatctactgggtgcttttcatatgtgtttctgttgtgagattctataacatctcaaaaaatagcaaaattgagaggattcttctacgaaagtaccaccatcttatggtttttttaatatttctcccaactctagtcttccaggtgtgatattaagggattttaatgtatttattctgatgttattctctctcttttttgtggtgttcttagatatgttctcttcatgtttgattttcagcctaaatttcttgatctagcatttggtgtggctttgggagttttcttggcattagaatttgttcgagtaagttacaaaactaatggtatgattgtttggctaaattgtctttcttttgttctaatgtaaactggttttagggattttttaagtgacttatagatgaatgttttgggggatttatcaagcataggtgaaattatcagaataacgacgaacaacggccaagctttgttcctatttttgatggtggcgatttaagggtttttgatagtgttctggccgggattgaagaggtggatttgattattttttttgtttcttatacataccaatttttgggtttgtagtttatgtattctatttaaattatacttgtattgttttttttgaatcacttatattgtattactgtaattaattataatataattatttt

SEQ ID NO: 312105 - DNA, 1845 bp, Cannabis indica
tcaaataccataaaaaacttaaatagtgaaaaaaatgccatagaaaaagtggcaaacctaaaaatgccatatttttctaactttgttatgaaatcccatatttgatgtaattttcacttatctaattcaagacctaacttaacaattttatgagcaatcatattgaactctctatgaccatgacaaatagttagatttggactaaaagataataagttcttaatgttaaataatatattatccaaaatactattattccaattacaagaacaaagtttatcaacaatcagtcataagcacattcacaagtagtttaatcaattgagcccactgaatagcctgatatatggctttagcttcagccacaacaggggaaacaagcccaataaatggagcagaaaaacatgctttaacccggttgcaagcatctaaaactatcactccaacactatgttttctgcactgaggatcaatagttgcatcagtaaaaattctgaggttgcccgattcaattagttgcattggtgcaatgggagcagtagaattgtgacttgttggatgaacctgctgcacatctaaatacttgaaacagaagttaagactccaatcatacacttccttaggaggaagggtatattgattatggtaaagattattcctttgatttcaaagagcccacaaaaaataatataagataccaatactatctttatccaaatcttgtacaatactaattaatatctagatgtttattattattattattataatatgtagcaaacctggaaaatcgccaagcttttctggatctggagcaatctagcatagcatgcttggtagtttcaggttcaagtttacaaagaggacacaatggagaattaatcacacatctgcttaaaagggaggatgctacaggaagggcattagacaacaatctccaaacaaagagcttaacttttgggggggtaacagaggtccagattttagaccaaaactttttggaggcagagaaggaagaagaagaggggagatcttgttgtgaaaaagccaaatggttaatagatttaacaatgaaaataccagaactttccctttcctaaatcatatcatcatggccataacacctagaaacaggaacctcaagaatgtcattaatcatagattcatcaaaataggatcttaatttagctacatcccaagttcctgagtcattaataaagtaggacaataagcaagaagagggagaatcattgttattaaaaaacttatgtttgtggttaaggagccaatgatcatccagaattctaatacaacttccatcacctactttccaaatgatccctgaagccattaagtctcttccccataaaatacttctccatgtataagaagggttatgaccagggacagcctcaagaatagaagagtgaggaaatgaacgagccttaagaaccaaaataaggaggaaagtgatatttttaagaatttgccaagcctgcttagcaagcatagcttgattgaaatgaacaagagaccgaaaaacccaggccaccgcaaaattttgattgacacaaaatcctctgggatttccaatgaattttcttggacaccccagtggagccccaccagaatctgttcatcgcagcctcaatacccttacaaagcttaataggtaacctgaaacaagtcatcgcataagcagggatagcttgaatcacagctttcaaaagaacctctttacttgccctagaaaaacactttaaagaccaacttctaaggacaaaagcaaccttatcctgaaaaaaaaaaaaaagcaaaagaatgatatttagatctagagagaca

SEQ ID NO: 312106 - DNA, 994 bp, Cannabis indica
agaagcaaaaggttggaagaattcagtcaaaccgaattgcttgtatggtgaaaagattatcataccatgaaattgtggcaagtgcggtgccaagggccacaacagaagcacttgcaactaccgagattaaaaatgaaattttaatttagtcgtattatgatgtgttgtactattatgtattgttattgaattcatattggactattatgtattgttattaaaatttgtggtattttatttttaatttgaggcatgaacaaattattttactaaacagtaattgggttaaatagaaaatttagcatataataataataaaaaaaagcacaatttttcataaaaatatattataattcattgttaatctccctgtccagtatttggcacaatccttccaaaaaaaattattctatgttttggtagaataaatctacaacccatctttgtctaaacaatgacatgttatcatcattcactacatcgagtagtagctcaagaatcttatgctttatatgcttgacaacgtacacacagtaattgccactgcatcagtgaaaaagcaatcagttagtgttattataaccatatttattaatgtattaaattacttagtaagcgtattacctcatctttgtttggggtacttctttcctgcccttgagatcccaagtgaatggtctgacttgactttcgaaggctgtcatctgagggaccattaccatgtagtgggtattaaatataccagaatgatcgatcgatgatgtgaatatatgctgtagtaatcatccatcaatatcttcaattaatttgtagtgattgagccaatactggaatcgaggatgaataattttcacaactctaaatccacctcgatggccacccaatgttttggagcatgcaagaacaaggccatgtatataaattctttcttctcccaagaaggcaagactggataatttatggttctgacgtatatttacatcttgggaacatg

SEQ ID NO: 312107 - DNA, 1950 bp, Cannabis indica
gtatcacatcggtacagctagagtatgactagtgtgccgagtataggctgatattatggttaatagtactgtcgtacgaacattgtaaacgcagtaccgtgtgggtcacgaggatagggttatgattgggggtatgggcgtctgatcataatccaggttattgctatgttattgtttatgcttatcttattgagtctgtcgactgacaatgctatttccatgtgtaggtaagggcaaggctaaagttgaggagccgtgaggccttgagcgtacgatctttgggacatcagggcttttgttgttttgtcgctaggcgaaaaatattttatatatgagtattaaacttttgaaaatgtattttgtaaacgggatcccggaattttataaatgtttactttatgttttgatgaatcagagaagttctattgctcacaaacaaagatttttacaaactaattacaccttttaaaggccaagaataactatacaagtatcagttatcaatattgctcttatttacaatcatttacagcttgtgaaaccagtctttattctcttcctttactcgttttggaaaacttagagaaatgtgctgcttgactgaatgattgagttgctggatcaaaaggtctgaatgtacctaactttaatacaagattttagcatttcgggctctccaaatcatgtacaccagacttgagatgtacgcagcaaaggtaagcttccgaaacttgctcatttttgctcttcctatccacctgagtaatcgagggagatcagtagcagtagcatgccaattcagccatgctttcactactaacaaacaccctgctgcaactgtacagtccaaaaataaatgggaacatgtttttatatcctgacaacaaaggacacaacacgtttcttcaatgatccccatccgtgctaatctgtcttttgtttttaatctctcctggattgcgatccatgtaatgaaactgtgtttgggagtgtttaatctcccccaaacctgttggctccagctcactttctcttggttcggcctcaacaattgataacctttagcaacattataaggtataagagtagatacctggccagcacaagtttctttgaacatatctttcagcagaacaagtcttctccaataccagctcccttaggtagggggcttgtattgccaccaattttcatctcggatatagacccaatggatccatttcatcgaaagactatcttctttgtttgagatggcccaaatgtacttccccatggcttctagattccattcatggactcttttgaacccaagtcctccacaggttttagagtagcatagtttctcccaagctatcaaaccagggcccatagttttatcctgacctgtccataggaaattcctacatatagcttcaatatcatggacaattttctgaggcaagatcattacctgagaccaatatgcatgtatggataagagtactgagtttatcaagacaactcaggctgcaaagacaagtttctcgatctccaagttcggatccttgctgtcattttctctacaagtgcagagcattcgttctttgagatctttttggcataaataggtactcccaagtagtggaaaggcatctgtttttgactgaagcctgacgcatcaagaattcttgttacttcagagctagccatattgcttcaatatatggctgatttttggggattaggctgaagtcccgatgtctggctaaagagctttagaccttgcagaagacaatacacactcttgaaatcccctttattgaagacgaggacatcatctgcaaaagcaagatgatttattttgagctccgagcatctctcatggaaattaaaatcctcttttttgccaaaaactttcaaaattctagaaaggtactccattccaatgacaaagaggagaggagacatggg

SEQ ID NO: 312108 - DNA, 1023 bp, Cannabis indica
ggtaaaggaaaggccaaagttgaacatcaatgagttcagagctcaagggatgattgtacgtgtcgagacggtgcaatctggagtgttcggcctttggacaacttgggctttattttgtagtcgatgtgcaacatatctgtaaaagttattttaaatatgtatgtaaagtttaaaaataggatcctagtattatgtgaatatgtgtatatgtttataaaagtttgaaaattaaatcaaagttttaaattatcacgattgtcaagaaaacctttgattagcaaaggtgtgcactgaatttagaaagtaactgtagcgtgcctaagtattagagcgttgcaattttggtatcagagccgctaggttgtctacagaagatcattaagacatgtacaatcatcgttagagaaaagctcgactcagtaagcctttacttgtttagtaatttatgtgattagaaatgcatgttaggaagcataatagttttatgattatattttaacgcgttgccttaaaatccataagtatgatatataaagtatatgtgataattgtatggccaacctgacttatgggttcgcatgctaagtcatattatatggacggccagcgaaatataaggagtcaaggtaacatggtcaagtctgaaggtggtcgaggaggtcaaaatcccctaaatccctgtgaacgcggcagaggtcgtggaaagtttcagggtggtggatatgaaaatccaccccaagctccttcgattttggagcaaaggtttgtataaatgtaagcgcggattctccaacaacacacaaaaattttcaggctaagacaccagggtcctcctacagtgcatccaccgaaagtaccaactactttggttcgagcagtgccagtagaacaacctgttgttagcaactgtatggaacctttatatgagaggttttgtaagcaggcgtgtaataccctagagttatgaaatagattagcaaaaacctaattagataattatgaataattgaggaattatattat

SEQ ID NO: 312109 - DNA, 406 bp, Cannabis indica
acccaaaccctgactcaaacctagacccgaaccttgacccgaatctggaccttaaacctagaccccgaattcagtcccagacctggacccatccccatccccagacccgaacccaaaccagcactagacttggtttagggtccgggtctagtttctgggtttgagtcctggttcaggtcaggtggaggtctgaggtctgggtccgagttgaagtccaggtgcgagttttaggtcaaagtttgggtttgaggttggggttgggtcgagtttcgggtccgtgtccggcgtctggggtttgggtctgtgtctaaggttcaggtcctagtccgagtccaggtccaggtctgaggttggggttcaggtgtgagttagggtccaagcctgggttcaagttcgggtccaagtc

SEQ ID NO: 312110 - DNA, 2327 bp, Cannabis indica
tatatatatatatataaatatacttagttaataaaatatatgtactaaaacattaacaatattaaaaaaaatatgacacacattcacaaaagagcaataagggtaaaaagaaaaaaaattaaagtgcaacatttttgtgttaatagcattactaaatgatatttattaactctcaacattatcatattttgattggtacatagtataattaagtagtgagtttcatatagcatcatatgacaataccatagccgagcacaatgacggaactagaggatcagagagtggcatcaaacttgtctcaagccaattagaggtcttggacagataaaatataattaaacttttttatatgaaaaaaaattattttatatatactggtaaaaattttaaatatagtattttaaaaattatcatacctgaaattcgactatgcatcagaaattgacatgtgtcctactgaaggaatgtgactcaaatctgataatataatcatggcatatcattaaattcgatctaaataactcgtcccaattcgatataagtttgatagataatgttcaaacttgttggatgcttagtcttatgcgagacaagaataataactattaaattggtattgacgagatgtatatttgcctttggataaactcagttagaagaggataccctcctgcacgagcagagtaaatgtagcaacacttaatcacctcgcgatacacatagtatggagattacctcgcattattaataccaataaaggaatatgacgagatgaattactcttcaacacttagcgttttttcctgacaagaagaaaaactcacatctgacgagatacaacatcaagtcagcaataaccgtctagaggatgaaaataaagagtgattgggtagttgtcagatatatcccatgtgtcattaattgaaacgtggagattattcacattttatgaatagttataattgaagcaatcccaaagagaataattgtcaacttatgtgcctataaataggggcagaatctatgagaaaagggacgataaatttgagagagaaaatatccttatttaaatactgatattgtattttgtactcgaaaaatatccctaataataaggactcgtggagtaagtagattttagctacaaaaccacgtaaaatatctagtttttattaattatatatttatttttgtagtatatttattgcaaaagggctattaatttggttagcgaaaatctacgttaacaatttgatgctttcattgagagccttggtgataaaaactctgaaaaaaccttccttataaacaaaaccaactcatattaaatggttgataacaatcaacacgacggtaatcgtcttgaagaaataactcatcgtcctggcaaagaacctatgggatctcataaaaccaacacatctgaaataccacattcagggagaaacgatggtaacttcaatgttgatggtgatcaaatcccagaaagaagaaatgaagatgcctatgaccctaccagatacgtaccactggtagaattagagaacatgaaacttcgacaacgtttggctgagtcgaaccaacaaaatgctaagttggaatgagaaactgctgttgccaaaactgcacaaggaacagttcttcaaaacaaacctgatcatactataaggagaccacgaggaagacctcgaggatccaggaccaggaggcaggaaacaaaccaagggaatctcccaaatacccaggaggaataacctgggaatacaagggatgtcccaatggacataacaaatcaaccaaatcctaataatgcaaggaatcaagaacatcgacgagatgttccacaaacttcccatggatttgctaactaagggaataaacgaactgacatgccagaagcatctcgcatgaatgaagaggtgaggcaacctcgactagggaaccagagaattcctcacaataatgaaagaagccctagaaatcaaccaaggtcaagtggacttcatccaagacatcttcaacgtccttctcgcgcatatagagaaaatatacacatgtacttaagtagaggacgtgtatttaatctcttccaaagaagaaggctggtgcaacatgaagcaagctcaagcacgggacaatcacgatctcgtgggcatagtcggtcgagtagacaaacgcgagatgggagtagatctcagcgttactatgatgatcaggaaagcatgagcaatttgcgaagttatcaatctaaaagttactcagatacaagatctgtaagtaattatgagcaaagtgttggaatttattttttaccaggatcttag

SEQ ID NO: 312111 - DNA, 826 bp, Cannabis indica
gatcctggtaaaatattcccatcacacacgacctgtaaaatgcacaaggaatggaactataagcttcgaagacttccgcaaaaggaaaaaaagtcagccaacttatcgaaaaaatatcgaaaaactatcgacaaaattattattccttaaaaatcaaaacccatacaaactatcgacaaaccattgataatagtcgataacctatcgacaaaaaaatctttcaaaaatgaaacgaaggaaaactgtcgaaaaaatattgacaatatgtcgataattttaaaatctagaaaaataaagcataagcaaaattattgacaaaacatcgatatcctatcgatatgcaataaaagaaatgaaagaaccagacaagctaacactatcgactgtcccaattgatatttaattgatttcctatttccagcaatatcctttcgataatttatcaatatgactgcaaaaaaatgtacaaaccacatcaacagatctaaacgttccaattatcaccagaaaaatcacaaattcaacaaaaaatgcaagaacaatcaacaacagacaaaacttcagattttattttaaaaaattaccttttgtgccatgatggtggcgtttgaccaagagaagaaatgtcaggttgagctgtggtggttggttgtgatgccgttcaggaggaaacgtcctctaggtggtggtgtttactcaatgagggagcacacgagggagaggaagagattaaagcaagagtgagagagagagagagagagagagagagagagagagagagagagagagagatagtaagtagagagagagagagagtaagaagaag

SEQ ID NO: 312112 - DNA, 1077 bp, Cannabis indica
aaatgtttaaaattccgtgaaaccgtatttttgtaatttttgtgtatttatgaaataatccctaaaatatgtacctttcaagaacccagtaagcaaaatgcttggttactaaaaatcctccaaacttgcttagctagcattgtttgattaaagtgggataaagatttaaaacctagaccgccaacaaatttagatttacaaaaaaaataccaattttttcactgaatcttattcttgtaacccatagagcctcactaaaaattagccataagagattcaatcttttgacaaatagtaacaagaattctaaaataagacataacaaacgacgggatagcttgaataacaactttcaatagaactttcttaccaactttagaaaaacatttacaattttaagaatttaaataggtattgactttgtctaaaagaaaattaaaagagaacttctaagatctaccaaaacaacgaggaagacttaagtaaatactagtaaaaggcttgttatcaagacctaaaatgcctaaaaaaagattgggacacccgatcatgggtattgggggagaaaagagctgaagacttattaaagttaaccaattgacctaaaactttattataactatctaaaacatctttaatagctagacctagctaactcaagatccaccatggagaatattaaattatcatctgcaaataaaatatgagaaatattaagagcaaccctacaaatttaaaacccctaagagaaccatcaactttcttaagatttatggcagctgaaagtgttagagtttatgtcctgaaaagtctgtaaagacatttttgattattaaataaagagtcaaacatttgaatatatgtgaatggttaaattagtaatatttaatattaaataatttatattaactactagaaaattcattattcatgtatgaggttgtggcatataatagagattatatatgaaaaggactgatatgaataaagttgactttattaacatgtcgtttatcataaagacctaatttatatcataatgataatcaataggagatcggtctaaatcctgagtta

SEQ ID NO: 312113 - DNA, 1489 bp, Cannabis indica
aattggatggcatgaagacaatctaattcaacactaaattgccagtatttccgttgtattcccagccgaagaccttccttaattgcaaccaattcagcacgtaatggaggaacctactgctgcagagaagtagcagtagcaaggtgcacagccccagcagagtcacacaacccgagcttgacccacccccattcggcctagcccccccgtcaacatttatcttcatcaacccctcaacaggaggacaccatctggcactgattctctgccgcttcctactctcctgttgatgttggccttgaaactcagacaagaacctagcacaccagtccaccacctctgctggcataggtattcaaccaccatgtttcatattgtttctagtataccattgctgccaacacataataagaaacaattcatactcaaccttagtccataccttaggaagccgcataagaaaagccatcacatcttcatcccaaactctctgtagcttgttcttaaacccgctgagttgccacacccctttgtttgctttgcaaccccatgtagcatgatagacagtttctttaaccccagaatgacaccattgacatccatagtcaatattcatttctctcgaagcaagcgttgcatttgtaggcagccatgagtgagccaaattccatacaaaatgcttaactttttgagggatattcagcttccaaatcaacttccaccattcttttatgtgattgtcatctgcttgtcctacctctttcttcaattaaagtgccatttgatacccactcttgaccgaatactcgccattgttactatagtgccacaaaaccttgtcttccatattggagctatctgctggtagttgtaggattagattcgcatcatccggattaaagatagtacgaatgaaatcctcatcccaatcaccattcaacaatttcaaatgtatcacccgtagttgcgaaggaatactgggcctgtcataaaccttgaaactccgaggtcggggtagccatggatcttctactattcgaaccgaactcccattactattcaagtgaattagaattgaaggaacaaatttacatatttttaaagttggaggggtattatttattaaaaaactaatggcaataagtgttaaagttccgagaagaaagcatgtgtactacagttgtagccaggaatcatttttatagggtggtttaggttcaaacgtctcggttggattttactgatgcgttatgcagagaggcagcgacctgctgcttggctttatcggttgcaaatgatattaggtctaagtttgtaatcgtggagagcaactttagagtagttattaattaatgctcttaatgggaaggagccccattacgcaatcgaaaactatgtctcattttgtaatgggagaagttgataagtgccccttttataattgaattaactaaaaatacctgcagaataaatttagttaaaatatacc

SEQ ID NO: 312114 - DNA, 531 bp, Cannabis indica
aaaattaatatttttatatttaatgtgaatataattaaatttcaactaaccttaattggttagataaattctttgttgcaatgtctgtggtgtggctgtgtatgacagtcaatttatatatatatatatatgttgatctcgaaaaatgatcaatcgacagcgggttcgtgatgatccgatgcttgccatgtgtgtgcacaaataagaatgagacaataagatttgttgtagaggttcgacccccttgtgatagcgggtataatgtcctactctccttttagttgtattatactgagggaattactatctagatcgctataagtgggatctgctatagtactcttaggattacaattaatgattaaacgcctggcaaaactcaagtgttggaagcctaggatgttggacaactttaaggtggcgtgtgggggagaatgaggaagagaaagagtttatcagatacttgagatcaggtttctagcttagaggcagcttaggcaacttaaattttcagtcagaggttaaggcctt

SEQ ID NO: 312115 - DNA, 4198 bp, Cannabis indica
ccctggaagaacatagccttctggttgctccatatagatggtttcttcaagaattccattaaggaaagatgtcttgatagttgtgagcgacttcatgtccaaaaggtcttggatcttgtctagatttgcttctattcccctaatgttgattatgaagccaaggaattttctcgagcctacgccaaaagagcacttgagggggttgagcttcatgttgtagtgagaaggattttaaagcactcgtataggtcctccatatgcccccaacctttttggacttgacaagcatgtcgtccacatacacctccatgttgcggccgatgagatctgtgaacatcatgttcaccagcctttgatatatggcccctgcattctccaacccgggcatgactttgtagcagtaaaggcctaggtgaagctagtgtgctcctgattttgtggatgcatctttatatgattgtaacctgaatacgtgtccatgaaactctagatttcatggctagctgtggcatctactagctggtcgattctgggtagcagaaagtagtcttttggacatgctttatttaggttggtgaagtcaatgcatactttccacttcttattgggtcgtggaaccagtactgggttggatacccactgagggtagaatgcctctattatgaaatcattggctctcagccttttgacctcatctttgagggcttgggcatgctccttgtctaataactgccttttttgctgaacaggttagatgcttggattaatgttgagtgcatggggtagattctgaccatgtctccatgtgaccatgcaaaaaggtccaagtttgcccttataaattctattaatattgatccaatttctagagccaagcctaaactgatcttcagtcttcttgttggggaagtgggatcaacctccacttcttccaacttttctacaggtctgaagcttcctgtaggatccctaaagcgaagatctatgtctatgtccctgccttgggctagacttcattgccccttattgggctcgttctctgggcttttagcatgcatcttctcgtttttggccttgaatagggccaagttgtagcagtgacaagtagactgctggtctcccctcacacatgccaccccatgccttattagaaatttaaggcagaggtggtagatagatgtcaatgccttcaagtcattaagggtcggtcgacctatcatggcattcaaagttgaatgtcaatcacgacaaactgcaccgttaatgttttggtggttggattttctccaactatgaggggtaatttgatataattaacaggtgcgatgccttggccaaagaagccatacatcacttgattgtaaaggcaccaagttggtgtgttagagccccaacttttcatatgttgatttgaaaataatgttggaggaggctctattgtccaccatacatcttgccacagtcatgttcccaatttgtacagtaatgaccagggagtcattgtgcgggaaactgacttgggcagcatcttctttggtgaaggagattgtgggcttcgtaggcttttgttgcttagagcttcggtcttcaacagctaggatatcgcttttaggctcgtgacttagtttccgagcatagcgctccatagctttgctggtccgcctgcaatgtggggtccaccagtgatgacccttaggtgtcctaccataggcaatggcatcagatctccgttctgtcctccttgcacctaggtctggttatttttcacataatgacgcagatggggattgttacaccttattaggtattgaatctccctcttcaagttttgatactcactagtgtcatggcccatctctttcctaataagaaagggcttttggtatgggactgttccctgagtggccgtgaagatggcctcaagcttctctgttaggagggtgaagcaggtggacttctcctccttattcttctgtggcgtgggaaaagtgttgaacttcccctttttgccattgttccttcaaaagctgtcggtgctgtgcttgtttttagtatttttgccactagaattctgggcagaattacttgtgtctacttgtgtgcctggtgactcatgaggttgttggatgtctcgtgactgcctgttgttaacataccttccctaggcttgtcgtgtggctacttcaagtttgataaggccatcagctctatcaaggaactccttcatgttgttggtagatatcctttggatattttttcaaaagacactcaacgagagtatgccccctagtatggtcatatatcagccttcttgtataaggcctttgactttagtagcctcggccataaacttttggatgtaatccttcagaggttcccattgtcgttgtttgactttgacaaggtcttctagttgtgatggtacaagtctcgaggacgagaattgtgtgtagaattctcatgggaactcagcttgagagttaaattttcctagggtgagtttaaagtatcattattgagctattttcggcaatgtggctgggaaaatgcagcatcgcacgtcaccagtaaccttctggagatcgagttgcatcttgaaatattgatgtgagctagtggatcctatcgactggtatcatcttcatctgacattttgaacttgggtaagggcaaggcatttatgtatgctgagaatggcaatccccttgaccaatcaagtttaaggtcaaaaggctttgggccaactatgccttgtatcatgtccctgagctggtccaactgtgcttgcacagaaggatctattgttgtggggacttgtttgaccgaccctccttggggaggctgtagattctagagacatagaggctggctgtccgtaccctaggaaagtgtatggtgaaggtcaactagccccgtgttaaactgtagaccatggccgaccattccttggtacgagagttggccttggccggctaggcctacacacacctggttgctgtgcttggccggcaagacctgcattgggcagggtttggctgcccagtactcctccattgctggccagacctggaaagggtaaggtctgctgcttgtgatgcttccatggttggctagacctacaaagggcagggtttagccgctcgtgactccacggtcgactagtgctggttgtgtgttgtagggggtagatcacaccaattgttggagtttggcagatctagatgtctaaagtgattgacttcactcgtcgaatcaccattttgggtgtttccacccactctcgatcctcttcagttgaagattgacctcagggcacctcgctccccttaaggaggaagtggtttactctggctggccaaaggtactcctgttgatggatggccagctagtggctgcacaataggggtgttgctgagctagagatccctggccgacccctcatgccgttggttgctgggatctagctattttcatcatttgacctctgaggcaaggtctgtcctccttctggcaagggaagatctggccacttttatcgattcactagttgaaccgtcttattaaattgttggcctctcgattgtgacgaactaactctacttggtgagatcgaaggatgtaatccttgtcatccatccatctcacgaattcgtatctctactgagcaaaaacagcgcaatcagcagcgcattgttcttcagttaggcatgcacgacctatagcttctctgagtcttgcaacttaaggtcttctcctaagtccagatggggctcgccaatcgcaggcttgccaactcctagggctgtctctccagcgtagaaccgaagtcgagatccagttgttgtcccaaggggctatcgcccctggatccttccttcagtaggagacgccaatggtgggtcttctcttggaggcaagggcctgccacttggttccatcgggatgcctgtatcaatttggccagctgtaatggctagagttgtggtgcctgttgtggtgacaggattcaccacatctatagtgttcatggggattccagttgtgactggaacctgagtacctggatctgtaaattgtgggtcttgagggagacccgaagatgcagatggtgcgagatttcttcttgtgttcaccatggcatttgatcagatacgatatccatcctctcaatgaaagcaccaaactgtttgttgggttt

SEQ ID NO: 312116 - DNA, 1298 bp, Cannabis indica
gtcacggggtacaggttcgggttgagtttcagtctgagtctgagttcgggccttgatctgggtccggggcgaggttcgagtctaggtttcagtctcggttagggattgaggttgtgtccggttaaatgtttagatcggagtccaggtctcgatcctgttccaatatcacagtccagttcaagtttcggttttgttcccgagtgtgggttttggtatgggcgtgtgtttgggtcctggtttgagttcgagtttgggttcgggttcaattctaagtccctgattcggacatcgactacgtgttttgtccaagccccgggtccaaatcaagatcttgatctcgggtgctgttctgattccatttcgggtatgaggtgaggagctaggtcctaggttcaagtccaagtctagggtcgggtactaggtcccagtgctagtttgagtcctagtcttggttcaagtttgggtctgtgtgggtttttatctcggttcgggttcaggtttgggtcctgctccttgtcctagtcctagtttggttccaattctagttgtgatttcgagttcgagtttgggtcggggttcgagtcctggtcagaatttgggttcgggttaagatttcagtctaggtccaaatcaggctccgagtgtgggttagggtcctgggtctgggtccagatgcgggtccaagtctcaagttccgatcctgatgtgagttcgagttgagttctgggtctgagtcctgggttccgatcccggtctgggtttgagttcaggtcttggtctaggtgtacgtttgggtctgatgggtacgggtttttcggatcccgagctgggtctaggtcttagttcgggtaccaggttcaggtcttggtctgcgtctgggtccgagtctaggtcccgtgtttcgatcccagtcagggtctgggttggtattcggtttcgggtctaggttcgtgtccatgtattggtctgaattccagtctaggtctgaatcccattctcgatcacgggcttggtctgggaccaggattgagtcccgagttctggtttaggtttgggtttgcgtctcagtcttagtctgggtctgggattgagtttcttggtgttggtccaggtcctggttgtaacaccctaactagaataggcgtattacgtgatttttttaaacgtactatgcaggtcgatgctaatcactgaggtttatcgaaatcgtgattaattaaaattttttgctttttaattaaacttatataatattttatacaaaaatactcgggatcccgattacaaaacactttaca

SEQ ID NO: 312117 - DNA, 721 bp, Cannabis indica
ttttaaagccaatacctccagctttcttgctttgacacactgtgtcccaagcaatggcaccagcccctgaaacatgtgttgcgctttccatagaaaagccctgcatatagattctatttccttgatcactttgctaggcaatagcatcacctggctccaatgagaatggatagacattagaactgagttgatcaatactactcttcctgcaaaagagagatgtttagtactctaggttccgactctccctgtcatcttctcagctagtattgcacagtctttactagagatctttttagcaccaatgggaacccctaagtatgtgaaaggcagctcctgtttggaaaagccagaagcagcaataattctctttagatccctatcaggcatattactacagtatatagcagatttggttgcatttgggaacaaaccagatgtcattaagaaaagtttgagcccctaagtagcatttaaactcaattgtgttattattaatatgagtagcctttattttaactttttttttttcaacttttatggaagtttaaatattttagttacaatatcaaatttggaagtattacaattattttttttaataatttacaggaaaacgaagtacttaatgttttggtttatcaagtgtgtttaaaaaactttaactatatttttagggataagttgaaaaatatctatttatagtattctttaatcaaaa

SEQ ID NO: 312118 - DNA, 1272 bp, Cannabis indica
tcaatctccctctatttctgagctacaatatcaaaaactttccttttcttcatgccaaacaatgtagatgccttggcaaggaacctgcaaatcaataaataagtaagtatagattacgacaagtatcgtaaatagtagtttccttattgtaatcataacaaatcatcaaaattattttttaaaaccatcataggcttgaatactattctcatacaattgtattaaattttcaatcaacgattccaaatatacattaacattatgtccgggttgatgcgggcctgatatcattaaagaaagtatattaattttttttcataaccagggaggaatattgtacataacaaggaagtcaagccatgaactatgacgactacttagagatctatgtggatttactccatccacaaaccgagacgaatatgtcttggtttaatttaaatatcaggatttatgtagtttactttttttccaagcttgggaatctgtaggatgtctaagttttccatctttcactctcttgatctcatgccaaatcaaaattttcagaatagtctgcactacgatatcatcgtttaagtcgcagaatcaaaggcatgtaccacatcacttttttggggataagttttctattctccctactcttgtttactttatggcatgataaaccacaagtcaggcaataatccatgtttgcatattccttacgatataaaatttaattattcagaaaagcatggatcttttcataattcaatcctatggaatttaaagtctttttcacttcatttgtagattccgagaagcaattgtcaaatggaaagatatctttaaaagtagtagaaaattgagttaaacatttatcactcactctattttctgctttgatgttgtataactttaccactattggtaatcttagttttttacaaccatcgaacaacggtttatgttcatcactaagaaaattatcgaatttttcaggatcattaagaaattcctcatgtgctttgtcaagcaagtccaatggatgatcatcgaaatcattaccctcaatatcatctactccacgctttcctaatagatatagatcataaactaaatgttcgccataccaagtagtataacttatattgaaacctcataaatacacgcgatccttaatcatcgtaatatttcctttagatctattacaataatctacacatggacaatgaatacgttagagatttctagaattctttaggacaaactctataaatgcatcaaacc

SEQ ID NO: 312119 - DNA, 1450 bp, Cannabis indica
tcttcagatcagatctaatcgcatctgttgaatccgtatccagattgtgccaagctccaacgatcgtacaaaaactcgtcccattcttcttctcgctgatgaaggcagggatggttccattactgatttggatgtctccgcctctggtagcagaaggtgaggtggttgttagggatggttccgcaatgtatgttactgtaaactataaataagataagatcctaatacgataaaattaacacataagaaattaagaaatccttatattgatggcagcagaataataatgacttcttccatttaaaattttagcccttgatttctttctgcaacagagcattatcaagatctgaacctggatcttctctcatttagtttggttggattcttcataatcttccacactatgatcgagtacttgacttgatatgagtggacatgtactctatcactaatgattcaaatttaatgaagaacaataggaaggaatttcgaaatataaagaagaagactctcaattttctagttgtctaacaaagaatgaaaactaggttattagagttggatgagaatgagagccattttattccttttatagtatttcaactagggtttagatttaaattataaaaaagataaaataatagctaaaaattacataagtggccggccatacatagtgggcttcactggtttgccattttattcaacaatttatctttttttttctactaatgtcatattttccaatttaaattctataaaagtcaaaattatttatttaataattataattaattatcaatcaaaattgtcatttatcttatttattaattagaccttataaagtctcttaattaacaaataaattccaaaaattcttttcttcacaattaagccattctttagtgataattcataaataagacatagtctaattttaaaattataaatgattaattaaaaccaattaactgagtttacaagcagtattatctcaactaaaattgttatttatcttatttattaattataccttataaagtctcttaattaataaataaaaacttcttttcttcacaattaagccattctttagtgaaaactcataaataagacatagtctaattttagaattataattgattaattaaaactaattaactgagtctacaggcagtattatctcaactagtgtagggaccatgaccttggtaaattctctaacttattaattccttctaacttcactatagatttagaattgcgctcttaattatatagaacactctatatgttctaagatatagataggctattgattatccactgttataattcaaataatcaatgatcctctataaatgacctacattgagtaggaacaaatttaccgttctaccattcactagattttatccttaaaatacttacctacctataaatgata

SEQ ID NO: 312120 - DNA, 768 bp, Cannabis indica
agagagagagagagagaagagacgaaaattggaatttatctaattttgaaattagaaattatttttataattttgtcaaactatctattcgttcctaattttggtaagtccgtaacatttatctattttatttttaagaggtgggaggtggtaatacgttttttaaagtgttattgtttaatgtagttaaataaaaaattgttgtagtgtctgtttcaaaatcttaagatctattttgataagaatatttaaagtttgtgaacgatttggctgtccaaactagagtggggaaagttttgaactcttgttgtgtgaggagggattgccccttgttaatcttattttcctttcttaatttcatgattcgaggttctctttcaaaaagaaataaagttaaaagagaggtttgtttaaggttttttcatattaaataaagagaaaaaaacttgtattgatgatattaattagatggagagtttgagctcaagattttaattgagttctttctcttgatgtatttgagtttgtacacttaatgcttactgagtttactaaaaaaaaattaaaagaaaaggaaaaaatcatatacgcactacaaaattttttacttttagtcacaataaaatctgtgactaaaagtgaaaaaattttgactaattataaattatgattcttatgttgtgactaaaagatccgtggctaaaagtattagttacaaaaattacattttgttatgaccaaatgtattttttagtcacaatacttatt

SEQ ID NO: 312121 - DNA, 834 bp, Cannabis indica
ttttttttttttctctgaatgaatcctttactcatttttaatattaataaaaaaaaaaaactacagtgataatggtaacccttttgaaatatgtttatcccaaagttctgtacgactcccaaattgcaaaaagtaaaataaaagaactctgattccaatattgtaaaaaaaaaaaagcataataacataacattcttactataaatgatcaactagtaagagttaatatgtagtcgaaattgtacatcatttataggagacaatcataagaataataaatttcacaaattcaaattcaaattcatttcgtaaaatttattaataagattcaaatgtttgcatcgtaaaagagaatatttatggtgatgtaattaatttaataggtatgtgcaagtagagacaaaaatcatagctaaaattatttaaatcttcagtttggaggaggcaaaaaaaaataaacaatagtaagtatttctttctaatcttatttactagaacactaggctggactaaaaaattatttcaactaaaagttaaccaaaaaaaattaagatcttttgtaagattaatgactaccgttatgaatatatttataggactttctagtgtgggaatttaaaaaatactctatcggtagtgatttaaaaataaaaaagatcacattacattttgtggatataaagagagttcatggtcactaaaatatagtatattgtaaaaaattagaattgacttttagcatggattccactaatttaatgttatgttttgatgtaaaaaaaatactcattttctttctttttttaaaaaaattacacaataaattaaaacact

SEQ ID NO: 312122 - DNA, 1400 bp, Cannabis indica
caccgggtatagactatgctgaaactttttcaccagttgttaaaccggttacagttcgcacagtattatcccttgctgtctctaagagttgggctgtcaaacaactcgatgttagcaatgccttctcaatggcactctaactgaaaccgtgtacatgaaacaaccacccggcttccttgactccagcaagcctgatcatgtatgccttctacacaagtccatttatggacttaaacaggcaccacgtgcatagaacaacaagttgaaaaacagccttttaaactggggttttgtggcatccaaagcagacacatcattgttcatttatcactctgcacaggcctttattgtattactggtttacgttgatgacatcttagttacaggtccaagtgagtctctcatcaacaaacttatcacagatctgaatcgtgacttctctctaaaaactttaggtgaagcacattactttttgggggtggaaattttcagagactcgacgggaatgtatctttcccaaacgaaatacatcaccgatctacttactaggtcaaatatggaaggagctaaaagtattcctaatccctctagtgctgccaccaaactgtttctcaatgatggtgaacccttctctgattcgactttatacagaagcactattggtgcattacattatctgtctttaacaagacctgatatagcctatattgtcaacaaactcagccagtttatcaaggctcccactatgtgtcactggaatgcttgtaagagacttttacgatatctcaaaggaactatcactaaaggtttggtgcttcggcctacatttgagatgacacttcacagctactctgatgccgattgggcaagtagcattgatgatcgaaagtcaactggagggtatgtcatctttctagggggcaatctgatctcgtggactacaaaaaagcagcaagttgttgcacgttcaagcacggaaagtgagttcagggcccttgccaatacggctgctgaactcaaatggatatcgtcactgttatctgaacttcacattactctacaacattgtcctattatttgggtggacaatcaaaatgcagctgctcttgcagcaaatccggtgtttcatgcgcgttcaaaacacattgaacttgatttacactttgtctgtgaccagataattagggctgcacaggggtcaggttttcgggtggtcgggttcgggtttttggattttgggtggtcgggtacagcgggttttgggtcggatttggcgggtttaatgtgtccgggttcgggttttagtaggcagtccgaatgattatttttgggccaaaataaaacttgatttttaaaaataccatcttttttttattattatttttctatttctattcagc

SEQ ID NO: 312123 - DNA, 1149 bp, Cannabis indica
ccagcataaaatgaaaagcactgtcaaagatgacttttctcagcatgtaaatgcgctaataaaagttagattttagccactgcaaatgtactctggtaaaactttgacctctttgccagcgtagtttgcgaaatgcactgataaaagtaagaactgtgctggtaaaagtgacatttcttatagtgaaaaatgcaaaaatatagagcatgaatttatgcccgtataaaaaataggttggtctatttaagaaaaacaggtcggcccgaataaaacactacacaaatccgagcatagtacgaaattatcagacttgtgggtcatgtcgggtctatcctataaaattattacacgacacgagctatatttttttatggcatgacacaatacaattcatattttttttaaagtacgacccattttttttatagtatagcataataagatttatatgttttatgactaagatacggctcatattttaaaaaacaccaaaaatataaagtttaaatatcctattattgtttgttctttggcatattataatacacgtcaatatccttaaatgcaacttaaatattttcattgctaacatctatattttttattaatatattgcaaattctataaaatacccattatcaatattaatggattatacatcaatttttgtaaaccgtctaatatgaagaattcgtccaaattaaattgagataatttgtcaaaaagttaccgaaaaatctcacaaaaatataacccgcataatttttatattgaacggataaaaattaacccgaactaatctaaccaactcgattaatatgatttattttatatatacatatttttattatatataatataatataattatataatttatatacatatgaaaaataaaaaatttaaaccactatatttgttttatagtgattaatttgaactttaaattccatctatatatttatcttattattataattaactaaaatataataattaaatgtaaaaaaaaatattattaatcggtttgcgcaggtttatctaaccaaaccgaccaattcattaaacgggtttaaatttgatttttctttaattgaacgagttatacttatatttttgtaactcattttttatagattgaataaaata

SEQ ID NO: 312124 - DNA, 1130 bp, Cannabis indica
ggccatgttttatcaaatgaactgcacgagcattatagttacaagcaagaactcggcaaatcacagaattttgtctttaagactatgctagcatcatagaaactcaatacttattcacacaactaagagtctaagacaaattcagccagttttgttgattgatcttaaaagatttatatccctataccttaaaggtcaacccaatcacaattcagtacagcagcataggttgaagaaaaaagagatacaatgtttttttccaccctaaaagatacagatagaatgttgataaaatacaactactgatttgttatacataaatgctgaagcatcatagaatgttggttgtgtgagtgtgtgtgtgtgtaaaagggaaagaggttctaatcccattgtgattatacaaataagctactaaattgcagtataaacgaaaacaaacctgtagaccagaatcaccagattcaatggcataaagttttacaccgagataaacaattcaatgggaaaccaaattgatctaacatgtttataaatgtattaccatcaaaccaatccctatataaagcaggcatgaaaaattggattacttgaaaggaaaggaaaggcatagaaattaccttctgagaaagatgaactgtgcccttgcctacagcgagaggaacagtctcactcaatgtcaaagaagtttctttctgtgtctcttctccacatcttccacatttcaactacaacaatcaaaaagacaaatattacccagattaaagattaaatttataacattataaacactaaattaaatttatggaaatagttaagatatgataatggattacaactacgattatacatgaatgatggaagtaagcagaatccctaatttgaacagaatagtagttcattatacgaggcaatggcataagaacagagaaattggagtgttggagagagagtgaccttgaagagataggagaaattggggtcatcgcagccaccttgaggctgaagatcggtgaggttctcgagctcagcggtgatctgaagcatatagttcaccatttttgggttttggcgtcaatccaacgcttctctttctcacaacttttatattttcctttttaatttatttt

SEQ ID NO: 312125 - DNA, 1234 bp, Cannabis indica
tcaataaactaatataaatactggaataagagctcttccatttatatcatttagtaaagttttaaggaaaccaacatttcacttctaaatagttatagatgttatacatttctcacatctatgattaacgttgccactcaatttactatcgagttcccaagatttaagtatgggttagtcctttggataagctggtaacaaacaagttaaagaaccagtatagtacaattaagttaaagcttaatcatctcagggttgggatcaattaacttaaggttaactaagtgatattgacatagaaaatatataacagtaagtttatgatatcttttctacttatacatctgatactttgctaataccctagaaaatatattctacatgtccaagtgtaagcaaaacacatcgctaattatcatgccagtgtaaatttagtatattgataaatcatgaaactaaatagtttgaagcatataatcatgattatttttcattgtacaaacaatactataaacatgagtaactatgtgttcggaatttaatataatttatagattaaatatataattatgaaagtaacatgtgaaccaagcattataaggtaatttctgatcttttattaacagtaaataatagaacataaaagcccaacatggcagacattcaaccttgaatctaagaaaatgacgtatcaactttcttagcaaagctcgaagaaacctaaacatgttttggaaagtttaatggtgggttctcgggaataaccttaatttgagtgttaacaatttccaatgaatgtcatcgaccatctttaacactaaaaggtgtttcaaatttttaaagcttgctaagtgatttttttggtttgaaggttcgaaaaaggtaaaaatggtaaattgatttctaaatttttatttataagaaaccacaatccgttccatcttaatcctacgtctcttataagatgggccagagaaagcaaaaacttgatctaatgatctggaaatacaaacaggttcattattatcataatctttgttacaacagagttaaaatgaaaattaaaagatttattattcctagctattttcatcataagcaaaagtaaaatgttagccaaacagaacttaagcctaaaactcaaataatacataaaacgattatgctgtagttttcaaagaataaataaaataaactaaatcttaaaacaataattttatgtatatatatatat

SEQ ID NO: 312126 - DNA, 1201 bp, Cannabis indica
acagtactcttcaaatatttctcccaattattcctacacagaggtttttatttcaaaactaaaattaatgctaaaaatttatccaacaacttcatttcacattttaaaaaaaaaaaaaaaaaactacaaatgtatacaagcaagcccttttaattgttcgaaagttagaaaattaattataataaaagcatacctgtgtcacaaatttggatcctttccacattatctgtgagaaaattgttgtcaagaggcactggaatgggtccatctacatagcttaagctcctcttctcaagcattctaagcattttataataataatcatattaattaaaaaaaaaaaaaaaaacctcaatttgacaaacagaacatcttctccaaaaattcacgatcaataacttaatttttataattttaacaaaagttcccaattaaaagggattcaaatacgtacttctccacggccaaacgaacatcttctatccgagctgtgcacgaggtctttaaacagacttcaactgcaaaaaaaaaaaaagaaaaaggtttgaaacgatgaagaaattgaaaattggtgcttaaaatgagaagctaattacaagaaaggagaagaatgaagaagaggtcttgtaacctgaaacaagaaatttttcttgggggagagtggaaggacagacggctgattctgggacgactccgtttagttcacacatttgggtatcttgtgggttttgcagagtgatctccatggaagcagacatttgtgtcagagatcagtaggagtaggtggaacgcatcagagagaagcagaaagatcggtttgactgaaccctagccaagccagtgagagttagggcacaaacgaagaaaaaagtcactctttgaaaatgagcgggaaatttgtaataagagacccactcccacacttcacgcatctaactggttcatattttccttttctcattcatttccaaataatttttcataatattaggtgctgtttggtaacacttttgtttttcaattttttaatcacaaaataaaagtaaaatttttgtttttaaaaaatttatttttgaaaaataaaaatgcgttctgtaacaacttttgtttttcaattttaaaaacagaaaataaagtgtgttctgtaaaattcatttttatttttattttttgattttatttaagtcgggtctaggtccgg

SEQ ID NO: 312127 - DNA, 1253 bp, Cannabis indica
tgttgctttcatttaagggtgtttagcgatggagttctaccctctcgaggttgcgagggagagaaagggtagctcttgctactgctgctgctcgataaacggatatggcaaagagctctacactacaaaatttatttattgttaataaaacagagaagagagtacaatcaatggataggtagagaaagaggaagaagatggtttgttgtcctactgttatttatagttgatacaaaggacacaggccatgagaaagtgggcattgggccatttctcatctgatttatatagataaaaaagatgtttttagctacacaagctcttgtttcatctatatatatatatttatatgtataattaactatattgctatttgtgtcattgtataaatttaaaatgctttttgtcttatgattgagatgcattttggggcatcttttgcaactatttactctgccatcctttctttttttttttgttttttttgttttttttgtttttggtttaaaacctttcaccatggatgcaatttttgaatgtctctaccaacacgaacaccttttttattggaagtcagtctgatttaaccatgaagggttgtgagtatacatccttgagtttattgggattatcaaaattaaaccatctttgaatttcttcaagtactttattattgacggtgtgtgtttttgctattttttcaaactaaattacatatgtagtttttgtaaattttcaagctgtaatgtattgcaagatgttaaaatcgtaaaaattagacagcaaaattgtagtgtggggcggtacggttttatgtggtttatgttatcattattatcgaacattataataaaaaattaaaaattaatctactaaagtttcaacaataaaaaaagaaaatgttattaaatttttagtatcataacataaatactaatcaagttattggatttatatatagatgtttccttgaatttaattatatggcttgagcattgtaagtatatgagttgatcatatatggaaaaagaaattatattgtaaaaattggtggttttataatatataatgtggtacggtttgatttgcgatgattgataaatgataaatacactccatcattaaaaaatatgtaaacttaaataaattttaaaaatttcttttaatattttttaaatttatgttaatttcatacttattttaattccagtttcattaatttttttctaactcatgtatatatattatttttt

SEQ ID NO: 312128 - DNA, 552 bp, Cannabis indica
acccatagtcggtgtcttgatcggggactcaaagaaggacccgaagctcaagcaggacctggacccagacccaaacctaggacccaaaaccgaaacctgaaccaaaacgttatcaagaccttggaacatgatcaagaccaggatctagagcaagacagggacctaaaaaaagaccagaacccagccctgaaactcgtgctcgaactcagtcccggacccagactatgattgagacttgaacttgaactcgaactcgaactcgggactcgatcctggacctagaccatgcccctaacctcaactgggattcaaaccaggacattgacacgaatccagacccggacgggaataccgactcagacctagacaaggatcaaaacacaggtgctggaccaccagacgcagaccctgactcgagacacgaatgtgaaaaacccgtcacacggactcaaactatgactcagaccgagaccacaacctggacctagacccggacccagaaccaaacccagacccggaatcagaattggaactatgactagaacccatagc

SEQ ID NO: 312129 - DNA, 1769 bp, Cannabis indica
atagttgttcttcaagttttttgcaatttctagctagttttagtttttttttttatcttgtcggggttcgatagtttgtttagattcgaagttaagggtgatgtccaaataggtctgatggtttaggttagggagtctgattgtttgtctaatggtaaattagaatgtggttttatgggccaggttcaaattgtttgttcgatggagtccgatttttatttgttgaaattgttcagaagtggttcgatatttgtttgatatgggcctgatggtgtctgatattttacaaatttatagttttttaagaacttttttatcactatactagtagttttttataagatacttgaaagaagcgattggtgatgttgagaacttagccttcgtgtctgataggcatcaaaatattattcatgctttagagctcgtgtttcctgatgcacaccatggtgcatgctaccaccacattattatgaatgcaaccacaagttcaaaattgatgtattcacgaatcatatttacacttgtgcttacacgtttttaaaaatagagtttcatagaaaatttgagaggatttagacaatgaatgttgcagttacattatatcttgaggaaattaaatttgaaagatgggttcggtcgtactttctaggggaacgttacaatgtaatgacgagtaactgaattgaaagcttcaacaacataactgatcttgtttcggaaggttgggatggtgttttggcctctgttgtatttccttcctaaaccatgagaacaattcttgttgaaacattgtagcaactccttgcactcttctagttgcctataactgttccaacgcttctagtatcacatgggaatttcaaacacagatggcgaatggatgttactgttccaaagtcaactagaaaaagtcatcctagaatgacattgtaagtagttggacaatcaaccaccataaaggtacaatacttgaaggatgacattgtgttgtttccaaacactattctgtttatggttataggtagttgtatctttcccattaggaccaaggtgtctccattaaagccttgcagttgaattaaacaaggttacatgttggtttccccaagaccaataggtttaaaagtatctttaaaaatgatgttaacaaagcttttgttatcgacaagaattttgaaaactcttttatttgcaatctgcgcttctatcaccaaaggatcgttgtgaggaaaatgcacatgcttttcatcatctttctgaaggtcattggaagattcatcatttgagggtgctgagtaggtgattgtaccaaactgcgagtttcatcttgatttgactcattcaggtaccttttttgtgcattacgggtgctttcgacaatgtgtggtcctatagaaatggttgccacatggccatctatagttggctgagctgctctaggagggtatggatttttaggattgggagcagtgacaggtcttgctgttggagcattttgtatcccttgaggggcctgtgcattgggagcttgaatacaagaacttgtggatggcctgcttccttaggagaattaatggctccatgtttcttggaataaaagctgcctatgtgctactacttatctaggataaatgactagtatccttacccaattgaataaatggccatttcagaataatccttaaatctcatctctcagataatcacattcattggtggtatgctcgatgtcactatggtattagcactgttggaaattattttac

SEQ ID NO: 312130 - DNA, 1011 bp, Cannabis indica
tatcttcaacaaaaagctaaggtaacttggcttaaaaatggagataaaaacatggctttatttcatgcaagtattaaagctagaagaagacagaatagagtactttcaatacgaaatcaggaggggaaagactaacagcggaagcaaaaattttagaagattttttgtcatattacaaagggttgttgggcactaaatttcaagggagaatatatgtaataaaaaacttggtgcattcgggggctgttctatctgatcagcatgccaattggctgtgccaggattactcttgtgaagaaattaaggctgctatttttgcaataccaggaatcaaagccccaggtcctgatgggtactcaagctacctttttcaggattcttgggagctcattcaagcagatatatgtgctgcagttcagaatttcttgcactcaagacagattctaaaagagatcaattccgctgtgcttactctcattccaaaagtgaaatgtccaaatactgtaagtgacttcagacctattgcttgttgcaatgtcatttacaaaattgcaactaaattgatctgttccagattgaaacatgtccttccctagttagtggcacagaatcatgggggatttgtacaggggagatttataccacataatattatgatttgccaagatctaatcaggcactatgggaggagaaacacaaagccttgttgtatgattaagctggatttacaaaagacatatgataccattgagtgggacttcttagaagagatgttgagggcttttaagtttcatattcagttcataaatctcattacgaactgtgttaggactacaaagttctcattgatgttcaatggaacaatgcatggattttttgagtctaaaagaggattaaggcagggggatccactatcccctctgctttttgtgcttgaaatggagtatctctcaaggattatgagcaagattgggaaaaagcaggaatttaaattccatgaaagatgtgaaa

SEQ ID NO: 312131 - DNA, 874 bp, Cannabis indica
gtgaggtttctaatgcggatgtcgtcattactgtgccttgagttcgtgcgtcccatttaatggcaacttttggtattctcagacaattggatctttgaaattatgtttctttgaagctgatttaagttgttggatcgaagacaggcagatcaccatttgaatatatatataggtgagggttcatgtgtgataatattttgccatttctaatttttactcaaacttttggaaagagaaaacccctaaaaatctagaagttttttggtggatgtctgatcacacggctgaacttcaccatcgtctcctccaactccggccaaagtattttccagacgcaacctcgcttttagagacagatttacccatggtagcttcatcgtcgaacattcaaaagaactccaacaaattgataaggtgtctcaaacgctttccaaacgaggcttcatcccgctattcagaatcagaaaccccccaatctggcacttatgcctctatcttgtactcgcaatacgaatgttttctgggtaggtaggttctaggtaacatgttgtaggttgtgatgccatgtatttttggggttttttatgggttttactgtgaccatccatcgcctgcattgccatatcgggcaaaaaatttaggttgtttgtctcttagaaataagggtgtacgtcggccgatttggttggtttatgttatattttattcaacccaaggtaaacatcgggttacaaaaattaagtgcaacccgtccaattaagaaaaaagaaattagtaacctgcccattaaaattggtcggtttggtcggattaacccgtctaaactgacaattaatgttttatttttttaccattcaattattatattttagtt

SEQ ID NO: 312132 - DNA, 977 bp, Cannabis indica
aactgtctgattcaatgactgcccatgtgtagttgttgcccttgagccaacttaaagcctctcgaatacccataatttcagctagttcgggtgaaacttttccatttttgaagactgcaataactgaaatcagctccccattgttgttcctcaccacacacctgtatccatgtttgaaatcacgatcgaaagtggttgcatcaacattgagcttaatgcctgaaaccggtttgatccaacgctccaagccatcaccttctctaagtggtgaaagcaaagggatgttcccccttccttgagctttgagatattgatcaagtctcgaacttgcaaacacagccacatcccgaaccgattaaacacgctgctgccatatgagatcatttcttgctgaccaaatggcccaacacaacatcacaattttgcataaaacctcattgtccacacgggtagcagaagcttccaaccaagacagcaaggttaatggctccctgcgcccagtagcaaggctcaagaactcccaacacgaccaagcaaatggacaagaaactaagagatgcagttccatttccgcgaagacaccacacataggacaaatgttatcaaccaagacctttttaatgcaaagattcaccttggttgcaagacaatttgatgcctctccacaccatgtcctttgtcttgggcggtaccttcaaagcccatagttttttccaaaaatgatgaccctcggggttgtccgaatgaggcttttgatcttgaagcagcttgtatgcactacgaacagagtaaaagccattcttttcagcaatccagtaccatgtatcagccccacctgactgagaaatgggaataccgagaataatagcaacttcaataggcgaaaacaaatcgcacacaacatcagaatcccacctttgttgtcttgcttgaaacaagcaattgacagtgaagtttttgttgggttttgtgtccta

SEQ ID NO: 312133 - DNA, 1056 bp, Cannabis indica
tttttgtaactcctcttcgagttaaatttttctccaacgtcccaatactcatttaaatgatataattgagtattgtaataatttttaacagcaagaaacttatcctattgattccataacttccatatgtaataactcacttaattacatgtgatccttaagttacaatctattttcagatttgtaactcctcatatgttacaacttttatgtgtattattatactatatatgatataataaaacttccaacacataatatatattaatttcatattaatatataatatgttacatttaaatattttaatctatattatattatatcaaataatataatagtaatcataattcaggagagtctattatttgttcaagatttaatatcttaaatgaaaattatgttgctcacttgttagttcgagcttcagagcgctatgttgattgtattttttttttggggccggggccgtacttgaagtggtttctgttgtggacaaaaaaatccaacaagtcaataataatgctataactttgcccttttttggtgtgaaatattgggtaatttcttacatagcatcctataggattctattcttaatatagggggacatggtgtttaactataatgtaatgatgttccctatgtcaaacaacgaatattctaacctaattagcatctttttaagatttttattacttatacgaataaaaagaaaaccatgtgaatacatgagattttgtataccatcaatctacctatccatctatcaattttatatttattattattattccctttcacttcttcttcaagggcggtgagggtagacaaatgaaattatacaagattcgggggaccacatatgcaaaatgaaaagaagtatgaggagtgaaagtgcaatttagaaaaattaaatatattataggaaaattttatttacaccccaaaattttttaaatacaccctattttaataatttttattttatataaaatttatatctttaattttactaagtatttttaacttttttctttcaatttatattcttaa

SEQ ID NO: 312134 - DNA, 1924 bp, Cannabis indica
ctatgtatctatcccatgatggatctttattttttattgtcgtgaaaactggagcctgaaaaccccatcatgtaccatacacaaacaagctttcactttcaaattgaaaagttactacattactagcggcttatttagacaataattctattttgagtaatatctcatactccactatactcaaaaacaacaaagtcagtatccaatttcctatttttaactctaaccggtatagacctgagctatccctttggagataactaattctctgccaggtaatagagtttcaaaccctatttcatatctatctcaaggtctattcaagtattaatcaccctgactaccacatgctaatgtgtagttccaaattcaattaacacaaagttaaacaaaatagttgataagaaactaacctaacactactaaagatctatcttctgctgtgattttaaaaatggccaacactcaaacatgaaggagattttgcctcttgttctggtccctttttctatagctgtggacagtctctctagtagttccctacttgatcacaataaaaacatctccaatgcttacactctcccagataatggttcttgcaataaaagaactctaaataagtataataactatcagagctaccctgatggccaccccgtccttgtttcccccaaaacttctttctctagatcgagcccaccgatgtcgacggagctcttttactttgatcaactaatgaatcactcccacctctaccaagacgagaggtaggaggagcagtgaccttacccacaactagagtcccttggggatcttgaacaaattatgtactgtacataattggagaattattcatctcatctaggtttctcagaataactgaaggtccttgcatcatataactcccaccagatggttccattcggctaccagccattccctgttctgctaagaacactggaataaaagtaattggaaattgagatgaaggtacaatagaagacctttgttgtcttaatctcttaatctccttatcatgtcgttgaattctagcttccatttcaacgaacctttgctccaaatctgacggagcctgcggtggattttcataaccacccccattagtcttttcacagtcttgagtataagagagatcccaatctctccatccgccaccagtattgtccttattagcccaactacatgattcctgccaggcgtccattctataagacaaacatgcgaattcatgagtctgctcggtcaggcagcaatcaataataaaacctaactaccacttacatggaaacttagtatgctcctattcaactatcattctactaacatgctttctatcatatgtgtctaaccatgcataacaaataaaactaataaaagacgtaaaaacttactgaactatgagtcaagcttatcttagatgatgattgtacatatcttgaagatcttcggagaataatatggcggctctaataccgaaattgtaacaccctactagattaggcatgttactgtgttttctaaatattgtgcacgccttttctactcaaatgggtttattaaaaaacatgaatgattaaaactttattaaataacttcactttaataatagaacataataatttacataatttgggatcctgttttgaaagttacataaatttacaaactatttatacttcaaaacttgttgtctagcgaccaataaaagtgagcccaaaatgtctcaaagaccctaaatgctctaggtctaaccatcttgatatgtacaatcttcatcctcaacttttatactcttaatggttcggttctagctcttacatgcgtaaacatataataactattagggttgtacatcggtcggtttagtcggtttatactatatattttccaacccaacataaag

SEQ ID NO: 312135 - DNA, 768 bp, Cannabis indica
atatggctatttataggcctaagtttaacattaacccatcccttaactctatgtggtgaccttatcttaactatagttaagatttataaaactatcaaaattaaaattcaaaatgccaactcccttatttgctccaccataaactcagtcaacacaatttaaatgagaaactagccgaatctagactactacttggtctttaattgttgttggttaagagctttaccctccaagatctccacgtgtactacttagtctattgacctatttattaacacaaactcaaccatccactaacttctctcctaatgacacacgtccaaacttgaatatatatctaacttttcaacaagacttcatattcccaaattcatcacataaccttctacttctacactaattattcaaataaagagacataatactaatcataatactcatgtccatcatattgtaacttataaaatagtatagccacgtataactaataaaacccatagttgattataacaatactcaagctttttccttcataataccatctagtaaactaattacttctactaaaataccatggtccatatcgtaatgtaatgttgggttttaataaaataaatgattactattatctatgatcttttatttttaacactattacaagattgtaatattaatataaataacttatcttataaaatcactattttcgcatcgagatatctagactattataatagaaaataattactaaatattttggtcattaca

SEQ ID NO: 312136 - DNA, 2594 bp, Cannabis indica
tgggttttggcggtttaggatttcaaggcacatctttagcattaactgatctgtctcttccaatctgcagtgttcctatccgttagatcagatttcttttgatctaacggtgatcaataccagggtataaaattgaaattaatagctcattttgccatttttcgcatttcagaccttcaaaattttttctacaaatcacgattacttccctttccaatttgcatgccctcactgtcactgacctacttttagcgtatttcatcaaattacatatttaacctctgagacatttataattcatcatctcagtcgtcgaaacctcaatcgcaaagttttttaccgttaaaaaatcttcatcaaaacagtaagtgactcattctcttgttcctgccattttattctgcatttgtagtctaatcttcgtaattgattgcttcattatcttctttttttttggatattctctaggtaatttttgttttgtttggataattttagggttaagaatttttttaggtttattagattcataggcttctagtttaggttgaatttactttttctgaaaattgggatcattctcgtctacaaatatgacgcaatttatttctgaaattccaaccccaaacttcctagaaactgtatgtcttgaaaatttagcccttccatttgaatccaaaactcacatacctaaatccaaacttgagataaacgatgccaaaattagggatcatttaatagaaatcaatcaagctgaaatttccaatcgctataggtagtttttgcaagaaataaccaagggtaaacatcgttatctgcgagatgcatcttggcctgaacccaaacctttagcttctattctacaagctaaacttttgtttttaccttgactcactgttgctttttcgccaagtgacatgaatttcaaaatcatgacaactcaagctcgtaaatcaaagacccccaggatcctacagtcaccttcgaggcaaaactgattgaatccaaagtcagatcgatagctccttttgttggaaatattttaacggcttgtggcatcaaatacgagagaggatgtcatgttagaattgtcgctctaggggagtttagctattttccaccaaaaaaattaatttgagaagagtgcagtggtgctagtactagtggcttgtcaggaataggtgcttggagcctcgagcacagtagggctggagcaatactccccctgacaaacttgtataaggaattttttaattatctcaagtttactccttttcagttaattctgagttcttatagaatcctggtctgcttaaaggtcttatatcaaattatggggctgggagtgtcccaccccctcgaaattgtatacttttattctgtaaaagttgttcccgcaaggaagcgaggatcaggagatttttactacctccatacccacacaaatgattgcatgatcattttgagattacccaataaaacagaattcaaggatgaattcttctagataattggtctctcccccatcaacacaacaacattttgcatcatacgtaagtatcatcttttctcaaaagcttggttttgagtttcttgatttataaattgaaggcatttatttattttgcttattgtgttgacaacgatcacgagaaggccaattcccactcccgagatagtcgaacagtataaagctcttttgggtcttccgtttggactgtgatcaacagattttctactgaatgagaccaacttgaagaccgtcaatcttcttggcactgagcaatctacctgtgactacaaaaatccaaaattctctaagtggtagcaagtccccattccacctgacaaggaggatagagattatgtggctcgcatccatttcctcaataaagtaacccctcaggaaggtgaagatgaagcatcccgaggttagaattgtgggtggtctccaactgtacataggatcgagtgtacctcgctagtcacatttaaggataaccaatataatttctatacttgggataatgtttgtattgagcgtataacacataagtttgatagttggtaccctgagtttcatgtccaacttagttgcaatagttcttactttagaattttcgaacaatatggtactaatttggatagggcgagccatctggattcaagttgggacttatctccaataaacccctacgatatatatgatcactggctctagggagtttagtagttatcatagttattcttcctcatcatctaataactatggtaaatttctctaagtgggagtttattccccaccttttcattatttatttttgaataagtattgattcattttcttttttgctcgcagatatggattttgagaaccttctcaatagctcaggtaaaaagggaaagaaaaaggttgcctcctccgagacttcattgggagaaaatctagaacctgtgaagagattgaggaaaaccaccgctagcaaaaaatgtgccttgcaacaaattgttattgagctagccaatgatcaggttcactccccgaccccaaccattgagggcactaaagagaaagtcttgggttcagtccacca

SEQ ID NO: 312137 - DNA, 980 bp, Cannabis indica
tcccattgctaattagttttgagatagtaccttatttagtttatctcaaattctaacactaaatactattggtgacttttaatatttttcatttttatatgttgagaaaataaaatattgaaattaaaatgtatatgataattattaatcaattcgtttcttaattttttttgaattgtttaaactaaataaatgaaaaatacaattttttttattattatttttttttttttaaaaaaaaagctcttcaaaattttccgtttgtttttaatttaagtaaggagagtgtgagctagagccgagtcgagtagggaggtgaggttgggatttgtgtcccgatttgagtttaggctaggaactagaattagggtttgatgttacaaaatagattacagttagaaaaaaagtgtttaaataaattttgaaagtaatttatttttgttctcaattcttttttctcaaatttttattcttatttcaaatagtaaaagaataaatacagttttagtatttatttttaaaaatactttttaattaaaatattaaaaaataaaaatatacctagataataattgtagaacacactcatgaaatatcgttttaattaatctgtcttgtttttttgtttttgaaatgaattaatttatcttgttttcatttattaaagacaccagtatacagaaaaatatacatgaaattattatatgttttattaaaatgataacatgagtaaaataatattatgggttcaaagcccaacaactcaagtatctattctatatgaagtatgtctatataacagaattttaggtttacaagaaatttatgggtgactttttatttatattaaaaataaaatggtttattaataaaaataaaatagtttatgagaaattcatggtcactttttatttatatataataaaataaataaaataaatctcattaaataaaaaaaaatacgattgagtttttgctgt

SEQ ID NO: 312138 - DNA, 804 bp, Cannabis indica
tttcaatctcatcccattttgacagaggtgttaatgagagagaagaaaatttgggaaggctttcattttgacaatgtggctggaggaagactttcgtgttcagattttgtgttcagagagaaaggaaatacaccaattgctcgttggattttcgacagagagacaaaaattacttttcaaaagtatcttccttggccaagtgtgcacaacaccatatgtttaccaaggtatttcggaaggaccaaggccacatctcttgctatgttcatgttttctttttggcttgaaaatctgggtgatgatatatgggattatctattaatgagcaatgatatacaatggcagcagaatcaatttttaatttccatttatggaaatttttgctcttgttatttggtattatgggcttactgggcaattggaggagggttggttgttgtgaacctattgccagagaaggaagttccctctagtatgtcaccaattgtttatctaaggcaagaataccagcaaatttccattgaagctgtccaaaggaagtacatgggccaattgagggtctctaatattttctctcctattttcaatcctcgggtggtcataaggaattttccctctttgttagttgctggttgggaattaaaaaaagggtatcaaattgtgagaaaatctcttaggatgattttttatagagggagacacaaagaacaacaactaccggaacaaaagctggccatggagagcactaacgtccatacggtgttggaatttgtcatgtttcacctaatccggacagagtatgct

SEQ ID NO: 312139 - DNA, 1312 bp, Cannabis indica
aaaaagaattaataattaatagagagcataaatatcattacagattcgctaaccaatcgtaatatataataatataaaaaactgctaattaattgtaatctgctatgtacatcgatcgatacggtgttaggtactatataatacctaatagcaatcctcagagttaatttgttaaattgcctttcaaacgtggaaaaggcaaaccctagccaactataaattgatgatatataatatatcccacatgcacacgttaaataaaaatttgtaagaaaaactctgctaaatatagattttaataatatccttaaacgacaacagatataattattaatcccttaataattaaattaagatatagtaatatatattaaaatgcatctaaatacatagtatcttatttcttgatgatgtcatatgattataaaccatgactattatttcatttcatgcatatatgttaagctagctaacttctcccatactgatcatatggttaatatatattgcttctcatctttattttatttttaatctttatttatatatttcgttaaggatatattgtttggaaggaggttgtctctactgtttattatactatatttggaaagttgatgatcatcaaatcttttaaaattactatatatattatatatattgttcaaactttagacctcattgtattaaataagacttaccaattttacgcaacttggttctttgtttcaaaattgagtactgaaattatatattataatatatatatataaatatataaatgcatgggctttcagtttaccatttatatatataaaatgtaattataacggttatattttttttatgacctgttataataagtttatttttaactttaaattaataataattaattatatacttaaaataaattaattttttaattaaaatatttaatgcgatattaattttcacaactaatgttttcagtttattcagattcgttagctttggtgacggctatcaataacggggagatgtatttcaacaagttaggagcgttgtttgaagatgttatagctttattgtctaaatttccgggagcagttttgtcccatgtggctcgctctgagatttagcgacccatggcttggcaaagcatgctctacggttagacgatgagctatcttggttcgaggtagaggctccagcgccggtggcggacgtggacgtggacatggggcgtcgtaaattcacgagtaattccaatcacttttgtaaaaaaaaaaaaaaaaaaaaactaaaaaaaaaacggttaagtaattagatt

SEQ ID NO: 312140 - DNA, 631 bp, Cannabis indica
tctaagagacggagaagattgcaagctcccggatctccaagagtcctggaagcttggggtgtaaatgttatccgtattcctgagcttgtgacacgtggcatataaaagaagggattaacctcataatctcgctaattaaaatcccccattgcaatcctattgaagagaagcctcacggaatctggaacaagtcaagatcgagatattgacttaagcttacctggccttatcctagtttcctggacacagaagacataatatctctcccggacccggagtaaacatggaagcctgttcagctgatactcggatgggtactcgaatggcttatcgcggatatcgaccgcccaagagtgttgcggatgtctaccttggtgcactccggatcgcctagtgacggttatgctttttctgacactggatcagatcttgtcccctgtgtccagtcatggtagtgaacggatatttcagacctctacttttgaaggtgaaactattgagcgacacgtgcccattacttttaaaagttaaacctttggatgatacgtgtccacaacgtacaaatgacccccaattgtccagttgcagcatgcacgggcacaattgtttccaagagacccaatagtcaact

SEQ ID NO: 312141 - DNA, 600 bp, Cannabis indica
aagatattagcaggtatagtagacatcactaccatgcccgtaacattgttggcaaatgcccatttgaccacattatgggccgcgtagttacagtttctagtgatacaagaaaaattataattagtcataaaagtaggtatgcttatttattattataataagcatactagattaaatactgtttataaagtatagagaaaatttgtaaatgtatttgtatattattttttaatttcgtaataaattttagtaaacatattttagtaatatattacaataaatattaatttttattttaacatatttaattttatgcatttttttttaaaaaaaaatcaattaaaaataatcaacaaattaaaatcgtcaatattttttttaaatattcataaaattatataattatatttttttacatatttttttgtaatattatacattatacaaataaaaattgtcctatttttatttttgtaacaaaatattaagagttgtgatctagcagagtctcttttgtgtcctacctatattaggtgaataaaatggggatttttacattatatactgaaattttaagtttttttacttttatactgtaaa

SEQ ID NO: 312142 - DNA, 1812 bp, Cannabis indica
ttgtgaagaaaagaggtttcagggttcatttgttaattaagagactttattaagtcttattaataaataaagtacataggaattttatttgataattaattttaattattaattaaatagttttgacatttaaaggattgaaattaaaaaatatgatatttgtgaaagaaaaagataaatagttatataaaataataaaattgtaattagtggagcccacatactatggcctgcttcttaagctctttttggccatttatttatcaattttttaatgtcatatagttcaaacctaaacctaaaagaatttctataaatagatagttaaaactgataaatgatgcaacataagcttttcagtcaaatttcagcattctctctttctatctatttttgaatccttctctctctctctttctcttcaatttttgagccacatagtgaaagagagcatggccactcatagcaagtctagtactcaattttagtgtgtaagactgtaaataatccaacacctaaaagagaatcgagctcagatcttgataatactctgcgacagaaaggaacaagggttaaagatctgagtggaatgagtcatttaatttcgctgcaatcaatgtaaggtttctaaaactttatatgtgtttagattctattgttttagaaattcatatttaggatgttaaacaacatacatggtagtaaatctagaatctgataaaataatcccaacaaataataatttagacactatatatattatatcaattttatttatttagtttaattgagacattttaatactattaatgaatattgtaagtgttaaattataatatttagaatttgttaaattatatttaatttattattatatatttatataaattattaatttaatttttttttatttaaaattaatccattattgggtagactttagcggcaagttatcgtcgctattaatagttattaacggctgactcaaaattcatcgctaataactactaatagcgacgagcacacattgctattaactaatagccacaaatttaggggttattagcggtggacgcctccgccgctattgatgaataatgttgtagtgccacttcttacattttcttgacaaactagaattgtataacatagaagacccaattacagttcgtggttgctctttccaccatagaagtagaattcatggcaactacggaagcattcaaggaagcattatgatttcggggagttctttatgaattgaaacaaatcaaagagggagtaaattgtgcattcagtcatccatatatctgtgtaagaacccaatttatcatgaaaatagcaaatatatagatataagtctctactagattagagaaaagataaaagaagggttggttaatctagagaaggtcagaacagaagataatcatgctgatgttgagactaacgtcttaatagtaaacaagttcaagcattgcttgaatttgatcaatatcagaagttagtataatgagattcctggaacaccaatcatgatggctgctttctttcttcatcatcatcatacttttaatttgaagtaactaggtagaatttgtggtatatttcctccaaatgaaaatatctctaggagctaatttgctttcctaaaaattgtggactcgcagtagcatgtcttggaaggctttcttatcctttcaggaagggtcttcaagaaagctagtccttcttcgaaaaggcgttccggatggctagctgtttctcctgaaaggtagtcccagatagttgactctgttgggttttatgccc

SEQ ID NO: 312143 - DNA, 1114 bp, Cannabis indica
taaaataatttccaacaagttcttcttaaatttgtcattcaatctctaccaacttatgctatgagcgtctttcttattcccttggaaacttgtcaagaaattgagaagattatggctaatttctggtggaaaacatcaagtgctaaaggtcaaggaatcatttggatgtcatgggatcgcatggctactcataaatattcgggtggtatgggatttcgtcacttacatgacttcaatcttgcaatgttagccaaacaagggtggaggttattggtctctccaacatctcttgccagctgtgtgttcaaagccaaatactaccctcaatctgatttccttactgcagatcttggcaataattccagtttcgtttggcgtagtatctagagtgcacaaaacttggtgaagctgggttgtcgaagaactattggcaatgggattacaaccaacattttgaagcacccttggcttcccgatcctgcaaacccgtatgtctcctctgtcgccatgggacttgaaaaccatatggtgagttctctcttggatactcatgacacatcttaggattattctcttgtcaacgatatgtttaacccccgagatgcacacttgatacttggaattcctttgagttctataccagccgaagactgttggtcttggaagggtgagacgtcttgttttttctcagttaggagtgcctatgacctactgcagatcagtaaacacgggcaacagaggcaatcaaactctggtttttggcacaagttttggcatctcaaaatcccgccgaaagttaagaacttcgtgtggcgtgctgtcaccaatactctccccacatgtctcaaactggtttcaaaaaacattgatctttcttccttgtgccctgtctgtcacagtgccgctgagaccgcctctcatgtgcttttaaattgctcttttgcattcagctgctgggagcgatgtgggttcaccattcaatccgatgcctcatcaaccatcggtcattggctcaagtctacgtttgagaagtatggtgatgatatatcatgtcgtgccatcatgatttgttgggccctttggaagtcacgaaacaagcttgtttgggaaaaga

SEQ ID NO: 312144 - DNA, 997 bp, Cannabis indica
actaaagaggaacaaaatcaaaatcatagtaagtacaaaactaagtctcaagattatcttttcagatgagatatatcacaatggcttcatatattatatataatacctgcaaaaaagccacactgcccgtgttctcgaagactgatactccttgaggctcagtttcttctgcttggttcgatttagcaatgttattgtcatttttctgtgttctagacaccttagctttagctgcaaaatcatagtgaaactactttatttctctgttctttaccatacataacaagcaaaccgagaagtattaatccatacctgcagttgaacaagatgttcgttttcgagtagcataacctcgacttccatttaagattttccttttttttgaaaccggggtcgataataacttctcctgaaacacagacaaaggtttcaatttcagtccagcctaagataaaaattaatagctaacataacatgagcttttatatacattacctctgatttgccaacccaattttcagcaccccaatcgaagtgataacgcagttcattgtgatcaaacatcttctccttggtcttcatcccatgagcaaatttaacaatatactttctaggtagaagaaattgatgagtgactactccaactgaccaacccatatcacaaagagcatccaccttatcacccacctcaaaatctttatcaaaaacatcaatgatttctggaggttgggatctaatcatgtccccttctactaccacaacttgctcacaatcatctttaatatttctcttacacttcaccccaacagtagttgtaccatcaatttccccaatcacaattgctggcatccatgcagggattattttgtcaggatccagattcacttctacagctgttcctgatctgaattttaaatactttagttcctgtgaacaatcattttttttttccaaaaaagaaaagaaaattaacattgttaagcaaaaatttcacaat

SEQ ID NO: 312145 - DNA, 571 bp, Cannabis indica
tatatatatatatatttcttaaaaaaggtgatagttataagagaaacctaagataaaatgttatatatatatataaagagagataacataattttgtaacaccaaaaagcttaaaaagattacactttaactacacttgaatttgacttaataataagaataaatataatgtaagttataaaaatgagaaaacacattcatcatttgataatgcctattagaattcttcttttctattaattatttgttgtaattaataatgttaaatacaaaacaatagaaaaataaaaaaaaaatagaaattagaaaaagtagaacattaaaataagagaatgtcacatcatctcttcaaaaccctcctttatatatattaaggaactaaaccgcgcgttgttgaacttttataattttttattatatatacatatattgcacttgttgaatgattaatttaaaatatagtattttaatatgtgtaagtaatagtattgaaattagaaacatattattttaaaatatgtaaaaagattcgtgatagatgttaaaaatagtagaattaataaagaaattg

SEQ ID NO: 312146 - DNA, 2154 bp, Cannabis indica
aatggtgataatttttataaatggaaatcgaatataaatttaatgctggtttgtgagaatcacaaatttttcctaactgaggagcgtcctaaggagcccactgctgatgccctaaagaatattcgggacatatatgatgcttgaattcaatctaacaacaaggccaaatgtttcgtgattgtaaccatgaacgatattctgcgtaagatgcatgaacatatagagaatgcatctcaaataataaattttctaaaggccatgtttgggaaacagtctaatcaaacaagacataatactatttgtagctacatgaatattaagatgaagaagggtgtccctgtacgatcttatgtattacgcacagttgagctaattcattaggcagcgacacacaaggctatcattgatgagaagactcaagtgtctatgatccttgagtcactatctctttgcttcaaggctttcaccacaaactatgtgatgaacaagttagagttcaacatgactgaattattgaatgagttgaccgtatttgaaaaccttaacaaggttaagtccaaggaaggggaatcaaacatcgttgaagaaaaatccaactctccttcttcttctgataagaaaagaaagtggaacagtaaggacaacagtagtggcaagctcgaaggcaaaaagacccaaggccaagaagaacaaagctagtctcaagtccaaagacaaaaaggagaaaggctagtgtttctattgtggcataatggaacactagaagaaactataacaagtatctctttcagcttaagaaaggtaaatttgatttattcattcttgaagctaacttagagaaagatgataaatccttatggattgttgcttctagagccactatttgttcttctatgcatatacttaaatcgtaaagggagatggtcgatggggaggtgactatgcacgtgacaaatggagcacaagtctctaccaagggtgttggcgaatttcgcttgaaatttaataataattttttattgaacaatttttattttaatcatgaatgtatcaggaacattatttttttatatcttttgcatgaacaattttttaatattggttttgttaataatgatattattattttcaagaatggtacgcctatttattctacaaaacaaagtaatggactttatgtgctcaagctaagtgagtaattaattttaaataatgaattgtttatagtagcattgccttaattaaaaaagagacagaagatttctagtgatgatgaaacatatctgtggcatccatgtttacgccatattggcctaaacagaataaatcagttaacaaaggatggtcctttgagagaactaaaagttggaactcttctgatatgcgaatcttgtctagaaggcaaaatataaagaaagacttaattttttttttttttgcagaaggcaatagtgccaaaggacaacttgagctaatacacattactctgtgcaaacctattaatattgaagctcgagttagttatgaatactttgtcacttttattaacgattattctagatacggtcatacttacctgatggccaagaagtttgaaactttttgaatgttcaaagacttcaaggctatgactaaaaaagaaattaggtaaatcattaaatacacttcaatcaaatcatggtgacaagtatttggatttcgaattcaaagagtatttcctggatgaatggatcttatcctaagttacagcagctggaacacctcagcagaacgatgttgcaaaaataagaaaactgaaccttgttagtcattgtcagatcgataatgtgttactcatcagtgccactggacttctggggatacacacttctaatgactaccaatattttgaatgtagtacccttgaagagcataagcagtactccaatggaattatggaatgggaaaaaatccactttgaaacatttttatatttttggttgtcctgctcatgttcttaaacgtaagtctaggaagcatgctcctaagactgaagtgtgtatatttgtaagatatccatatgagactcgtggtgcctatttgtatagtcatcaagacaataaattatttgtttcaacaaatgctactttttttgaacatgactatatgaaaagt

SEQ ID NO: 312147 - DNA, 882 bp, Cannabis indica
aattctggagattttattaaactctaagattattatttatgttatatgcaaaatttataatatttatattttttgctcaacgatgatggaaaatgcaacgcatggccaatttagtcgcatgggctggtttaaaaccgttttttagcgagatattcataacttgatattttgaatactgaagttaggtggagttatagttttggaccattttacctctaagccatttatttagctatttttatgggaaggaaagtggacattttgacattgggggattaggtgggttaaccaccttgtgggagctagccataatgggttaggataatgctgaattatccttgcatttgtgaattaaggaaaaaatataaaatttaataagaaaattatttttgctcctctctctcttttcggtcaagaacaccagcagcaaacctagcttgataatttgatttctctgtgatttcttgaagttaatccaaaggtaggaaccctagaacctatctctttatattttaatgacctttctttagttttgagcatgcaaagtgtagaactaggctctgtctgaaccctaggagttaggggatgctttctgaagttaagttaagttgttttaggtttaattgggttagaattaacggatggttatgattttgagaaagtttgagttcaagaactcaaacttggctcaacaatagtggattgtgtatttgggtgctattttcatttctatcactaagaaatggtttattttgttgagtatatgtgtcctagagctcatggtaaagtttggggtggttttaggtcaaattggcgatttcttatttttctgcacagaaaaatggcaggctgtttctgcagaaactgttaggttttatgccc

SEQ ID NO: 312148 - DNA, 742 bp, Cannabis indica
ttttctcttcgctcatttataaatcggcccgtaatggaatcgggcccatttggaacctctcattcgggccacatattttacgggcttaaatttgagctttcagttggcccatttaagtataaaatcagaaaatatattgtgttctttccacagtaaaggttctgattatgatttttctctttaatcagtgtcttcttctactttacggattgtcatgttcagtgttgattatggatattttttcttaatttccacaaagacaatttggtgaatttacatttaaatggttactaaaatttgctgagttaggtaacagaagcttgcatgtaaatatgcccaactgtttactcaaatagtacctatccatgtagaaaaggaaatgatcaatagcaagaaattaatgagccttgcctaattcgaaacctgaaatgtaatggaccgcaagctcaacttaaactcatattattaaatactgttaccacaaaaaataataaacatatcatatgagaaatgctcaaggacactagtggtgtctagttagcactttttaaatagttaatcgttattgatacaattagattttatataatttaataaaataatttttaagcttaaagttaatttgtaataatgaaagaaaaatgtagcaaaaaataaatagtgaataacaaaaaaaataaatctaacttttcaaatttaatagggaaaatttgttgaaatgaatgtttttatatgtattttt

SEQ ID NO: 312149 - DNA, 821 bp, Cannabis indica
atcttgattttaaaatatagaaggttgtctctataattttttttaaaatttaacctccttgaaattattcttcatcaaaattttcacatatgcacatagccaaacttgatttagaatgttaattcaaaatcaaataaatgaatcaacaatatctcaacatactttgattaaatttgtggctcacccccacatttctagcataaagtgtatataaaatattactattgtgtatttttctcttgaaatgattctttaaggtcacttttattcatccaagtctgatcactcactatttgttcatcacactacaacatctgttactcttgttttagtgtgtgttgatgatattattttgattacaggcatgcagtgatccttaagctttgtcatctctaatcaaatccctgcatcaaacaccttggtaccctcaaatattcccttggcattgaagtcacttccacaaccaatggtctgctactgtcccaaagtaaatatgctcgagatttactctctcgagctcatatgtaggatgcaaagccaatcagcactctcatggttagtggtcaaaagctctctacatatggtagtgaagtctttgacaatcctcaaacgtataggtccatagtgggggcactacaataccttacaatcataagacctgagatgtcatacagtgccaataaggtatgtcataacatgcaaaaacctcttcaaattaattggcttgtagtaaatataacgtccccgcttcaagcctccattgggcccttacacccacgaaataatggctcttatacacgagtacgccactctggctgctt

SEQ ID NO: 312150 - DNA, 3276 bp, Cannabis indica
catgtatctggtcgtagtacatactctcatgcatctggtcgtagtacatattccacatgcatctggttgtagtacagactccccatgcttctggtcgtagtacatactcccaatgcatatggtcttagtatatactctcatggatctggttgtagtacatactcctaagcatctggtcggattacacattcccatgcatctggtcgtagtacacactttcatgcatctggtcgtagtacatactcacatgcttcaggttgtagcacctactctgccatgcatagatcatgagaaacacaaacgagttgcttgagcctcctttccgaacctcctcatctactaaaaacttaatccaacaactcccaaatctcatctacccaatttaaatctctctcttcctcctcctcgacttctctgaaccaccatcgccattcgccaccgcccacctattcctcccccaaccagaagctcattgaattcgtatttgtttgagacattagatggtggtagagggtatggttttttggccaaaatgtgattctcgatggattattgatactttatcgatggttttgtctgtggactgctgtttttgtatacaatcattgataacttattgacaacctatcgataaatgtcatcaatatactattgataacctatcgataaatgtcaaattgaaaaaattatattacataaacataaatcattgataaaatatcgataacccacaacagtcacgttttggctagaaaacatcataaccacaaccattgaaggtttgaaacaaacacaaatccaataaaaaacaaataaagacgaagatgaagatagagacagaggttcaaggcctctaggttttttgacgcttgagtgctatggatgtccgatcggtcttgggcctctgggtttcgtctaggtttttgggagatgaggaggttcggcggtagaggaaaggaagttcgatggtggtggttggtggtctcggtgcctgggtctagttggtctcggtggtgcgaggaagaggaagagagagtacgaaagagaaagagacaaagagagaaggaaaataaagggagcatattttgggtaaaaattgaaaacaatagcatttaattatataaattaattagtagtctaaattttattaaatagtattcttttaagcatttaaaatgaaatttctcttttaatattatgtgcattatttttaattttaaaattaattctcattaataattttttgaaatgaggccttaagcggtaagaggttaagacgccacttcactcatctcaaagaccttgctcaatggaatcctaatacatgagatttttggtggtgagatacttatgcggttatgccacatcagtgtaaaacgtgagataacatctcatattctttacatgtatataactcttttttaaaatatagagttaaataaatggaatacaaatactcatattagtgcaaataactaaatttacccaaagtataacaaataaaaattctaaattagaacaagtaatttttatggaatctaaaataagtacccaaaatattgaaatccatgacaatgatcttatcttatttcatctaatctcactctaataaatatttaaataaaagaaggaagagaagtatagaaggtacactagtaaaacactacatactactactactataaaaacagctgaaatttcgtgtaagaaaagaataatagatgttttttttttgtttttgtttagtctttggagtcaaaaagaaaaaagtcaacctaaaattttcagttccttattggcgggaaaggttttctgatcctaagcaacacatcctccgtacacctacttgaatataatctcatataatgtggggcccattttttacgcacttagatgttgttttgattcaatatataaaactcagtgatcacacgtcatcactttctcacgtgaccattgattaaatgtcaacatcttattggccacagataataattatgtctcactgacactgctcctcccaaaccacgcttcatatcacgccacgtgtaacgttacacaaaactagtaaaacagctgattctttctcactcgagaaacgcttcaaaactttaaaagaagggggtagaaacgtaaatttcacacctatacactctactatgtccgaatccttatttaggagtacttatccacgtcatcgatccgcgtgatgatggataaaacactgttgttaccgttggattagtaaccagagtcgtattccccaaccgttagatcaacactctcatcatcttccttttatttattttattttattttttcgatccgatccacaacgaaaccccattttaaaaaccttcacaactttacctattgtctctccaaaaccaccattttctctctctatcatttcacttaactttctctctctagaattttctcactgaaaaaaggaaaacaacactcattttctcgagaaacaaacaacagtcatggctactgaaaactcaaataaccctcctcaacctccgccacaatcaccatctcctcttccacagtactcagaggtaaacaacaactaacaattttctttcttctctctgtaatttctttattttaaattaatttttttttcatattcatgcagatgataattgcagcgatcgaggttttgaacgaagccaatggctcaaacaaatcagctatctcaaaacaaatcgaatcaacttacggcaatttaccatcagctcacactactctcttagctcatcatctgaaccgcatgagacaaagtggagaactcgttctgatcaagaacaactacatgaaacctgatccaaacgcgccaccaaagagaggcagaggccgtccacccaagccaaaaacacctctaccacctggatccgtggtttcaccaccaagaccacgaggaagaccaccaaaacctagagatcctttcgctccaccatcaacaccgaaggcaaagactcctagctcaggcagaccacgaggaagaccaccaaagaaagccaaaacatctccgattctgaacactggcgtggccgtcggcggtgagtcgagaggtaggggaagacctccgaaggtgaagccagctgttgcagccgttggttgttgagcttagagaaaaatttagagtaaagatgagtgaagaagagaagaagagactgatttgttaggctataatttagttttattatgctaatttttatttttattgtttttttttttttaatttttagtttttgtctcatcctt

SEQ ID NO: 312151 - DNA, 543 bp, Cannabis indica
caaccaaactcaaccataaacattccattaccatactcagagaaagtgataggagcacgagtgatccaagcatttctcatagcttcttcaaaccattcaatcttaatggttgtagtagtaaaaactctaaagacaagacagaaagatttcccaagttcaacaccccctcccacatcatctagatgttcatgaacaacagcctctttctcagtaagagataacacataagccatattatcagcaataccctccattacccagcacaagaaagacaaacgaaactcccaataatactcagagaaggaaaatagaagcaaacagaaaagtaaagaacgccaaataacccacacccttaaatagatagaattagagaagtacctgcatgtggaaatcttagaggagaagaaaacattcgtaataatcatcctaccctgcagagatcctagcccaaatccaaaaaccttagatgtaatcatcgatctcctccttgagaaagccaaaacgacggcttcaattaattaggatgggatatacgaagagaga

SEQ ID NO: 312152 - DNA, 1012 bp, Cannabis indica
tagagaaaattacatcagaaaccgaaagatacaaaaatattatataaataacactagataattaaatattgagggtagcgtcaatcagtgaattaatgtaagggtgcgcgtataccgaggttaaatttattcttttttttttcttatcttgaacgaaggtaagctcgttaattttattctatgtctctttctttttttatttttttttctaaaagtttaaaaagattttctagtcacaccgataattgttcgagctcaaaaattatattattgaaatctactcgttaaggtgatcattttaacatgtgggaagcatatattttctcgccgttaccgaaaaataaccaaaattaaaagtaacttataagtttcttttccaatttaatcaacaaaaataatcaaaatttcaacttaaataaaatttaatataatctacttaattttattaaattttattttgtagaagaattttgttaagtttctaaaataagttatttatatatatattatatatatatatatatatataaaagaaaacatatagtatcttaaaattcaatacaacaactaatgttattgattattctaaaattttgttattttttatttaaaaattattaaatgatatacatttatataataaagatattttgatatgtttctaaaaaaattcctaaagtaactaaatagtatcctaaacatcacaaaattagttatattataaaaattattatatctactaattttactccactttttatgtacttataattgatatatacatgtaaccaaaaagttgttatataatgttgacttcacaaatttttaagagtaaccaaaatgttgctaagaaaaaaaatgaactacattttatatatatatatatataggcagccgattttgtgcccatatatgcaaaacacggattggaatccgttgtacggcaggggggccccaccgtacttttaaatatttttaatttttgaaatgtaagtggtaaccggttgttgta

SEQ ID NO: 312153 - DNA, 1087 bp, Cannabis indica
tatttatgaaatgcatatataatctatatatcataaaatgcatataataaatatatatatatatcatgtggagatgatatatagattatgatatattgatatgtatattaaagtgcatatgttatatatatatgaacatttcttatagtaacaactaatgtttataaatatttttttatttttatttatgaaaaaataaataaaattgaatcacaagtaatttattaattatttatttaattttaaattaatcacattcctttaataatgatcactaaaaataaatataactatcgtagttatatgaatgatgtaaccattcgtacccgtctaaatatatattatacattatatatatatatatatatatatttacgaacctgtcctaatagatagggaatggaattgttttcccatatatggttatacatgtctagttaaacaaattgtcactcattacatcacatgtatatatttcatgataatctgatttgggccgaatgttcatctagatgcatgggaatttagtagggtttaaggaaattgcttagaaattgcgtagtctttagctatgccaacgcataaatttgatcttcaatgacaatgtcaatgactattaaaaaatcgatataattatgaaaaatgtaattatcaaataataaaaaaggttgaactttttaccgctctatgatgtccacctaaaatgtttgaatagtatctagttttagtgagaaaacaagttgttcatccgtacatgagcttaaaaatgaaatgatgtatagttataaaccaaaatatggtaatattcttagtattctgacgacacaaacataaaactccatgactcgatccatcttcaagaaaataacaagttttattaaatattttatttcagtaatttttaaatgattttttttttcaacattatgaacttattccttatattgatttcaaatataaatggttgccctctagaaaattacatggttatgaattcttctgtcttctattccaacatgaaaatgattcctatgtaataataatttctctctctccctcttcttctttctttctctctctctttttt

SEQ ID NO: 312154 - DNA, 562 bp, Cannabis indica
tacttttagtcataatttttattctgattaaaagtaagaatttttatagtgattgtatgacattttttgtttcgatttctagagaaattatattttaacttttttttgtttgagattgtatattgtaattataataaatattttatatatatattttttaaaaaaattaataatttgtaaagtgaaactatttgcacgctaaataaaaaaaaaataataatgcaactaattgttccgatcacattttcaacactgccaattaattattattcataatttaatttttttgtttctcaaaaatgtgtacatgaaaaaaaataatattggaacactctttgaatcatactttaagtaatgcaaattaaattatttataaataaaaataatattatatataccatatactaaaactaaagtgatgtcctaacgttattttaaagatgggaaataataagtttttgataaaggtgtaatattttgttcaaatcatggtgattcttactaatttacacttaaggttgtgagtgagtgtatatatattcttctcttgctatatatatgt

SEQ ID NO: 312155 - DNA, 964 bp, Cannabis indica
ctgtagaccacactaattttttttaaaaaaaaaattaataattaaataatactttaaagaagaaaaagtaaataattatttatatttagtattaaaatattcttattatattaataaaataataaagaatataaaatttggtgtaatttttagtgttgtggttggaattgaaaaaaaaaattagtgttgaaatagtagtattttagtattgatttaacactaaatttgagtttccccattagagatgccctaagaaaaaaatgttatcattacaccaaattactagaataattattttgatgataactaaactatatataaaggaactcccaaatttaattttatcttaggtcgcatatactttaggatcgtgaatatgatattaattaggccttcaaacaatcaatattaattgactattcagataacataaagtcaaatttcattgaacccaaatcttccaaagaaattatatatatatatcatatcaccgtacatttgtaatcgaagtaaccaaaatctcagaaaataataaggccaaaaaaaaaaaaagaaataggctctgttttatgagctctgttttcttcttattcttctaccaacacagccttatctcaaacaactaacaacataacagtaggcacaacactcacagcaacagacaactcatccacatggctctcaccctcaaccgaatttgcatttggttttcgaaaactcgaaaaccaaaacaatctcttcttactctccatatggtatgcaaacataccagacaaaacaattgtactacaacaaccaatacagactcctcggctgcagtgccaagggggtctcaggtcagtctaacagctgaccagggacttgtattggttgatcctcaaggaaaagaggtatggagttcgaagatagtaagcggagaagcttctcacgcggttatgggggacgaaggaaactttgtgatctt

SEQ ID NO: 312156 - DNA, 1184 bp, Cannabis indica
ggctaagaatggaattaagaaaaaaggagaaaaatatcatcagaacctcattgatgtgtggatgatatatgacctcaaaggctgcagttttaatagactagtacactattttccagctatatatgtctcaatttcgtacactactcatgactcatcttaaatccccccaaaaataaaataaaatagattaaaatatatggaaaaatacatataatcacattatatatatatccagtaatatatagattaaagggatgagatctcatgaggataaatctttgcaaaaaaaagaaaaaataaagaaagaaaggggggttacgaacgtacctagaacttgcgaattcatagagctttcctcttggagagaaaattataagtgcaacttcagcatcacagagaactgataactcaaacgccttcttcaaaagaccatttctacgcttcgaaaaggtcacttgcctgcttgctgcattttctattcgcttcatctgagtttttcccctaaccattttttattatcctccaaattaataacctattatttatatgtatatatggcaaaactgagaagaaggaaaccccagtagagaaaactatggatttgagtagaaaaactaaaaatttagttgatctaatcagagattaaacccagatgtaaagtttccaaaaatagaaaaaaggggccaactttaaatctaacgaaaaaaggaaagtcacacaaaggatgagatttttcttttcatcctcttttattgctaagtttggatagatctcatcttagggagccaagaaaagaggtgagaaattttctgaggaaagcaaaaatggggaagagggttgggtttttttttctcaattttttttaaaagaaaattaacgagtatatatttaataaaatttcaataatctttcaatgtatatagctagtaaccctagagatatatatacataaagtagtaaatttaacattaaaaatatggaaaagtcaaggttgtgtgaagaacctaatctctttctctttttggaaaacacttgagaaaaaataggcacctcccataaaaagaaataaaaacgaataaatgctaaaacatgtgaacccattattacttcatccaatcagaaaatatatatatataaaaaaaataacaataatatattaaaataaaaataaaaaataaaaagaa

SEQ ID NO: 312157 - DNA, 719 bp, Cannabis indica
aaggggaaggattaaaatgagccaactgtgttgccacaaagtatccaattttcacagaataattaccttcaactgtatagtgccatattcaagaatctgctttcggaaatttactaactggtaaagaacaaatgctttgttgatcagtcgcattaaacaactcactcacaatttgcatattccaaccactcattgactcttcaatcaaatcacgtaccaacaaattaggatttgcttgattagaacagtaaagcctaaatgtgaccggccgcaacagccaagggtccttaaagactaaaatcgtatcactcgtcccaactcgcttacgcaacccttttgttaaaagagaccttccccaaattatgctcctccaaacataactaggtgcatgtccaactgtactcaaaactaaagaaaactcgtaaattaaaaaaaattatattcacaataccatccataataacagattattaaacgtcagatcaacacaccaaaaagagcctaaatagaggaaccaacctccccactaaaaaaactaaaagaattcaagcataacattgagaataattgatttagatcctttattttaagaaaaaactgatcgcagtcctacaaaaataggcataaaaaccccactctaaaattagaaaaaaaaacatcaaagtcgtaaataagtcaaccataatcaaatctatatatatcctgttgggttttatgcc

SEQ ID NO: 312158 - DNA, 2174 bp, Cannabis indica
agcgcaagtgttaagatggcgctagagtttgattggaggccagagggttgtgccagtgagacttagtagtcatgtgagccttcgaaggtcaacaggagtgctagagtttgcatgaaggctagagggtttcatcattggaacttagtacaaagcctaagccatacaattaaatttaaggaacatccacatatattattctcattttttactatttctaacttcttattgttcatattattattaatatatataatatgtaatatatgtatattatattattttttagagaccactcaatacaataacttgattagtatatatgttatgatgttaaaagtttaataaaatgttttttctttttaattgttggatataagactaatctttattatttcaatgtttgatatatagtgtaaaccacaccacactgcatttttgcggtgtgattttcgcgaatttaagatcttgcggtgcggttgcagtttgaaaaattgtaaaaactgcatatgcggtttagtttgaaaaaatagattaaacccgcaccacccgcactgcgaacacatctacttgtaatgctccaatgaatccagttgtgcatcttacacgtaatgagaaaccatttgaagatcctaagaaatattttaaagtacccaagtctttgatctcaaactcttgagcaagtctctttttcaactcatcaagttcaccacgatcatctccagttaaaacaatatcatcagcatacactattaagatagctacgtttccttcctttgaatgttttagaacatggtgtgatctacttgactctaagtataaccatggcgcctcaaaaactctaccaaagtgctcaaaccaggctctaggagattgcttaagcccatacaagatttttttaagtttgcaaacttttccaaaaccaacacctttttcaaaaccaggtggaggactcataaacacttcttcttctagatcaccattaagaaaagcatttttaacatctaataggtataaaagccaactaaaattaacaacaagagaaagtaaaacccgaatggaatttattttcccaacaagagcaaaagtttcttgataatcaattcactttaatcagatttacataaaataaatctgttaaagatggtaaacattataaaaagactgtcgaggacaatcagagttacaagtttttggctagtcttagtgttaagtttgataagtgaggggaagaatcattgacctcccacctctgccacctattgctgaagtcttcttggaggttagaagagaagagagttgaaagaatgttatgttgggaaaggttgctggagcagctgttgaaggatcaactttagctactactattggaggaggctacagtagatccacctagaataaatctgatgaaaagccatgggtctggtgtgatttttgcaacaatcctcgtcacacatgtgagacatgctagcgcattcatgggaaaccgacaaactagaaaccacaagagaaatatgggcataatgctattgctaatgaggttgaagctctttttttttttactaaaagagttgatggttcatcttcatgagctgttgaaatccaatccgcaatcatctggcatttctgttgcatctgtggcacaaacaggtatttaaaaatatgctcttcattcctttttaacttctactccatggataattgattctagagcttctgactacatgacaaattcttctaattcaattgagtcctatatcccatgttcaagtaataaaaaagttaggatagtcaatggaactctcgcacctattgtgggaaaaggccttgttaaaatatatgagggaatagagcttcaatttggtctccatgtaccacaacttcattgtaatcttcaataagaggccctcggcgatgaggaagactgctcagacagtatcaaatggggaatgactagaagcgttggcacgtcagcttagtattgacatcttgccacacatgctaccttgattacgagggactaggtgagcgacggtgttaggattttcttattatagtgggaacctatgaacagtgcgagtatcttggctagaaagcctcgatgcagggatgcactcatggatgcttgagagcatgactcggcgggagttgttcgagagacggatttgtgcacaagg

SEQ ID NO: 312159 - DNA, 1083 bp, Cannabis indica
actcttcaaaaactacaacctttaataaaaattcacaaaaaagtgaaaagactaccaaagtccaatcacaatctttggccatgatagaactagaatctaattataaaactttctctccaaactttatcatgatagaattgggacgttcaatttcactagttgtaagctaaacaaagacaattgattatattgataaattgtccttttgttgtttactaatagtaagtagaatggactaaccaaccactcactcattgagtgcattttatggtcctcaaaaaatgaccttaattaattacttcacatgcatatgtcactattgtttatgaaaatcaaaagcgtctatagatagaaaaatattaaatctctcgatcgttacaaaataagttcataggtatggaagaaacatccaaacaactataccagttatcaacaaacgcccacttgatcatgttatgaaccataaaattacaagttcttacaatatacaaaaagaaacaacaaaaaaaagaaacagttcattttcaatctcccatctaaaatcagttccagctccagtaagtgaattgataaccatctttaaatcacttttcacaatagtaaatttgtacctctttatctttattgtatcaaacgctaaacaacaagcatccgcctctccaaaaagtgtcgtaaaagtcaaaattccaatttgaccgttgtcacccatagcactacaccttgatggtctctacgcttaaacatggatattcaagaaaaagtagtaagaaaattccaagatgaagatgacatttgattaattgattccttttctttactattggacaaatacccaaatattcatggagactagtttaactttaaagtatatatcttttggtcttttcattttttccaagctttttttattttttcttcctttctttccatattcttgtaactattgtgaccacacacatattacctcaaattacaataatgtatttatatcatatattaccccaaaataataattttaatttaataattattaaaaacattagttaaagtatatttcaaaatattaaataattttttaaaaaa

SEQ ID NO: 312160 - DNA, 1001 bp, Cannabis indica
ttggtggttttgtccattgccttgtcgcttcacatattgttgaaagtaaccacgcgagataaggatatctatctcgtctttcaattgacaacattcttctgtcgtatgccctatgttcttgtgaaatttacaaaattttgttgcatctcttttgtgtctcgcatgtctcatgggctcaggtttgtagaatgcaaccttgtgctcatgtgcgaggtagatattttctagagtttcattatgcttggtataaatagtgtagattggcacgtacttgtcgtgcttcttctgttttttcttatctttggttgattccttagagtcatctttcctctttgtactagagcctcctggattgttagcctttgtcaaaacagtgctgggtttacttcccgagccagtctttaacaacttcatctctttccttgcttcctcttttcgaacaaacacctgagctctctcattgaactccctgatgtttttaactgggcgatcttgtaaataatcccacaattcacctccaactgtcgagagatcagtcgtgatccctgcttgaagagctgtaagctagatactgtcgttcaagtttctaaaccttgcagcagttgtactgaaacgacttagtaggtcttaagtgtctcgcccggttcctgctttatgttagtaagggaagatgctttaggtcgcctgtctcttgctgcctgaaactgtttcttgaagtcttttgatagctgttcccaagaggtgattgagtgatgggtgaatttgttgaacaagctgctcgctgccccagttagcatggtggggaataaaatacagcgtaagttattcgtaacattgctggctcgcatgatggtattaaagttatttaggtgagcgaccggattcgtagtcctatagtatgacgagacgtgagggtttttaaatccttgggggaattcaatgctcataatgtctagatggaaaggctcgggttccttgtctgagtcgtaaccaggcagttt

SEQ ID NO: 312161 - DNA, 1506 bp, Cannabis indica
tttttaatttcgcggtgcgggtgcggtttgaaaaatttaaaaaaccgcatgtgcgggttggtttgaaaaaatagtcaaaaaccacaccacccgcaccgcgaacacccctatccaatagtatgctttctgcaaaaaaagaaagagctatatatgttaaaattttcaatattatattaattaaaaataataatgaaatgtaattaagtttataaacctgggctgatttctgtttcttcatcgaatcgataattttgctgttctttacatattcccgttttgcagcagatggatttggagaatacggataagatggtgtttgaatagcaatattatctatttcttctttgtcatttttagcccttggcattgtaaatttaatgttaagttacttaataaagtaatagtcattcaacaatatataatacaaaaataatatttgatgaatttagatttttttatgtatgagtattaccattgatgtagtgttgttgcttcaggattttctggattgatttcgatagtacttcattcacgagttgacaatgacaatcctgtataaaaataatattttcagccaatttaagtggacgaaattggtagggatatatacggtgtttgttagtatataagtacttctcttagtttgaacaatcaactttgttcccattattattggttgttttcaacaactttagacaattgttcactaatatcttgtaccaaagcaccccacagagtcaaatatatcgggttgaagctacaaatttgattgaaaaaaaatgacattattattttgctatgtataataattttaaattcatattaaattattatgtgtgctctaatgaagatgatcattatgtatttggatgttttattttatatacgtgtcatcaattaaatatatttcttgtatggtctgctgtctataaattgtgttgaccacttctattgagtttattttgacactacacctatgatatctgaaaattgaatgcaatgttattaaaactttgtaaattatttgttatgtgttatattgtagagatttggagttaccttgtggtttgttggagtatttgtgagatgacaagttattaaacagaataaattcatggactagtttagagatttgtttgccttcttcttagacttcaacaacttgtgtttttgagttcagcgtccagccataatggtaatttgtgtcatttttaaggtattttgcaggtattttgttgacacgggcattattgatatagtaggtgtgtaacacatgcaaagtgtcttttaaagtttcaatattttctacaaaaattactgcatcaactcttgttccttgtgtaaagtttatctttaagacatgcagcaagattttgtattagataaatattaaatttaaaagtagtccagcactgtgcaactaatattattgttaaaaagagaaatgagtctacctttggaatagataaaaataacctgtaacgccctaatgctaaggcacgctac

SEQ ID NO: 312162 - DNA, 3177 bp, Cannabis indica
ataaataaaaatgtaaaaaaagtaccaaatttgacatatagtgtaaaaatccctaaattaaggatagggaatatcttcctttgaaaataaaaattggggaagcatttagatttaaagaaagaaacaaaaacgtcaaatcaagcacctttttcctttcgtataatgttttccctttttgagagagagagtgagacgaggagagacgggaagccactaaacctgacccctcgaatgccatttggttgtggtgcgttggattaatctttatcatacaaaaagatgggatattatcaggtgtactgcaactcccgtatgctcatacacgtgtcacttttattatggtccatattcataattagtcaaatagttggaagtggtcctactccccaatagccaaaatgcccacttaatcactttgtccaactgtcaagtgggttcttttgagaattgactttttgggcgttactcctttcttataataatatcttccttaatgctaaaaatatcaatttcatctaagctacttcctcttatgttatatcgttaattatataattaaatattaaattttatataactaattaaaaaacatttaaatagtattactaaatgatactaataataatgttttaatatctctttccaaaggtgatagttggtattggtagaaagagaacaatggttttttcactgttaaaagtgcctacagtttgcaacagcaacttttttctaggtctggttttgcttcttcatttgatttttggaggaagctgtggaagcttaaacttcccccgaaggtgtagaatttgttatggcgtgtgtgtgtcaatagccttccaacaaggttccaattagccactaaacatgagcctgttgtgacatgccgcccgatctgttctgctgcaccagaaaacagcactttatgtgcttgttagatgcacctttgctgatgcttgctggaggaaaacaaagatgcctgttgtagcacctgctgctatgttattcacaagctggtttgaggaaaggttaaatatttggagtgaagccgagagtgtggaagccgccatggttctatggtccatttggaatactaaaaatgatgtggtatggaatgataaacttcctatggtggatgaggcaattcagaatgtaaaaatcaattatgtggactgatttaatgctcaaaaagccgataaggactctcccatggaccatcatgaggctcaatctgataaatagaagctccctgagtttccaatcatcaaagtaaatgtagatggagcaatcttttcacttgagaatcaatttggagtgggattggtggctcggtctgcatctggtgtggttgtccaggccaaaatcgagtgcaaaattggtgcacttcagccacatgaagttgaggcaatgggaatgaaagaagccttgagttggattaaagctaatgattggcatgatgtgatcattgagtcagattgtcttcaagtaatttcagatttacaaaataataaaattatggcttctccttatgaccatattatttctgattgtaaggcgctgattgtcgatattgataatgttttgttaagcgatctgctaatagggtggtgcattgtctggcgcgatcctctcttgttgaggctgatcatatttttagtagtcactctttacctactgtaaatacatccttagttcgggatgatttaatttaacgaagttttattcaaaaaaaaaaatatctctttcgaaaaaaaaaataacaatgttttaatatcttttatgttgatttgtagcatttgtttttgggaattcagccaaaaaaaattattattggaagtggaaaaaaataaaaaaaataagaaagggctatttacaaaaatatagaaaaaatgaagataagttttgatatatatgtatatggaacacttcttaatgagtattactcattgatgtgtactaaataaatttaactataaatattaattttaaaaatattaagccattagattttgatccgatggcaaataataaaagagaaatttaaatttctacgcttaaattagctacttaattaaagaaaatatcaaataatacatctttttgcagtataatcaaaaataagtttatataaaaaacatttaagtagaactcaatatttgtttatcatttttttgctgaatattttttattattattttcttttcagctggtggaacaacctcagcccatataatgaaaaaatgagagatttttctaattaaaaagaaaaattaagcataaaaactcaatttttttaatattacccattcatgggtaatacccattaagagtgcacctatatatatggcataaatacttaattatactaaattttcacagtttttttaaaaaaacttacaaatatgggaaaaagttacgagggaatgccacataaaaatctcgactgtagatgctgtttttttttcttcagaaattaaaactattttttatttaaactattgtttgtttttttggccaaagagcgaccctcagagtcgttcagccaatgttaagtaaaaatgtcactgaaccgcacggaggctaaagtcacttcctaaaaaaagagaaaagaggataagccaaggtgaagagaatccatctctacaccaacatattggcacgatgtaagatccaagcaagggaagccccaatgcaaagcgagaacctcctcaaagaaaactaagagggcctcatgctttggtggggcaaattccccaacacactcaatcgataagaacatttgaaagaatttgtagactggggggcaagtgttaaccatgaaaattagcactgttaacttttgaggttagttaactaattttggagcaattaacggaagcgcatttaataagcttacctacttggtatgtatttcgcaacaccgccatcgatactcgcaattcatgggatgcacccatgcgattcgatgattcaccccgtggtgattcaatgacgaaagcacgagcataaggagaggttgtacatgtatggatgagggctacatgaaagggtgtgcgagggtgtgttggcgcgagtagggggctcgcatacaagtcgtgcatgtgtgagtattgtgtcgagtgtgtgtgcattggtgtgagtagggggctcgtatgcgagccatgcgtgtgtgtgtgtgtg

SEQ ID NO: 312163 - DNA, 1636 bp, Cannabis indica
gaaattaaaaataacatatgaggtgatttcctatttaattttctacctaatttaagtttttttttgttacaattttagattgcataggcttgatcactttgttcactagttgaaaataattaagtaaaaataaattgatttagacaaaaaaaaaataagattataaaaaaattaagttgaacttaaatatttttatatgaatacattttttatttagcattaaaagagatacctttcaatataatttttttaattaaacataaaaatttaaattcattttttattattgattattggatggtaatagtttaatatttataattaaatttttttaataacaatcaatagataatattcattaatataagtgtttaaattttggaataattttaattaataattatttggtttattaactctatttcaggctatttctaaagaatctaaaaaatttgaattaggagaaaaaacgtattacgtggtgctagtatggagtgcaataatttggcaagggtttttcttgggagcaataggaataatattctgttcgtcgtcgttactctctggaattgttattgcggttcttcttcctgtgacagagatattagctgttattttctacaaagaaaacttccaagccgagaaaggtgtggcacttgcactttcgttgtggggcttcgtttcatatttctatggggaaatcaaacaaaccaagaaacttaaaaaagaggcagaagcccaggcgcagatattgaagaataggtccaccacttccccccaactacatttagagatgcctcatattcacaccccatcagcctgagatcactatatatatacctacgacaatttcatatgggatatctcattttaaatttaaaatataataatatgttgagttatccatatattaaattgcattaattagggtaatgactatatatggcaaaatagagtgttaagacaaaatgtctccttgtcgtacttacatttatacagacattgttagggttagtaatgatgttatatatctattctatataaagtatgcctatataaccgaattcttggtttatgagaaattcgtgggagactttttatttatattaaaaataaaatgatttattattaaaaataaaataatttatgagaaattcatgggtcactttttatttatattaaaaataaaataatttattattaaaaataaaataatttatgagaaattcatgggtcactttttatttatatataataaaataaataaaataaatcccattaaatctaaaaaaaaaatacgattgagtttttgttgttgtacatttatgatttttctcttcttcttctcttcttctcttctagaattaccattttcctataaaaacactcactaaaagaaaaagttatattttagcacatacagtataactaagaagtcataaaatttataattttgtcttctgttaaataaaaataatagcaacttgaagcattattataattatgctgctttgtacatgctgcgacaaaaaggaatgtcaatcttattaatttctccatgttctagctattaatgcaaaccagaaaaagaaaaacatttactaaaacccaccaaaacttatcataattaaacttg

SEQ ID NO: 312164 - DNA, 1233 bp, Cannabis indica
acccttatttggcatcccaactcctcaggtatctacactgtccaaataggttaccatttggcagcttttcttgaggatactgatagcagttcatgttcatcatcaactgcctcacggtggaagttcctttggtcgctgaaattgcctcaaaaacttaagatctttgtttggcgtgtctataatgatgctctccctgttgcaacaactcttgttaagagaaaagtaatcacagactccacttgttccatatgtcatcaagcttgggaaaccataagacatgccctttttgtttgcaagtatgctcgatcagtttggagacactctaactttgtgcttgactggaacaactctatgacgatgcgcaaaggcgactacttggtacatttggctgcaatatacacgaaactaaagatggaaccgatcttttgtattatgtggacaatttggactgagagaaacagagttgttcatggtaatagagctaagacagccaaggagcttgctttttttgctatgaattactggcacaatttcaaccacgcacaacagaaatactgcccagatctatcacacttgaatcatgtgcctgaaacaccaactcctgcattgctatctcctgctgcaaatacactaattctgtggactcctcgagcacctggatcactcaagctgaacgtcgatgctgcagttgacaacaccaaaaaagttacaggaattggtgctctaaatcgggactccaatggcactgttgcagtagccttctccaaaccagttgcaagttgctttgaatcccatgaaatggaggcaattgcactgtttcatagtttaaattggacactacaactccaaatgccgatttctcaaattgaaacagatgctcttcgactttctaatgctttatacaaaccttcatctgtaatctcatcttttcaagatttgattgttgatatttctagtttttttgtcctttttctctaatgtaaatgtttctcacgtcaaacgttcagctaatatggcggctgatagcttggctaagtttgcttaagggtggatgaaacttgtttttggttgaattgtttacctccgcctataaaacgtgtttttggttggattgtttacctccgcctataagctctgttattgtaaataaccttcccatttaatttagggaaatttggaaaactatactttaaaaactctaatattttatacctaaaccaatacatttcaaaa

SEQ ID NO: 312165 - DNA, 484 bp, Cannabis indica
tatatatatataaatttatctcttttgcataattacctttgttaattttttatgccatgcagaccttcctgatgtggacgatgaagagggtgcctctgaagctgaaatggctggtatgcttacaaatttaggaatgtcaaagtctattattaatggctttgataccaagttgaattgattggtgtattctcttcttcttttttcagatgagcctgatgattctatgcacatattcacgggtcatactggtaatacatattactttctttgcttcattttcatttgttaatgaaacttcattccctttacgagtttcataatgtcttttgtgcaacttatgatgggtttggtgtggttagtcttatggtttattcccatgttttttttaacttagcaatatgttgaatcttatgtatctgaagattgttgggtatgattgtgctgagcatattacataatttccttgacaactatgtgtgcagac

SEQ ID NO: 312166 - DNA, 859 bp, Cannabis indica
tcattgttgtttgtgtaatattctgtgtgttagcttatacacatttatagagatgaaaattgttgtgaatctgtcatttacttgtaataacagtttacctgaatgaatgttcatggaattttaagagaccatatttcaaattaaatgattttttttgggtatatttgtctattaaaatttgctattattcctacttctcacatggcatatttggccaattaccttcttttttttttgacattttaatatttgagatttttttttgatgaaatatttaacatgcggttcaattaatccgaaacaaggatacggaatttgttgtatgaaaggctaatggtatagcttatgttttagttaattatgctttgactaatttcttttgtgcaaatcttgtatgcgagaattgtctaatcttttgtaattgttttctttcaataaaggaatttgattttgaaaaaaaaaacttctgtttttacaaagtaatgaagttacacaaggagtaaatttataaatgttaataaatttgtgctaagggtttgtcaagataaagaaaatcttaaaattgtgagatgtgacttcaacctgccaatcaaacatttacaaaataaagaaaaaaaattaaggctaattagtaatttttccctccgaactttgacgtgtactaaatcgtgccacttttgtctaattttatttaattttactgtttcagtgattgtttatgtactaaatcatgctctctagattttgaaatctaccaaatcatgcccctcaaactttgatatgtactaaatcatgtcccttgaactttcatctatgttaaatttttttactaaaattagacaaaagtccttaaatttaa

SEQ ID NO: 312167 - DNA, 2095 bp, Cannabis indica
aaagtggttgtgccaatcggggacacgctggtcgtcaaaaagaagttgtccttgaaggaagttttgtttggaaaatccacgatgatttcgtgctcgtcggagtgaatgctgagatagtaaaagcgtcttacgacattcttcctcgctagaactgctttgatagtgtagagatactctatttctagaggaatggggcactcacaatttaggattttgtacagaacccttaagcttgtgaggattctgttggagacgggatttggttggaacggggcaagcctgaggtggttggaaaagtccttgaaataatcacaaagggggattattgcccctgctcttatgtgctcaaggctctaagctcctattccagtcgagccacttgtataggcctcgccactgacccccttagaggtctcgcctataagatgcacaggtgggtaacaactaaattcaccagctcgcactgatctaacttgacagactcgcctatactcgattccacatgtcctcagtgaatcgcctacgttgcctgagatagttcgcaccctcgactctattaactttgcctcaaaggtgatgttagggtcttggggacattatttcaaagtccaagtcacctggttcaaaagtaattgtgactctgggtaaaaatagaggtttagcgaaaggaatagaagacacactcggaggttcaggccaagcagcatctcgcaagaaacagcatttgccttcagtgatttcatgcaagaaacatctgtagcgactagcattgtcttcctgattaattttcactaagtgttccctaatgctttcatcgtttacctctaatttggatgtgggctttgaaattttgggtttttaagggatggcaattttagtaggaaactcaatttctaaatcttctggacgataaacctttgaaataaattgggacattactgcaaggagaaagcaataccaattcccgcaagaaatttatcaaaccagaaggtggtgaattggaggatctggaaaacctacgtactgtctaaaccctaatatttacccagatacagtgcaaccctaacaattactaaaattaaatgagatgataaggatacagaaaaataaggtaacaattaaacccagaaatacaacataataagcatgtgagatattaaggagaaaagccacttactgttcaatgttggggtttaagacgatgaatggctctacaatttgcgaatccctgaacgtcatgaagatctctccgagtgcttgaagtcgaaaataaaatcagatgaaactcgcagaaaaaatgtcaatgatcgagagggcatacaaatttttgagcaaatctggtgatggtttttcgacggagaggcttagaaaatttttagagtttcaaaagtggtaaggatagtgcaaagatggttcctttttcctttatatacccttgggttagtctccgttagatcagaaagatgattaatcctacgggtagaatttgaaataggagtggaaaagatggttattaattgttgatgtccctcaaaaccacaaaaccgctaaaatcagaggacatgcattttttcaaaagggattattacaaagataccctctgtaatcattaaaaagcactttttattaaaaggaagttttttaggggcaattgttatacccgaaattcggctagcacttcagaggaggacacatgtcaaactgggagaatacgaatcaacaaatgtaatgatatttatatttgaaaatggaataactcattaaatgcgaaactgatagagtatatttacaactttctaactataaggtcttatgcaagataaaaatatataaacttttggctcgtactttaacgagaaaccatacgacacctgtagtgcaaggcgaggcatcaacctcgctacgcatgaagatacatagacgagacatgatgactgttaaggaaataagcgtataatacaagttatacaaactaagtataatagtcgagtaaatccaaacaactaatagcgaggcatccatctcgctataggaaggcgcgctcatggtactttcaataatcagctctagacatctttcaatgagatccacagct

SEQ ID NO: 312168 - DNA, 600 bp, Cannabis indica
ccgatttttttgaggttaattctattttagtcctaatccctaaaaaacaaagagcctgtactctcaaagattttaggcctatcagtctttgcattaccttttataaggttattttcaaagtgttggctaataaacttaaaatggtacttgataaaattatctctcctttgcaaagtatttttgtgtctggaagagtcatttttgatcatatacttattgcccaggaagttatccatgctattaactctaggaaaaatggtaaacgtagttgggctgccttaaagcttgatatggctaagacgtttgggagagttaattggtattatctagagagcattatgttgcattttaatatccttatcaaatttgtctctcttattatgaaacttgtgactacttctaggctttccttttgattaatggggttgtcaaaggttctgttaaactttctaggggtcttaggcagggggatccatcatccccttacctttttcttctctgtgctgaagggttatcctctctccttcgtgtccatcaaaatgagggtctcctcaagatcaagattaagattcatagacctaagatcaaccattgatattg

SEQ ID NO: 312169 - DNA, 1986 bp, Cannabis indica
ataaaatgtaggaggtataagtttttgaagtgcgaaccacgttgtacatttaattatattattgtaataaactagctagtttatattattaggcctttctgtcttttgttttggtttgtggggggttgtatattggactgtgcaagacctttgacctttaggaaacgttaggaaataagaagtattatatgtcaaatatatatatcccaataaaagtcaaactcaaatgcctccctcactcacattatgtacatttctgtttgctgatcaactaaatagtgctaaggaacataaaaagtgctattaaatttaaaataaattaagtcaactatatatagagaataataaatttatgtttggtagagctagctagcttaaatatatatatagataataataaactaagcaactttaatactaaattggataatatataatccgggtgttaaactacggtgacattattatctatagaataatttgaatatgcgaaaaagaagagtgcatatatcataatatatatttttcttttcttatttatttaatgaacgaagaagaaaaaaggaatgttgttgatctacaaatttgctcccctattcttttcccattattctacttagtacgtacgatttatttttaattttgatatattatgaagactaataactacggagaaaggataacagagccatccctcaatttttttagggtaatatacatttttttttaaaaaaaaaaaaattcaaagcatttatatgtataataacaaatattttgttttttaaggttacactttatttgttacaatctcataaatataggacataaattaaatttcttatatatagttttttttattgtctttttgcatgaaattttcctttatatatatttcttcacgattgaattcagctggtagttgcagaattaatagtaaacaatttaggaaagtataagacaatctttgttaaatatcaaagtatagtaagtaattccataataataataaattctcgtgatgataccaacatagatagactacattaatacaaagtaactctatatataaatttaattattatttttttaataaatgtatctctatataattccatttattatttattattatatattatagaaacatgtacagtagtcagtagtcatgtagtatcaactactatacttttttttctcacaaagtaactactatatatacttcatgtgaagaaagaaatgaaagaaaaaaaacattatttgatgatatgaatgcaattgctattggtgcttgcttcccgaccaaaccggcccgctgtggtgtatttttatttattattttttattataccacttttttatattgaaaaaaataaaattgttgcattgttcatacataccattttattaaactaatatcacatgtattacaataatattcataaaaatgtccttataacttttacatgtataatacatttaatatatattatatataatttcgatatattgattaaaaaattactaaatatcatgtttaaatgatttcaaagataaattatcccaagtttaatcctaagtttttcttttttaaaaaattgaacatattttaaacaatcatttcgcatttaattattattatatctaaaataatagtatagagttattaaaccttacaacaaattttaagtgagaaagtaaaacactacaagaaattacttttgccagtacatttttgtgttggcaaaagtttgtattacgctggtaaaatagaatttacttgtgctgtgttggcaaaaggaggttggtaaatcaatgttggtattagaacttttgccagcataaaatgaaaagtgctggtaaaagttagattttaaccactgtaaatgtacgctggtaaaactttgacctctttgttagcgcagtttgtgaaatgcactggtaaaagttatttttaccagcgtagtaacaaactgtgctggtaaaagt

SEQ ID NO: 312170 - DNA, 1595 bp, Cannabis indica
cttaataagcttcaaattctcattttgctttcgaatcaaataaaggaccaaaataagtgatatatactattatgtcattaattgtataattaaaataaacactttttagagattaataagcaaacaaaaaaattattatcttatctcaagctcaccttttgtttagattccatttcttctaattatgataaatttaacataacaaacacatcatatataagtccaacaagcacataatgcatgctcattcatgggtgatcaagctttattacaacattacaatatttttgatttagtgtcgtttcaaacaagagagataagatggttaattaataactacaatacaagaaagccaaaaccttcgttttcagaaaataataacaaaaaaagaagagaaaaaggctaacctgaattcgtaacatgcttcgtacaaacgggacaattccttggaaaaatagtgcaatctcagccactctttcatgttttttttttttgagtgtagcgtaatagtattttacaatcatttaatagcttaatagcttcaaggtcttaggttcgaacccatgacctctccctttttcccatcccctcttaccactaagctagccactcttccatgttgatcagtcacaaatggtgatatcagaaaattagaatatattttaggacatatttatactacatatctttatatatttatacttacatgtacaatagatactactaagttgtagttattcttaattctaagaataaaaaaaaccacaaagcaagcatatcttagtttccactaaattattaacaataagcgtggtcgaagaataacccaccacacacatattcaaaaattcaaacacatatcatgatattcatattacaacttcttatattattaccttaatttgtttacattatttgttttcgtagatgagttaatttgatctgggttcttcttcaatgaatctttcttttttatttatttgtttcaatttgtattacactactaaaaaaattaggttttcctcacatactcatcggtctttaagactgatacctattcgaccgtcgaaaaattaagtagaataggctttagtagaaaaacattaaaaaaagtttcttctgacactggaaaatcatcgacaatacaaagctgaattattgacagttttgcaccgtcggggattcctctaaaacccagtttcgtttttaagcacgtcacggttttcaaccgttagtaatacaacacgaatgtttaaaaccaacgggcattctcaactatatccgtcggttttaaacagtcacttacttttattcactacaaaaaatcttacttaattttagtttcaacaaaacttgtgactaaaagtgaaaaaattatgactaatcataaattattattcctatgtttgtgatgttagtttctatatcactcataaaatatgcaacaacaaaattcaattctatatatagataaacatattacatataattataagtgtataactatagatctaaagaatacatttgttgattcaaagagaagaattcaaatggcggaagcgtaccttaattcatagatagtgatgatcttaatc

SEQ ID NO: 312171 - DNA, 657 bp, Cannabis indica
tagttttttacgatctcctcaaaatgccaaattattttgcccaagtcttttcacaatagcaattatgctctctaatacttgtttctaatgttttttttttcttgatagacttgttcttctagacttgcatcaattgttaacttcattttcaatcacttctctaattccacccaactagcaattgactcaatgtgttgtttacttcgttcatgacttttttcgtctattagaaatattatgttaatcattcaaacctccctcagctaaaaagtctacaagatgcttctttgttgtaaataatttacaacaaaaacaaattactttatttaaagaatttgaatataccaaccactttctatcttgtttctctccatttagtaattctcaaatgtaatgcacattaaaaaaattcctactaaaatcatccctccctagtaaacacatctttaaggagtctttttgaacccctttcaactataaagtcactcatattaatatgtcaatcctatcccaatttcttagatctcaatatcaaaaggaaaattgaatatattacttgaagttttttcattctcattatcattcactgttgcgaatcgatcaactccgctctaaaaaaaatttagagaagaattattgcttgcgtgaatttgtaac

SEQ ID NO: 312172 - DNA, 2583 bp, Cannabis indica
tttaaactcttatgcggatcggattggatccaaaatatgaaatccgcacttagtgcagattggatgttgtttgaccaaaaaaatacggattggatcggatgaacacccctagtaaaaactcataaaccaagttaagactaaaaaaacaaaagacatatgaagataagagatgaagaattatggaagttctaaagaaaactcaagtaaaaatagtgtaatgctcttgttgtattgattcaaaatattgagcttacaagttatgattttcaaaccctttctccatggaatgatgttctatttatgggggctctattggccctaggtgagtttatgtcttaaaaaatctttaaagacaacatttattattaataagagttaaacattttgatatatatatatatatatgaatgtcaaattattaatatttaatattgaataacatataaatataaaaaaatttacttattcatgcatgagactgtgacttgtatctatacagaaaattaagatcacttagtcatgaataaaacagtcagcaacatattaaagtttaggaatctttaatcaatggttgctactacggttcacggatgcccgttattcggtacaagtaatcttgattcgtattactagtgtaacatgatatcttattgaaggtattgtatataatagagattatacatgacaagaactaatatgaataaagttgtttttatcaaacagaccttttactataaagacctaattcatattataataatgatcaatagtagatcggcctaaatcctgagtaatcatgaactcttattcatagtactaagtttttttattcactcattaaagtatctcagagaagatgaatcttacaacttatgttttaagaatctaataatgtgaatagttgagaacatgatctacaattatgtaatcctagctttcttaatagatcgaatgtttgttccctttaagtgttaattctggaactgaaaagttgtgcacaaatttagattatttgtactagtgaattaacggtactaaaggataaagaagtaattagaagggtaaaatggtaatttgaccaaatctaattacaaatcattacaaacaggtctaatcactgaaattgattatataaataggcacaacagtataactcaataaatataattctatgattactaagagttcaattctaaatttatagtggagtaatcatggaattaacaaacaagattatttgattcatgagatttaataaataaatccaatttattagagcttagaattataggcccatgttccccagatcgtcatcttgaaacactgttaaggggtaggttaaatgtatatggaagttcagaaaaatctattttgaattagcaaaatagtaattatttatttttgtaatcaataatttatttttcaaattaattaattagaaaaaatgaaaaaagttgttaagataaaagttgttaggacaaaaggcacattccttgtcttaaacaaggcataggaggcgtcacatgcactctgtccaaacacagtgcatgttccccatatagtgtgtggggtgttcttattggttttgtctttttaattaattaattcaatagataaatattttaatttgaaaagtagttgagatattctctcaagtagttgtgagattccctcaattggttattaaatataagtatttataactgaattcgattatattatttattcaagtaattaaatatgatttaataaatagatttgaatttaaataattaattgtaataaaaaatttattagggttatttaaatgtgtcatataacaaaattctgaagatgagttttgagaatagaatttttacgtaactaatcagaaagcatataaagaattttaccattaaacctttatctctctatcacataaaaaataatttttgctcatgtgttgagatttatacaaaaacttcatatacacttcatcctagtatcactcagtactctatgtatggtggatcgatctagaagactacggtgtgagatttattagatccaacttacgagaagtttcaaagatatcctgatagtcatctaaaggtattcatttctttcatgcaatttatgtgttggacttaatgtatatacatctgaagatctttgggattatggtacaatgataattagttaaatattagtaccataaaactaataattaatatcaagagcaattccataatgtatatatatttaatgtcgtgagagttttatgtatttacataaatatatatgtgatgtatattgtgaatgaatggtatatgattgtgaatatatgtgagatgatggattgttaatattatggtaaaattgggtataaatttttgttgaccttgaaaagtggtcaacatcaactcactagattggtgagatattaataagtttaagtaaataatttagagagacgcataaaatttatagtagtttcactctgtatgtcgtgatggtaagggatttacgtctaattcaaactttatttctcacaagaattaaaaaaaaggctatgtgttaagctctagtttctagagagagaaa

SEQ ID NO: 312173 - DNA, 1461 bp, Cannabis indica
aaaaataataaagaaactacagatcatatatctaaacaataatggtgaaaagagtctcgatcgttttcttcgatttatgggtctcgatctctttgatgggtcacagtgtggtggcagtcatcggtgtacggtctcttggttgatggtcgtcagtatgggcgggactggttgcgctacgagaatgggaggagacacaggtttgggtgaagacgagagagggaacaagagaaggtagagaaagagagagatgaattttgggtgagggaggagtaatttggggatcaaatgaaaactaggcttaattgcctagagtgagtatctttagtttatttttaaaattttagactaatagaagtatcattaattaaatttccctgtgaccctataataaaagaagagtattaagggcaataatatattttccctagtctattaaatgatagttaggtctattaaatttggggagttctatttgcatcccataaaatgataattagtacaccctattattaaaagaatacttaaaataattttaaaaaaaatgctcttaatatattttttaattttttttcacacgttattttatgttaacgtcaatacttattttaattttattttcatatatttttttaaatcatgtatatatatatattttattttattgtataagatttaaaatctaatttatttttatttgatagttatatttttaagaatataaattaaaagaaaaaagttaaaagaacttaggacaatcaaaaatatatatattttatataaaataaaaattattaaaataaaatttcttcaaaaatatttagggtgtaaataaaatttgttacaacacatgcattttattaggtaacatttaacagactcatagctagcacttaataacgaaaagagcaccgctgcaacaaaacaatagcaaaagaaatttacactatcgtcatttttttctgtaattaaagcatatgtttaacaattataaataattaacgaacactacaaatatctttagaaaaaatttacaatacaccttgtctattgatgaactccctatttgtttcggcataagagaattgaactaaaaaaaatttctcaaatatcgaaatagataggtgtgcatcaataaacttctttttaagggtgtgcattgtgagaacacccataactttattatgcgtacaaaatacgtattattacattattggtttacttttaaaaaataaatatattactttattgttatggggggttgggatgggaaagaatagatatcatttttaagtttatttttgtaaaacaaatatatgtctgtataagtactctttacaaattctaacatttatatattctcaaactaataagactgttttataaagaaattatacaacaaaaaaacttaaatcatttttagtcaaatttagagattagttaaaaagtactaattaaaaatgg

SEQ ID NO: 312174 - DNA, 1012 bp, Cannabis indica
gagtccaccacattagcttgctattgggactcttaagtgtcgcctatgtattgcactactgcatgggcttggcgcacccctccaactttagtttaaacttttacctgggtatgtttgttttcctttggtacactagaaaagtgattacattttttggtgttcttgtatctctttttaaatattttgtcttaattccacattgatatgaacttgaataggctgacaagcttatttgtacatgattctaagttcatatagaatctatttgtgcattctagtttgagaatctacttgtaatagtgttattacaactcaatgtaaaagcacaaaccaatttatcatagaaaaagtttgtagagcagcatatacagagtgttttttttttcttaagggaagaatatacagagttggtgagtacttatagcatttctggtcttgtaagagtcaaaacagtttggctccaaaagtgtagaaatagaaagcagaatcttttgaaaaaaaatgagagagaatgaaagcttattaacatgaaagcttattaaagtttaacctctttataaagggatgagttcgaaccaagtcccctaaattattagaaatatggaataacattgtgctacactagaaaaaaagtttaatctctttatgaataatgaatagtgataacgtaatttagaagctaggatgtactaattttcatctttgttttcggttgcagtctcttgaaagcttatagtggcatatttagcactcctattaaagcaatggtgtccatagctacaattggacttcatttcttattctttatctaccttttttagggggctaaataccattttagactttgtgttttgcaaaagttactaattgaaccatttattttgttaaatgataaaataaaccctgtattttctttaatggtacaaataagatcctgaactgattttttgttataataagatttaataataatctaatctaaaagtgtaatgataaaactatttatattttc

SEQ ID NO: 312175 - DNA, 725 bp, Cannabis indica
tgttctatgttatatacaaatagatcttgggttaattgttaatttatataacatccccatctcccgaaactctattcgaccggtcgtcgtctccgattcgtctctccagtgcaggtaatcagtcgccgtctatagttaatcagttgtcatctctccatctcgtcatttatgcgtttctcgtcgatgaccgaagagccgacctaagaaacccattttttttttataatattttgatttttctttttctgggattgtatattattctggagttttttttttttttttcaggtctttacaattgcattttaatagagtggtcttgaattcagacttcccaagcaaaggtggtatttcaattgtgtgatacatattttccatttggcaagaggatgctagagccaaggcagcagctagtttgttgtatttatgtttgtaaattctttttcctagtttgttaatgttgattttaggtgaaaaaatggtggatcaaaattgttggtaaatcatttgcactatgtttgtttttgtaatttcaaatagtgtaatttggatcttgtgtaagttttgaatttgtctttaattaattttgattaaagtttttaatttattttatttactgtactttgatttttttttactattaatatatttttttgattgaagtttattttttttagtaaaaaaataaaaaaaaagatatttcttttaaattgaatatgattata

SEQ ID NO: 312176 - DNA, 1591 bp, Cannabis indica
aaccataacaggacaagtcaaataaacatacctgaacatcataaaatttgatatagaagcgagaactgtcaatggaaagcttaatttgtaagaagtttctgcaatagttgaactcaattttccattgacactaggtccaaggccccaaatggagatcaattccccataagcagctggttcttcagtgccagcaaatgcaataggcactcctccatttatcaaaatcatcacatactgaaccattagagcacaaattataagcactaaataagaaaataagagttgcttcaagaaggtgcacaataatgtgacaaagtttgtcaatattggaacctaaccttactgtatcgaaagaaagatcaatctggatcaagtgtttccatacaaaatgcaggcacaacgctaagatgcttaagctatctagcactatgatctctagtgttttgccgcacaaggaaaaggaccaagaagaaagtctaaaagaatttttttttcttctagaattcaataaaataaatttacaaaagttgtgaaatctgtaaaattacaattaattgagcttccactatcagtcagaattatgttttacttcctttctaaaatctattgttcatattgaaatgaaacttggaaaacaaacttaaaacgaagcatgctcattttatcgaacagctcgtggtcacaacaaaaaccacataccaaattgaatacagatatatatatttagatacatgtgcgtgtatatatatatatgagagagagatgcttacagattcaggtttgccaatgattttggcaacagctttggtggcgtccttgagaatgtcggaggcgatgactgcgtcgactgggacattcgtgaagaggtttaaggtcggcattttacacacactctctctctgagctaaagaggaaggtttcttgttgtaaaaccagacatttgaagataatgtccactccctttcaacttcaacttcaacttcttctttctcaatttttcatataataaaactacccttatacttttgcaatattagaaacttaaccaaacataaatttgtggacattatcttcaaatgtctggattatttatttatatataaggaaaaaaacataaatttgtgctaaaatacccctcaattttgggtttatttatttttattttcttgaaaacaaacgtaattatatagatgaaggtaaattgagtctcatagtcattatacacaatggtatctagtatagaggaagtctcaatcccatcaattacattttgattaaaaacccacttaactaaattgtgaacaacaaaattaaaatatctagaaactttcaaaaaattacattccaaaaaagagttcataagacttctaaaataaactacatagttattaattttccaccttaggtttaaccccttgacaactttaataagtatgttagaattatatttcacgataacaaattgcaagtctttctctgctgcaagttccaacgctaacatacaagatacgacttccccactaagatcatcttcaacaggtgtatattttaggttaaatttggtccaaaatataccataaagctatatttg

SEQ ID NO: 312177 - DNA, 1129 bp, Cannabis indica
gctcccctttttgcctaataaaactatgtttggtaattgcctcggcctctacaaaattttgtaggggagtaattttcggcataaatacttaattttaatttttgacggtaataaatatttttggtacttaaccgttaaatattaattattaggtcattatttacgtgtcattttgttattggtatatttaaattaatttttttgcaactggagttaaacttacatatttatgccgtaaattacacttttgaagaataatgattgttttctttttctttttaggaagaaccatgatagtttttcccccttaactttgtatacagtatcgtggtctttttatcatattttattcaattttacaggtgttatcaagaaaaaaaaaaaaaaaataagataacactaagaatagcaaagtattcacattctcaaatattagactacgaaataaacaaaacaaatgtagtaaaaaggaaatgaaaacaaaaaaaagtgtaatggttcagtcagagtttggtctgcttaatctatttttagcaattgttttagcttagtttatttgatttggatcactcatttatataaaaagcaagtgttcgttgattttacatatacggccagacaagaccatttattacattattaacactacaaaataattaagataaatgttaacagaataaatgtaagagcagtttcgtccgttcttgattaattgcttgaacatgcgacttgtcaagtcgcaaattgactatccatatttcaaacacgcgaactcgtgggctacgtggtgttctactcgcataatgggcatttgggctttttaggttaattgatgaatgtttgagatcatccttaattgcatattcgggcattcttgcgtcgacaacttaaaatttgcgagtttttaacaagtcttcgaacacattaatctttcaaaccaaacatgtgcaaagatgtagtctttacatgtcgcaggagggatatacttgatcatcgtatataattgatatacgcgcaaccagtactagcttctctcggtcttgcttatttctcgacattatgttgtgcatagtgtgcgactagaccttgtctcggtcgcacattctcgcaagttcatatcatgcgaggt

SEQ ID NO: 312178 - DNA, 512 bp, Cannabis indica
aatacaactaaaatgagagtaggtcattacttaatcaaaggggaagaacctctctataaaattttgtgtctttacatttattatctttccacatttgacagcataaacgaaattagatcttagtcagactccacgttagttggctaaacttacagtcaatattttggtgctttcattgagagcctgaaattctcattcaaaaagctctcactttgttttcttaatttccattttgcatggctgtcatgagatgtgggaattttaccgaaccatgagactctatgggcacaaatcccaatgtccaagtgccacctactgtgaccaaccaaaacatggctgctcggccaccatgttttggcacctctaccacagatgtaacaccttaatctataggtacgccacgtgtgtggttttataaactagtttaatactaatagaataattaattattaaaaattgtgataatattaaaaacttgactaaaataaaacactaaaaacggacattataac

SEQ ID NO: 312179 - DNA, 903 bp, Cannabis indica
aaaataatttccaacatatacatgcttaaaaacaagtttgatgtccaaactataatacctaattttttcaacatggtttgcactcaattctcaaccaacattaaagcagtctgatcgaataatgctaaagaactaaacttataaacgttttttgcctcaaaaggcatcacacattacaattcatgtgtggaaagaccacaacaaaactcggttgttgaaagaaaacgccaacatattttaaatgtagctcaagctctaggtttccaatctaatttacctttggtaattggtatattggccctatctagttcaaactgctattatcttatcaatagaacaccttccaagttgttcaaaggcctcacttcttatgaaacatttcataatactgctctccattatgatcatttaagaagctttggttgtttagcctatggctccactctcccttccaaaagacacaaatttagaccaagaagtagagcctctatttttattggctatccacaaggtatgaaggcttatatgcttatggatattgagataaaacaaacttatgtctctggggatgttgttttctatgaacatatcttccctttattttccctaacatccccctttgagattaacaatttgtttcctcacactgtgcttcccactgttagacctgtgcaggagactcacaggccaataaccaccaatttcatgatcattcctgcatctaaactagttaaagttgatccccatctcagccagccaagttctccatctactaaacctgaccaaattcaatcaacaccagttcccactgatgctactgttagaatatattttaccaggatttagatttactgacaagtatgtttattaacatcctaaatatgaatttctaaaagaatgaaa

SEQ ID NO: 312180 - DNA, 1850 bp, Cannabis indica
ccatatttatgttagcgctcccactcaattgcattaccgtgttcccaaaatgtacgtatcaccctgatacaaaactaggcttaactacaaatcaaagaacacgaataacactcttgagattgagcctaaccatatcaggatttcgatcatgtgatctaggatcaacaggtgatattgaattgaatagatattacggtaaattttaacatatctaatcaaagttcaatatcggtcccttccgatgtatactccatacatccgatactggtaaactttgccaatgtcctggaaaggacataacacttttccaaggtgtaagaatacctatcgctgattataccatgtcagtctaaatccagtgttctgacaaatcagggaataaacttttgaacatataataaagattatattccactgtgctgacaacactataatctttaacaaactcatatgttctggacttaaaaagaattcatacattatatacatataatcatgaaataaatcatgtgaaccatgcaacataaaatgttatttctgatctttattaataagtaaatctgattatatgaaatgagttttatttagggcataaaacccaacactaagatcctggtaaaataatttccaacaatatcttggtgtcttttgagattatgcattatctcaaaaggaaaaacaggggaaaggttggtcaaatggctttgaaacttgatatgagcaaagcttacgaccgtgttgtgtggtcatttctggagatgttgcttttaaaaatggggtttcatgctagatgggttcagcttattatggctcttctttgctctgtgcggtattggatcacttcaggtggtcaactgttgggacccataactccatcacgcggtattcctcagggtgatcctctatctccatatcttttcattctctatgcaaaaagtctttcttctcttatccgtaggtacgaaagttgtggttggcttaaagggtgtcaagtggctcgtggggctccttctgtgtcacatgtgttctttgctgatgacagctgtctgtactgtcaggctcttgagactgaggctgaaagaatcataaccctattggctagttttgaacatgcttttggtcaaaaagttaatcgtaaaaaatattctattttgttcagaaaaatcctcctttggatgttaagggacgtgtgtgctctattctcagaatggtggaagctggtgatgaaggtttttatctgggattaccaaatatcatgaagcataataaaaatgttgtgttgggatttctaacagataaaatgaagaaaagaattgaaagttgggacaacaaatttttatctcctgctagtaaagaagttctgttgaagtcttctactcaatctcttcctaattatgctatgagtgttttcttgattcccaaaggtatatgtgaagacttggagaaactaatgtgttaattctggtggagaaccaaatataggcaaggctcggtatccattggatgaactgggatcttatgtgtatttctaaggatcaaggtggtatgaggtttcgacatttgcacgagtttaatatcgctcttcttggcaaataagcttggagattgcacactcgcacatactctcttcttagcaagcttttcaaggctcaatattattctcgtggttaattcatcactactgaattgggcaacaaatcaagcttttttggagaagtatacttgaagcaaaatacttgattactaaaggagaccggttgcttattggatcgggtgagattgtttctattatgtgtgatccttggcttcctcatgaggacaaccctcatgtttctgttggaaattatttt

SEQ ID NO: 312181 - DNA, 3722 bp, Cannabis indica
tcctgctcttttttttaaaaaaatttctgtttagatcgttggatttgttcgtttcctattgaaattcgacgggatttacagttgttttacgttcgatctggtttcattctggttgcgtggccgactgcatcgatggagcttcattcatcctctccgtttgtgacgtgcggctgaaggtaagggcaagtggtatttttgtaatattttcattttgggctgtacaaatgttcattgggccggcccacagtattgttgtaatattttttcctttttagaatattcctgtttttttccctatttattatatctttttaaattaaaaaaactattaaattacttataatattaatcatataatcattagtaactattctacaattatttttttagttaacaaccttattatttttcaattttctattaaccagattatattatgtataaacaataattaactttgtaagtaacttctacaataaacctaatgttataaaaaaaaatatatattttaaataatattaaaatatcataatatataactctccactaacttataagcaatttaaatgtctacaaattttactaaaaagttatgtcatttgtttatttttattttattgtaactcataagtttcttaaacaagttatgtgagctatcttttatttttattttactataacttattatattttaaatgaatttaaaattaacataaatgttgctacaaaataaaaataatgtaacgcataaataggtacctattcgaaattagtagttaaatatatatgagataattttatcttaaaataattctttttataaaaaaaataatataatataaaataaaaaaatagtatgctataataaattttgtttaaagtctacggtttaattattctttggtttttttcttacaaaaatactagaatttgggttaacttttacaaaattactgtcatacggaaaaattttcaaaaatagagttttttttataaaataccagtagattacaaaatagaacaactaaaaaacaccagtagaacaccagtaaaaacttaacacattatactacagtatgaaacttataaaaaacacagtaaaaaagtaaaaaataccgcctagcagtatttttgtaaaaaatgacaaaagttagtataccatataaatttctctttttctaattagatgggcgccaattggtcaggtttgggccatggtttttgttttcaattatatggtatttagtttagtgtttcattagtttttgcttaggtgtcacgttacttttaattttgcatgagtttgaacaacgttattttgtaattaatttgctaataacgtatatttatgaaaaaattccaaaaaaaatagataattaggttcttatttaaaagaaatgtagtattttcaaaattatttaaaattgtgtatttttaaaaggaaaatattttttaacttttggactaggtggactttagttataggcctaacccccctatacacagagtcaagtttgattattgaatatatgctatgttttgtgatttatacaaaaaaaaaaaaaaattagtaattgtattgtattgagtaatgatatgtataaacataaaatattaatatataacaagaaaaaaaaaataagttttcccattaaaacaccattactacaatttatctttttcatgacctgaatatttcgtaaaggccgtgaaagggttttgaagaattttcatgactgacaatgttggacatgaaaaatatttcatcatacccaacattgctcgacataaaaaaggcaaagggacataaaatttcatattttcatttatttaatctttttttattttcatgtcgagcatttgtagatactacacggatacggtatccagcaaagctgagtgttataattattattaaaaatcactcctgaatggtaaagcttaatagtagataacacataaagaggttaacatataagttttgatatatatctttaaaaaatgttgctcctttcaatcacatttattaatatcattataattattattgttgctgttgtttacactaaaagtagtaacatccatgtttgacctgtggcaagaaggaaaatatcctagagttgagtattcccgaatcatagaagttgaccttggaggggtcccttaccttatgccagttgacttcgggaacttcaaaatgagtgtttggatcccgccaaattgattccaactcactatctttcagtatttagtaccataaagacaagaagcatccaagtcccacggcctgggagttgaaaatacacaaaatagcatcaaagaaatcaactcgaacgcctagggtttcatccactgcccaagttaataacccaactaaggtttcagtttttaagactgtcttagtgcaaatggatcaaactttatactgatacattagccatgtcatgaacatattttaggcatcaggattagattcaaaacacttctatttttgagcactcggagcacccaggtgccccaagcacccaacacccaggttgacgttttatcaacctagggcgcttcaaagcatcaaactgaagaacaatcttgtgcattatcttcatcttcatgaaaatgaggaaacaagaactattaaggaagaaacagaccgacctagagggccaacgcccaagttgacattttgtcaacctgggtctataccaaggagttttttcgagaagtcttctgggcatattctttatttttttaaagattaagatacaagtatttttgggaatcaaacggaaccatctagtggcgtgaaattggatccagcgtccaggttgacacctggtgctgggtcgagtgcctaggtttacattttgtcaacatgggctatttctaatcatgttttcaaaaaagtattctgggtattttttccgtcatcataaataacaatgatacaagtaaactcggggagaaaacgataattccaggggcatgaaaactgagcccagtgctcaggataacctagtgccgagcctagcactgaggttgacaatcaacctggtgtgctggtttcgatcatccaaatgcaaattgtgctttgagcattctctctagcatggtcaaaaatggggtaggggaatgcgtccttcaagaaccttggaagtatcaagacgacttccccaaaactccaaaaagagcacatagtgctcaggttgataggtgacctgaagcgttgggttttgcttattcgattttgattctatctcgagcgttcgtctagtatttcatagtaactgagagctatgaagtcagacaagtcaaattcacaacttcatattttcacttttttagcaaagtgacttactcataaattaggcatttttgagtctctcaatttcgtgaaacaacaacatctttgagaactggtaaatgacttcaccagaataaagaaactagctaagtgatgttaaaatacaacttaggcatcaaaaaatgcatccccatcatgttttcccactcactcagcattcagattgatgacatatctcaacttggcattggtccgagaacaaattttagtgaggcacccattactcactcaatattgatctgattgacgtgattcaacttgcgtttcgaagatatttcaatgatctatgaagtcaagtctcacatataagaatattttttatttaaggaaatatatttctatttaaggaaataaataaata

SEQ ID NO: 312182 - DNA, 738 bp, Cannabis indica
ttttttataaaaattctatatagaaatttctattacaacgaccaatgcaacttaaattctaacaaaaaatcgtataaaaatctttattgaaactagcgctgcaaccactctaaaaactcaaaccgtaaatttaaaaaaaaataaaaaaaatatatgggataatttcccttttttttatttatttagagattaaaattcaattcgcttagtaatttaattgatactagagtttttttctatataattattttaattatataaatttatatatacaggtacaagagttaccggcagtgtttattacctttcttgcatggagcttaagcgaggtaatttttattcaatcaattttaccttttcaaattcgtatgtatagtgaatattgtctatatatagtgagagagcatcacttagtatcttgtacttgtagaggataggggcacctcagcctagctcaaatagctgttgggtgtgtgaaacacactaaagtttacttatttagcatacgaataattaaactaaataagtgatacaaaattaaaatataatttacctaataaagaaaaatatgttctaataataatttactaaaatgtgatataaatttaggatataaaaaatgtttgtgataaatatttatactgtacgttaataaattatataggttttggcaaattagttctcaaattttatttgggctatttttaaaaatatgggaaaaattattaaggttataat

SEQ ID NO: 312183 - DNA, 1605 bp, Cannabis indica
ggcccaactgttcaagaacaaaactcaataaaggaatcaaaacaagaacaaataagtaatcaaaaacagaaaataaaggaagaacaaacacaacaattacgaggttcgaacaagagtgatgataaatcactcttgcctagtcctcggctgctggatgaattggagagaacattgtacacagcttgttgtacaaactcgacatgcaaagcttctttacaacatgaactcacttgtaataatggtgacgtgtacttgtgacaatggtgattcaacacacatcatgtactaactatcataactcacaattagtttcatctaggtagttagttgtcttgacatgtggccaaattacaacaatcatctaccttggtcatatgtcaagtctttgccttgttgagtagtcctaatcttagtaatctaagtatgtttagcaagttagaggaacatattgtattatagttcctccaaataaaaagatttccaaaattattcttggaaagttatttgtttcccgaaaagtatgttctcgaacaactaacctgtccatttggaagaagtctcatggaatgatagttgacatctagaagagagttcccggatgactatcatgtccactccgggtgtagacttcaggatagctaatcctcctctagaagggagtcccggatggctagttgttcctcctaaaagggagtcccggatagtcgactccaactagctctttcctatctgggaaactccttcaatgagtgctttggtccgtgttttcaaaagcccacatatacgctcctgaatgcactcttacttatatatgatgaaatggagatctcgctcaaaggagagttggttaagttagttaagttggttattgcctaactaactaaacaacctcacttcttgcagctactaacttttagatcttgatcctaagcctataaataccactaatacctatcatttacacatacaacgattagattgagttgagagagaaagagagtaaaaaaaaagattgagagctagagagaggaatgtacatagaaaagagagagaatattggagttggattttgtatgaagaagatttttacataaaagtgtgagagttgaaacactttgagagaactcatcaaagaatcattcttgactgtattatatttattcttgctcaattaataaagaggatttggagatgttccagagcttatgggttccaggttatggcacgagctcgcctaattaggcgatgtaatatatgggtgccaggttatggcacgagctgcctaattaggcgatgcaatatatgagtgctaagttatgacatgagttcgtttaattaagcaatacaatatatgagtgccaggttatcaacatttaattcttgcttatataaatttaaaaaattttaattcaactcatttcgaacaaatacgaatttttacaaattgaattagatcttacagagtaaatcatgttaaatattttatgaacaccatatataaaagattcttaagtcattcaatgccaatccaaaatacacagctcaagtttcaaaatatcatttacatttctacctcacaaaaactaatttacatttctacctaat

SEQ ID NO: 312184 - DNA, 671 bp, Cannabis indica
atagtttggggggaatttttaacggcaaaaaaaattcacggacacgatttggtacatgtcaaaattcaagaggaaaaattactaatttaccatatttttttatgtgatatttttaaatcttctttctatttctttattttttttagcatatatatttgttttattttttcctcttttaatttttgtttctttcaattacttttaaattaaatttaattttattgtctcaaatttaaattattcttttcattgataatggttttcggtaaagaaatagatgtaccaattggatataatgcttatatattattgaatatttttacaattgactccaaaaaaatgcaccattacatttctcactatttcggcatcgacttttatttagttcaatcttttccagagtttgttgtcggtaccagaaaaaattaccaaaaaaatggtttcttcatcaggaaacttgtttctttgtgattttttcgatgacaatgccaattccgacgacttttttggcgtcgacagcaactcattcgacaacttttctggcaccgacagttactctggtgatttttctagcacaaacagcaaacccgacaacttttccagtatcagtgacaaataaaattacctaaacaaataaaaatattaaatatgggatttaaaaacctaattta

SEQ ID NO: 312185 - DNA, 1618 bp, Cannabis indica
gatttccaacttatgcatccaccttgagctgtgaaaaacataacctataagtgatctcctattgcctatgcatccaacatagtcactatccacataccctgcaacttcctcttttgaattgcaactagcatagtaagctaaaccactatcaagggttcctttaacatacctcattatccatttgagagcttccagtgttgttctctagggttagtaattattctacttctaatgctcatggcatgtgccatatctggtcttgtacaaactataacatacattaggcttcccactgcactttcatatggcacactatccatgacctttctttcatcttctgcttgagaagattgatcttttgagagtttaaagtgagcaaccaaaggaatcgtgactagtttggcattgctcatgtagaatttgctcaaaaccttttccaaataggtcttttgtgatagacaggtcttctcagatcaattttttgtgatttttataccaagtatctacttagcatcacccaaatcttttattttaaattcactactcgagagacctttataacctctatttctgtcatgcttttcccaacaaatagtatgtcatctacatacagttcagatttataccgtaaaagcaagtgattaatggtaatatgttagaggatatatgaaatacaattataagataaatgatacattaattataatagtatagttattacatatctaaacatttcttattcatatggagaaggtataatcttgcaaggaggtataagagaattaagattatacaacatgaataaaacaagtcgataaagtattaaagtaatgtgaatctttaatatggaactgctaagtacggtttactatacactatacttctagtgtgtgtgtaattttgattcggatcacatatgtggataaacatgtagtaaaggtgatgtttataattttattatgcattactggatcgatatgtaattatttaccgagatttttagaaaccaaatatttaagagctaaagaaataattgattgcaataacaaagagacaaggtttattatgtggttgaggtatttacgaaccttactccacgagtcagtctattaacatctaagggtgatattgatgtgtttacaatacttttacaggaaacccaaactctttacccttagtttctttttgaagaagaagaggatcaagggtaatcttagtagagtttttgctatgtgttttggcttgcccatttttcatgagaataaaagggtatttataggctaagtgccgggtatggacagtcaatgacctacctaaggtttctgctcaaatttaactattacatgcaatgttagagctggccaaaggatcccatgggaaatataatggttgtgcgtgtatcaacttgatagcgaggagcattttgtaccacttggacacgtatcacgcggtttaacctttaaaagtaggggccatgtgtcgctcaaatctcgttcctttacgagtaggagtctgcaacatccatctggtaaaaaggtggtggtggtacgcgcactactatgctcggatgtaggaaacaagatttgatctttgtcagaaaaagcataaccgtcacttg

SEQ ID NO: 312186 - DNA, 1155 bp, Cannabis indica
attaaaattctttcataaaatatttatatgttataaaaaaaacaatatttatatgattgacaataactttataatataataatgaatcttcaccaattattttggacacagcttacatgcctatccaatgaagagcaaatagcacaaggaactgacaaaagtacctgaaatatattgtacaatatgaatacagcagtgaggttctaagccttttgaaagttggaagtgtttcaatggcagccaactgcaactgagcttcctcatcgtcctcctctttaatcgaattagttgaaccaaagcctcaagatggggacctcttgcgtctttcaattgagtttagctccatgtcaaaccagtcaactcaattcaacttgtgtgtgtttgtgtttctgtaagagatttaaagagagtttctaaatgtgaactaactgtaatgtgttcaaacaacatactattaaaccaaataaaactagctgtaagaaacataaatataactaggaaaaaaattatacttttaggcactttccctctacttagagataaaatagaaactaattacaaaagaaacacactaagaacctcttgctatggatatattaagcttttggtaatttgtgctctcataatctacaaacacgcccggcaaagaaaacggaaaatagattatgaaaaagagattttgaaaccacgcttctatttgaatatgttttaccaggatctagatttactaccatatatgttgtttaacatcctaaatatgaatttctaaaacaatgtaaataaacacatataaagtttctgaaaccttacagtaggtgcagcggaattaaatgactcattccactgagatctctaacccttgtaccctttctgtagcagagtatcaccaagatctgagcccgaaactccttctattgaatttggattcttcacattcttacatactatgattgaggaccaacttgatgtgtgtaggcacttactcaatcactaagacttaaaattttagtttgtgaagaagactatagtgtttcgaaattgaagaggaagaagaaggaagaggtctcatcaaaaagctaggtttttagctttggaggcattagttggataatgagaccatagccttcctttaatactatcctcaatagggttagg

SEQ ID NO: 312187 - DNA, 3464 bp, Cannabis indica
acattcctaaaaaaaaaagacttactttggtcatcattaattcatttatttatttttagtctaaaaattatagttcatttttttaccaattagaaaaataaaaaaaaaaaaaaaaaactcattttatagtgaatattatcattaatgataaaatcttaaacaattaataaaatagatttagagtaataaataatattttataaataatgatgatatttttaatggttcatgatgaaacaatgaacattggatccaaattcaatggttgagatttgttgactacacttaatgctacttttgactttttgaaatttgtgaaataacaatttcataatttgagagtcacatgctgacgtgacactttattttttatttatttaaattaagaaaaatttgcagtaaaagttcctaaaaaaagttttattaatgctgaatagtttacaatttctaaaaatagtgataataattcccaaaatcatgattcttataagtcctacccaatttaactgttaaagaatgcacatgtcgaagattaattggcccacatcataagcttaataaaaaatgatttaaaaattaattaaataataaaattattaaaaataaataaataaaaattttaatattctttttttttatttgctgaaaactttggcatgtttaattaaggagaatgagaatcaattgtatggcattgattctcattcatttatttattaaatattgtaatgagagaagctagttgtaatgagaaaaactagtagcaccaaaaataaaatctgaattgataaaatttttaggagcaaagctcgatatttttgcttggtcacatgaggatatggtagaaattgattcatccgtaatttcccacgccatcaatatagatctaaacttccatcatgtacaacaaaaataaaggttgctggataaaaagcgagctcaagcattgaaagatgaggatgaaaggttgtgtgcgaataattttatcatcgaggcattctaccctgtttgggtgtcaaatcttgtactagtgcccaagccaaataacaaatagcgagtttgcatcgacttcactaacatcaataaagcatgtccaaaggtttgtttcccacttccaaggatcgactagcttgtggacgatacagttggtcatgagattctaagctttatggatgcctaatcatgttataatcagatcaagatgtatccgccagaccaaaaacatacaagcttcctaacagatataggtttgtattgctacaaagtaatgccctttgggctaaagaatgcaggagcaacctaccaatgtcttgtaaacaagatgtttaaggactaaatcggccacaacatggaggtctacatagacgatatgttagtcaagtctaaaaaggctggaggcacattaaggacatgaacaagtgttttggattccttcgagaatacaacatgaagctcaaccccctcaagtgctcgtttggggtcaagtcgggcaagttccttagcttcacaatgaatgttcgaggaatcaaagcaaattttgagaagatccaatctcttttggatatgaaatcacccacaagtatcaatgagatacaaagtctaacaaaccgaatagcagcactaagcagatttgtatcaaagtctacagataagtgtgttcttttcttcaacatcctatgagaaaacataaagtttaaatggacaggagagtgcaaagttgcatttcaagaattaacaaagcaacttgctcagcctcccatcctaacaaagaccctaaataataaagaactaggaatatacttggcagttacagaatttacagtaagtgtagtccttattagagaagaaaatagagtccaacatctagtatactatgttagcaagaggctcatcaatgcagaaagttaatgccctccaatcgaaaagttaacatattgcttgtcgattgcctcgagaaaactaaggtcttactttcaagctcatcccaagtctacactaaccagtcattgagacaagtgttatagaagcctaaagcctctggccgatggcttaaatgggcaattgagctgggacaatatgagataacctaccaacaaagagtggcaataaaaggccaagttctcgctaattttgtggctgaaggtacaaatgtaatccctacagactcaaaataagagaaatagcagaagcaaaagccaaagaagaagcgagaggaagagcaaaagaatcttacatggaaataacatgtagatggttcatgcacagatcaattgtctggtacaggaattgccctcattacacttgggggcaacaacttcacgatgccatatagtttggtttcaaagcctcaaataatgaagctgagtatgaagcgcttattatcagactaaaattggcacgcgaggtctgggcagagtatttgaacatattcagcgattctcaacttgtggtaaatcatgttctgggtgaatacactgctcaaagggagaagatgatggcctacctgagcaagatacaagacttattaagtcagctcaaggggtacaccatcaaataaatccccagagaaaaatctaatagtatatgcccttacccatgctagcagcacaaaaacaaataaggccaatctagtccatgtctagtacctgccagatccaagtatctctatactagaggaagtagatatattggatgataacccaacctggatgacactaatagtagcatacctcctgtccggagtcctgccagaagataagattaaagaaatgaaaattaggagaaaagttgcatggtatatcatacataatggagtcatgtaccatcgtaattttttgatgccactcttgaggtgtgacactaaagaagaatttgcacagctaatgctcaaacttaatgaagaattttgcagcaatcatgctgaggggcagagtttgtaaaaaaaaaaatacttaaatgggtatttttggcctacaatgatcaaggactcaatggactgtgtcaagaaatgtgacaagtaccaagtaccaaaggctcttcaagatcccgagagctccgctaaacgagctcatacagatacaaactccatgttcatttgtaatatgaggaataaatcttatcaggtaactccctaaaggaaaaggaggagtacaatatgttctggtcgtcataaactattttacaaaatggattgaagttgtagctttagctactataacttcaaagaaggtcttggattttgttgttgaaaatatcatctatcggtacgatctcccacacaagattgtatcagacaatgacaaatagtttgatagcaatatgttcactgatttctataatcagcacgactttatcaaaagcttctctgcagttgctcacccacaagcaaatagaaaagtagaagttgtaaagaaaatctgtaacgcccttacttacgtaaaataagatgccataaataaactggc

SEQ ID NO: 312188 - DNA, 873 bp, Cannabis indica
aaattgaatgaaattaaacaaaagtccttaaatctaataatctcaatagtttaagggaaatttttaacggtcagaaaagttcaagaggcatgatttagcatatattaaaatttggggagtaaaaatcctaattagccaacttcttatacacaaatatatatttatatgagttaagtacatatgatctacaaccttcatgtaccattttttgtttttcttactttagtaatttcactactaacctcaaagctcttattgttttggaaggcaactaagtctggagttttttctgtggaaagtgcttattggataagccaacaaaataaatttaaggagccatgcaagaaaatatgggacaaattttagcaaatgaagattcacccatgaatccaacttctatgctagaagattatatcaggcatactcccgactaagagtcggcttggctttggtacttatgaccaaattcagtgcaatttctgcaacatggaggcggaatctactctccatcttttttgcaaatgccttgttgttggtgacatatggttcaaaagttcttggggaattagaattgatagcttaaactggtctagcattaaaaaaattaagcacatagtggactgagattacatatgatgatttggccattttgcagcttgtgtttgtgatacgatctggaagtggagacacgacatgatctacaaagagaaagtgtgtgttttggaggacatctatacggactgcattagaagattcgaagaatttaagttgattcgatactggttttatcaggaggcactataaaataactgttacttttagtgacaactttttagtcacaatataatttttctgtgactaaatgtgactttt

SEQ ID NO: 312189 - DNA, 1109 bp, Cannabis indica
gaggtcaacactatcaatcattgagtaaattacgtccacaaggggattccccttcaaaagagaaacttgcaattcttttacatttttaagaacaattttatctatgctagataattttctttcttgtacaagattaaatctacttttgaagccctctttaatgcaactatctatacaactcggattcatacactttttctcatttatacacaaatttcaatttagcaaaatgttataaattgcacctgctaacacattcttatgaacattatataatttttatgacacattctagtatatcttttttttttcaaaattatatatgtgtttttaaaaaatatatatttttttcaataacaaaaaaaaatagcaaagcctataatagtagaataattaaaaaagaacagtggaataacagcgaaaacttaacacataaattttaacatatggtgtaaaaattccttttacttatcaataaatatcacgcctactaccagctcgccttaaatggtacgtgtgaatgagagctgagagcctgagagtagaggactcccttcaatcaatataaaacagaaataatataataacatctcaaataatcacatacatcttttccatcaaagctatatatatatatatatatatatatatttttcctttttgtaacatctgattagttaatattgcttccctaaagcataggttctttatatttggtcttataatagaactttcctatatatatatatacggatgttcattggatcacatccaatatttttaggcctaaccagattcgatccaattaatttcagtcatccaatcgatccaacatccattggatgttggattcgatcggttctatccattggatggatttcatatatatttattggtttaatttgggtttatccaatattttagacctagtattttttggatcggattggattcatccaatattttagatccagtatgtattggattagacttgatccatccaatccaagaaaaaaagagtaaaattttaatattaattttcatatatacatatagatttaatgtataacaatataaaatctaattactcatccaaactaaatgaaaat

SEQ ID NO: 312190 - DNA, 4167 bp, Cannabis indica
tttttgtaacttttttataaaatcccatatttgatgtaattttcacataaaattttgagaattatctagcaagaccaaattttgtaaaaaaaaaaaaagtccaaatattttcaatttttttttacacgtatatacgaaaggaaagtgaaaacattatttttcctttttattcttattaattttttttagtttcctttttcattttcttttccttctttgtgggtgctctgttaggtttaaaatgtgtgggttttgctctcttagggttccattttttttctctctttagttgttggattgtttgtgttaggattcgaatttaatgtgagattatagtggcaatggtgtgtacaagaagttcaagctctaaatcttctaagattaatggtttgaataataaaaggggaaaaggagtttctaaagatgaaggtaatgggaaaaaatgagtagatttagagagaagagtggtgggaatggaaagaaaggtgtttacaccaagagtagctctgatgacgtggacattaatatttgacacgtgccaagaaagatgacatctcagagttgagtagttccaagtcatagcaggtcaacttgggaggggttcattgccctacacccaggttgacttcgggaactctggaatcactatctttcaatattttgtaccatgaagatgtggagcaatctaatacaatgttcgggagctgaaattacatgaacctgcaacccagaagccaacctgggcacctagagttttaccctacgcccaagttgacatcctcaactagggtttcaatttctgggaccgtcttagtgcaaaagggacaaaacttgcattgagacatcaactagacaaaccactaatatatttgaggcattagaatcagaatcgaagcaagttgatttttgagcactcggggccccgagcacctgcccaggttgacaatctgtcaatctgggctccttccaagtatcagatcggagatctaacttttgaatattctttgtcttcatcaaaaatgggggaataggtccttttcgaggaaaaacaacaattcttgggtactaaaaatagggcctagtggccaggttgacacttgggggctggccttgcgcgtaggttgacattttgtgaacctctcaacctctaccatttcaaatggagtttttcaagaattctttctagcatcttttccattttcaaaaaatattgagattcaactattttgggggaccaaccaaaatttctgaaaggccaaagttgggacccagtgcccaggttggcactagggttgggcccaacacccaggttgacatattgtcaacttggactatttttgatcaagttcaacaaaaagtctttctggcattttttcttcatcagaaatattgaagattcaaggaaacacaagaagaaaaccacaatcctaagcccctagaaatagggtccagcacccaagttaacctggtgttgggctcggtggccaggttgacactcagcctcgaacgctgcctttaattgctcaaatgccaaatttgatacgaccattgaatttggaatgttcaataacagggcaggagatctcttcctcaagttcaaaagccttagaactatgaaaaacgaaatcttgggagctcgggagtaaatacccatcgcccaagttgacatatagtctagtgcgctgggttttgtttatccgaatatgattttattttgaccgtccatctagttttttacaatgaaaaagatctatgaagtcacaaaattcaaattctcaactacatttctcatttccagctcaccaaaaattaagaatttcgagtctctcatttttgcaaaatagcaacatctttgagaacaagtgaccaccttcgcaaaaaaatataaaaactgactaagtgatgtaaaatatcccttaggaatcttaaagtacatcccttggatgttttacacttaccaagtgtccaggttgatgtcatatatcaacctgggcgctgttgggtcatgaactgccttcagtaaaacaatcataacacactcaattttgatctgatttatacgattcaacttgcatttcgaagctaattcaatgctctataaagtcatgtctcactttgcaaatttagttctgaagctatcgtcgtcaaaatttacccccaagggagttacgaaaataagctatgagttaccctcaatgagacctgctgggctccaaaaatggccatcaccacgaagagccaatttttatcgttagatcatcatcaacggtcaaaaacatctcatttttattttcccctatttttgtgggcctccttcacctataaaaggagagctcccttagctcatttttcacgtttataaaacaacccacaaggtcaaagcttctctctctataaattggagcttctgagacttagcctatttctataataccatctagtgagcatctccctctagttactctctctagaaactagagcttaaacacttagccttttttttgtaattctcgtgaaaaataaaaactcaaagtagacgtagctccattaccatcgcgacatggggagtgaactactataaatttgtctctctaaattatttacttaaacttattaattatctcgtcaatctagcgagctgatattggcaactctttagtgttaatattttcgatgctttcatcgagagcaataactcgagttccccaattataactcgattcctctaccaagaactttgtttcaaaaggaattcataagtgcaagcaagaaatcaacaatgaaaatgtaaagtaacactactagtcctagtatccatgccactactcagcaaatagcaagcactaagattccccataaggaagcagactacgagcgagcgaccgaaaggactcagactaaaaaacgtggatctatgggatctttgcctaatatgaagcaagcacctgttacgaaaacaagcaatgagtgagcatccaaaaggactcaaactcgagatcataggcctacaggttcaccacacgtagttgataggaccaattgtaattctattcgaagaaattcaaaaaaatacaggaaaccaatcccctccatcggattctcttcacaagtctaatgactctagaccaccctgtgaccctacaaagggaaagggacctgtagttagacttagaggaagacccccaaaagctctaccacgaaattgaagagtatgagattcagagagtgaagatcaatgaactactctacactcaaaaatacttttgtgatgaacgaggtgcttgctgtaggtacttcgcgtgaggtcttgacgaccaacagtacgaatacttcccatgggtgcatggatacatattaaacctcaacaatcggtccaactcctccacacatgtcactctgaggaagactattttgaaggaatagtcggtgtaatattacgagcagctgctcacggagcaaatactctagagacgactctattggcatacaagattaatccctccagttatcaacaagcccacacgactatgaactaaccacaaggcgtaggttaatcaatgcctttgatcgacttggaagataaaagagcctacataacaacatcgataggaagtggccagctgatacacacatcacaagagtgtgtaaggctaaatttgacacccttgcctctttggttaagggtatcactactccaaagccaatagagtaggagttagattgagagtagttttctcctctcttgaattgaatcaaggctttggagatcccctcaaagttcagaaatcagtgtggcatccatacactggcaaagaagaccctctctctaacatctacaactttgaagtacaaactgacatgcaaggcattcgggatgattctcattgttgagtctttccaaccacgctattagaagatgcacatcggtggtatctcaagctttcctcgggatctatcaattcttcagagatgctcaagagagcattctatgaccaattctctccatcaaggcacagatcaatcaagcctaatgatttagtttgcattaagtaacaagaagatgaacctctaaaggattaccttcaatgagtcttagaggccaccatccagaaagacactcagtgaagatgctaaggtcatggcaatgaaaattgtgttgggttttat

SEQ ID NO: 312191 - DNA, 1865 bp, Cannabis indica
aatccaaaccgtaaaaataaaaaaagttaaaaaatagtatatgaagtgattctcctataaaatattatttatatggtgtccaaatcactcaaatattttctattaattatcattaattgtaattactattactcttcttagtttcctaatctatgactcgaatatttgtataaataggggatcaccctattgaaataaagtactgagaaattttcattcagttttttttctctcttcatcatctttttcttttcttcttatctattttatattatttattaataattttataacaacctttgtatttttgaaaagaaatccatgtctataactggttgtagataaattgattaaagaatgattgaaagttagaatttttgtagaagatagaaaaaattggtctagattagatattactactctaaactttttaagggaaaaattacaattttatgtactttatagtacttaattacattatatgtgtttaaaatttatttacaatttaattaactatgagaaaaatattcttaattttatatacaaactatatatagtaaacataaataataaatatatacaaaaaataaataataaatatacatattttatttataaatttatatttaaataataataaacacattatatcaacatatcatcccatatttataaaattgggatcacataaaaccaatgaatataatattttgggtcttgtcttgtgacatggtgagttaatctgtatcgtttgtgtgttgatcgtattggttaaagtagttgtttggaaagttttgttttgtttggacagatttggtctgtgtggtttttctgtcttcgcagaatggaagaacaatatgcggcgttttcgattcatgatgaggatgaagaaggtcttatttttgaatcaggggctgatggtttaacagaaattgatgacagatggttgctggtaggacgttttttgacaaatcgagccattgattttcaggctatgcaaaataaaatccccactctctggcagccaggaagaggtttatatgtgaaagaacttgatccaaatctcttcttatttcaattttaccacgaagttgatatagaaagagttatagaggggagtccttggacgtttgatcgggcaccactaatcattgaacgtgtgaagcatggagagaacccgagaaatatatcactgctgaaactggacttatgggtgcaactacacaatatgacaaacggttttatgtcggaaagagtgatccaaggggtggggaattacatcggctccttcgttaagttcgatcctaataatttctcaggcgtttggtgtgattatttacgtattcgagtgaagattagagtggacatgccactaaaaaagaagaagcttgaaatccgaggcggtctgacttgtcaggtgatgtttaaatatgaagatttaccaaccttttgctttatttgtggagtgcttggacattccgagaaattttgcgaaaaactttttgaagtcccaaaagagcaaattgtccatgaatatagtcttgaattgaaagctgctccaagaagaaggaactatgctgatggctctcggtggttaaaatcaggtctggcggttaagaacagatggatgattgtccagaagcgagtaattccaatggtggtccctcgaggaatcacgtcccaccagtcatggggaaccaacgaataatgattgccaacaatcagggacccctttactacaccctgaatcacgaaatctgaatggagaggcagttatgaggcaagttcataatgtgaatggagcaccaatgaatatggagaaacccctgattttagggaaggttaatgtgttggaaattatttta

SEQ ID NO: 312192 - DNA, 884 bp, Cannabis indica
acaatttttagcacgaacaaatattttttgtcataacaactttagaccgaattattattaattttattttgacaaaaaaaaaaaatcaattcataatactatgttgtacaatttcagaaaatataaggtctaatttgtgatttaataaaatagatagtctaatcagtaacttttgcaaaacacgaaattcaaaatagtatttatccattaaaaaaatagtgttacaactctagaacacaaaatacaagtagaaaatattaaaaaaaactagaattacaactcaaagcataaaatatatatagggacatgattttgtcccgtgatgtacttttacagaatgtattctgtggtattttatgggtctcaggttacattagatgggtctcagggtacgttaccattttttaactctaattacccctaaatcaacctcagccctcagatcaaataactcctctatctaacggttgtcgtacatcacggaatacattctgtgaaagtacatcacgagacaaaatcgtgtcccaatatatataataacaaaaacaatataaatatatataatatagtatgtatataatataagataatataatagatatatatgtgtatttatataagagtgtttatattaatatacatgtaatatatagtatcaatcatcattatatataaaggaaactttttaagaggtgaagtggcttcttctctttctattcttctactttctctaaattgttgtttatctctttttaattttttttatttaatgacccatatgtaatgtatataataattgtaaaacatataattaacatctatataatgtatgtaatttatatataatataaaggaaagcacaaaataagtttaggtggcatctt

SEQ ID NO: 312193 - DNA, 1653 bp, Cannabis indica
agaactggtgggatttgcagctggtttagccccttccatgttgagtttagtgagaagatctgtgaagtatttcgactgagataagtacataccagtggaatttcgaagtacctcaattcctaggaagtagtggagagaccctaagtctttgagagagaattctttgtgtagttcttgtatgaggcacttgatactagacaagtttggacccgtgattagtatatcgtcgacatatactaaaagaatgatgagatgaggtcctgagccaaagataaacatggatgaatcagctctagaggccttgaatctcttactgagaagagtgtttttcagtttctcgttccaggctctaagtgcctgttttaagccataaatggctttgttcagcttacacacatgagtcggttttagcttatcttcgaaccatagaggttgaaccatgaataccaactctgttaatgtgccattgagaaaggcatttgacacatctaactgagttactttccattggtatgacactgcaattttaagaattatttgaatggtggctggttttacaatggggctaaacgtttctgagtaatttataccaggagtttgatgatatcctttggcaactaaacgtgatttgcattttgcaagagtgccatcaacattcaatttgaccctatgaacccacttgtttcctacaacatgcatgccatgttgatatggtataagagtccaagtcccatttcgaactaaggcaacaaattcatcactcatagaaccattttagggtcggctaaggcttgtttgagagaagttttaggtagaagagattcaggtagaggatactttgtagctagataggctttgggtttgtgaatccctgatttggccctggtttgcatagattgtatgttggttgttggggtaggttgaagtgtctggttaggacatgtgggacagatttctggtgaggtatttggtgctgaaatgggtgctgagactggtgctaagacagatgacaggttggttgtaggatcgggtatagagtgagagcttgaagttgaatgatgtcgtggctcttcagtcaagacgacagcaggttgttcctcagtaacacaatgagacaaagtattaggtgttgtgttaaatgttgcagtagcaaaaatttgagatggttgtgagtttacctggtttgtagtagatttgagtaatgcaggaaactcttcctcattgaacacgacattgcgagtgacatatatttttcctgtttgtgtttcacacatgtatcccttatgctgaaaagagtaccccacgaaaatacattttttcagatttcatggtcaaaagaccaaaatgcccctagggccaatctcacatattcatacatacaagggcataattgtcacttcacactcatttatttccaattaaaattttagatttcttactatcaaataaaatgccaattaattcaattcaaattgcatttcgagcccaaacccggttcggcccgaaatacccggttgtgactataccgcaccaacctgtcagaacacaccttaaaagacaacatagacatactatataataatatagttccattaagcacataattaaattaatttcatcaatttaccaatctcgggtcataattactaaaat

SEQ ID NO: 312194 - DNA, 1825 bp, Cannabis indica
ttttgatattgggggttttattaagggcaaaaaatgaaatttccctatgaatacataatgtatataggtgtcacttcttgaaacgaacgattgctcattaatcatgatcataaaaattcattaacagctaatttaaatatactcaactaaatacaaattaaatgtcattgttgatcgataagcattgatgaaaagcaaatcagtaacaaatctaatggattattatattttatgatcatatatatatatcactctcacttcaatatctaacgtacctttccaactcaaaagtagatatcatcaacacattttaatccaactagctagccaccttaatatttggtacttcccacaactaaataataataacaataatcattataaccacctcatgatttaattaatctcccttcaaaccatattaacttatataaaaccccaatattcctcccattcaccatatcatcaaacactcacaaaatctctcaacataatcaaaaaaaaaaaaaaaaattaaataaataataacataaataattaaaccctagctatatacaaagatgaagcaaactctcatctctttttcattcctacttctcatcttatctcacaccacaatgagtttaactcatcaagctccagcctaaagccccatctgcccacatagccgctactaaaggcgccacaccagccgtggcgcctacaaaacctaaagtagtaacaccaactccaacagcaaccccagctcgagccccgacctcatcagaagcacaagctccctcagcagagccactagttgaagctccaccgcgaaaagctaaacccgagccaactgatgtggttaagattcttgacaaagccggaacctttagtgtcttcatccgcatactcaaaagcacccaagtaatcgaacagatcgaaaaccaactcaacacttccaacagcatgacaattctagccccaactaacggcgctttctccgctttaaaacccggaacactcaacttcttaaatgcagaacaaaaggtacaattagtacaataccacatcttaccttctttcatttccatctcgagtttccagactctcagtaaccctgtccgtacacaagctagtaacactgacgagtaccctttaaacatcacaacacaaggtaattgggttaacatatcaactggtgttgtcaatacaactatttctggcacaatctatgccgatagccaactcgctatttataaaatcgacaaggttttgcttcccatggccattttcgctcccactaagcttcataaggcccttgcacctgcgcctgcattgcttgctaagcctacaaaaggcttagcaggtagcggtaaagggtcagattcgtcatctgacccctcatcgtctacttcaacattggatgataacccagtttcttcaatgcatgcctctagtgcttttcgtaatggcatggtcgcaacaattggtgttattaatgtttttggtgcaattgcacttttattttgagatagttaattattgttgttatttttacaagttcgttttgttatattttgtggtgaattattattatgagtgatcatacgtaggattaatagtttgatgattatgattaattgagtggtttttgaataatgtatatgtttgtgtacatgatcatatattattattagcagtagatatgggatttgtgttgctcatcatcttttgtagtaccaatgtttgagtcaataatttaatttacatattcgtccgatatattatttcgtttttaggttaatatttttgctgttgtataaatctcttattctatttacagttc

SEQ ID NO: 312195 - DNA, 2060 bp, Cannabis indica
aaaaaaaaaaaaatctacatcttcaaatgtttacatcgaatagtagatcacaatagttatttttttagggcttataaataacgacgtggtcaaattttttttttttaaaagaacaaaaagagaaaaaaaaatatcagattgtcattaaaagttattaatgtcaaaacataggtattcaaaacatgtaaaaacattattaaaagttaaaattagaggtgaagctatttaataaaattagataccaaataaagtgtcaaatgtaaaactaccaaaaaaaaagaaaaaagaaaaaccaacatcactcctttaaagaaccttgttaaagtatgaacattaataccaattcactacagattattttcaaaagattaaaactatgcagaatttttaaccatcaaaatattattgaattacatgaaaattcattaagaaaaacccaccatttctacaatattgcatcaaaatttgtcacatttaaaaaatgtatattttaggatatcttttaatgttgtattttagttatttatgattggtttgtattagtttacactagtgtgtttctgttttttcttcttctttttaagtttagaagatcgacacttaaaaaaggctgagaacattgacaaaaagattaaaaaataaaaaatatgttgggtccgcccttgttagtggacttgcaccaattaagggctcaaggcgcaaattaaataaaacctaaaagaaattaaaaaataaggaagcagtagtaggtggtatcttgagcagccaagaggaagaaagaaaaggagagggaaagaagaggaagaaagccagagagagaaagatatttctccattttgctttgaagatcaagtggttgattcttatcaattttagctcaaattttgggaggtgaatccttgtaaggtgctcttaaaatctaccagctctgatttggtgattgtcctctctaaggtgctcttctacaatactcacttggtgagacccaaactcttactatttgtgtatccatcttttgagatgatgatgattattgtattggtgatccaagattgtttaatcgtgatgtttttgtgaccctctacgtttactagagatgaaattttcaatcccattattgaacgttagtgatagtagatgatttgagcggactacggtcccgtaatttttctcacattaggtttccacgtaaaaatcttggtgtctcacttttatgcttgatttatgtattttatattgtttgtggtgctttagttgatatttgatattgctcattgtagtatttgataagtatcatatttgtgacatacaaagagggaaaatattatggttaattgcaatagattttcccaacaagtggtatcatagcaaaggttgattggtgttgaattcttgtctgttaaaaaatggatgagtcggatggaatgatgaaattgaacttataaaactattctgcttgaaagcatttgatggaagatttgctctattgtaaagatttgtacagacctattaaaggtagtgagaagccgtctaagttagataatgaggaatgggaagttaaacatagaaaagccattacctatattagacgatggatggatataaatcttcatgagcatatctctagtgaaaccagagctgatgtcatttggaaaaagctataaaatctctatgcaaagagaacggctggcaataaaatttctttacttagaagacttgtaaatttgaagtataaggatggtggtagtatggttgagcatacaagtcaatttcagagtcttgcaaactagttagtttccatgaagatgaatatggatgatgagatgcaagcatcattactcctcagttcattaactgacagttgggaaacattggtgataatggtttctaattccatgctagaagggactttgactattgattcaatcaaagatagtttgcttaatgaagaggccagaaggaaagcacaaggtgaatctttttcttctactggggttcttgttactaaaaagcatgacaggcggggacgaagtcagactaaaaattagcatggttctaga

SEQ ID NO: 312196 - DNA, 1822 bp, Cannabis indica
gtcttctgctcctagccttcctcctatgctccaaattgatctatattttcgaatgatatcaaaactagccatcagcgttctttaaataatgaaaaaatcaagtttcccaaaaaccatcaaagctacagaaatgcttggaaagtcgtggctttctaaacgagtttccacttttaaatttctttgctgattttttggtttcttagtttctattttcttccagagactgaaggaatgttgcaacattccttgctatgtcgcgacaataatgagtacataccctttttttcttcatttttcaattagaaagtgctcattcttgactttagagcacaaatttttgagctaaaaatgcaatctttgacccattacgctgtaagaaatcaaaattaacaaattttatctcaaaaaggcttgaagaataccaaaattatcaaaaatgtagatctcccaacatttctcctaaaaaacataacaaaaaaaaccaagcataaatctgaataataaaataataaaaatactaaaacacatactaaaatggactctaaaaatgcataaaaataaatctaacatttaagaccatagatataaataattaactttcgaacttgacttttttttcttaaacttcttttaatattttatcttagcacttttgtttagttactaactttactacaactctgttatcccaatttttacactctgacatggcatcacatgatggtgacacgtggaattacctttgagtatctgctcggagggcacagtccgaacaggatgcctcgtaggcatgcgcgaagcagagcgatctgtaatccgcacagagcaaccaatacttagcgaattcagctttcgcattgtgagtcatcaaagaaatccctataacttggggatcagatcacagacatatggcaagctgtccaaatcccacgatcaatatattctgcatttatcatgcaatctttctacttatatccactgtaacgagaagggaaacgcttcctcttcaagttcacaatcctttaaatagtgatgcatgttcactgggcatagggtcgcaaacagtttagtcgagattttaccctagagatattatctaagaattcatattcagagatactgttgtaagagctataagaaaaggaacctttctccttgttcttaagtcaatacaaataacgaggattaggctattgtcgaactgctcggggctaaacctatataaaattcctgtgtctttacattgcttaattatatatcgattgctataaattactaatcattcaccaaataagactcaatatcgttgactaaaagcaatgtcaacattttggtgctttcattgagagcagaatcaacgatcgctcttcattcaaaatctaaccacaagtacgatgtggtgcaaactcgtagaggtctagccgatccagaaaattcacagacggtgcatcctgcattgtagaacccatgaaacacaagggttccgccagctgttaatcctggatagccgaaaaacgtgggtcacggtgtaacgactcctatagatgaaatcgagcctagtgtgcaagagactgggaataatagttcagcacccaaccagggcaatcataacacaatctttctgcctggaaccaacacccagaggaccattgcagaggatactgagttacgaaatctccgtgacgctcttggactcatgcaggatcataacaataccgtacatcacgataaagaagaactccgcgttgcggtaaatctcgcgttcgaagaacaaaggcgtatgtttaccgagtggagagacagagagatggaggcgttaagg

SEQ ID NO: 312197 - DNA, 935 bp, Cannabis indica
ttattaaaaaataaaataaaaagatttcctgcttctctctcctgaagaaaccctaggcgtgcttttctttcctgaagaaactcacgggctgaagatttcctgcatgcggctgcgactgaagtcattctcgaactgaagaaaccctaggcatcggtacgtcgtcgaccgatggcggttcctaaatgatttagctgcttctcacaagtgtgcagcgtcgtttcttctgcgaatccttcggggcggcgtctcctccgtcgtggtttcttatcggtcggcgttgtcttctccggtgtatttcttgtctgttgtgacatggtgtgtgtgtgtgtgtgtctttgttttgtgtttgatgttatttttctgggttgatttttgtgtctagtttcagcaagtttgggttggtctggtacggctgttctcgtggaatcaggctagcttgggggtgtgagtcttcttggggttgtttctggtgcgtttcttggggttggaatgtggttgctggtgcattttcttggggttgaatctaatttgcttgggtgtgtgagttggatttcgggtttgctcggggtgtgtctgggtttctgggttgttggtgggtctgtggtgtgggttggggtgcggctgggtgtttcttgggttcctgaggattgtggtgttgggttagggtgcggctgggtattgtcttgtgctcctggggtccagttgaaatcaggtgggtaagggaactatttggtgtggtccgaactgggttgtggaaggcagcttcattgggtggggctttgttttgttggtgtggttattagagggtcgggcaggcacatatagagggtcatggcttctagtagtacattgtattaggaggtggaagaacaatatgcgaatatttcacttgagggagaggatgatggggagttggggattgattttcttgtccc

SEQ ID NO: 312198 - DNA, 2327 bp, Cannabis indica
  modified_base (2282)..(2282): a, c, t, g, unknown or other
agcgtccgactatatgacgataaagacagcactcttgggaggcaacccaagtgtttatctttattttttagactcttattttttatttcagtttatgatttatttgtttttagcattttaacttcttgcaaagttttagacgttatatttttggttgaatcgtgaaaaacgtgaaaaatagaaaaaaaaaaatttggccctcgaaactcagtggtcgtaacctgggggttttacagaaacattgaaaaatttggactacagtggtcgcgaccagccctatccattgtcgcgaccctttttcatggtcgcgaccacggattttaaagaaaggtaggaaatttcttttcgaatctaatcgcgaccagcccttatggtagtcgcgaccagcttacgaaaatgcctatcaatcccaaattttaaacacattaactttaactaaaatcacttcttctcagccgtcccatccttcttcccagccgaaaacaccaaccctcaacacccattaaccaaattcaaacacccaaccacaaaatcttccattaaaagcatccaaaaactcaatttctctaatcacccatcctttttcttcaaaaatggcacctaaaatcaccaattctcacccaaatttgaaaacactattcatcatcttcaacctcaagcttttaaaggatattcaacaatggaggtgaattagtggcttcttcaattagtaagtatcatcccttttcttattttaagagattgattagagaatttagggatttcttggaattaattgagtatttgggaattttgtgtgattgattggagtattgtggattgtggattgccattggttttatttgtgttattttgatgatatttgaatttcagaaaattaagaaatataaggggaggtgctgcccaattttctctaaaaatttttgttggtgaagaattttagtttgtgttgattatgggtcccaaaagaacaaggggtaatgaagaggggtgttcatcatccaacccaccaccttcagcttttgatagaacccagtttgtaagcgaggcggcccaacaatgcttcctttgactaaagagtaagccctatattgaagaccggagtattgagttccctaatgctccattgacatgtaaacctcgatttgaaacaattcgaggtcaaattgagagaatgaaatggggtacctttgttaacgctaaagaccgagccaatgttactatggcttgtgaattgctggggatttggcccaaacgaagaaacggagaggtcaaggtgcatggcaagaaagtttccgccacatctgatgccatcaatgccatgtactccttacctgactacttcagagaagatcaacgcctgcggattattgaggaagaagagcaatttgatatggtggatgttgccaagactgtgggattcctgaggttatggttccatgataatgatgggcaggatgggtcacccaatttactgtaccggtgtgaaattaaccttgtggctaaaacctggttgtactttatgagtgctcggtttgtaccaagcaagcatttttctgatgttcagatggatagactgaaatatgtgtacgccattatgaaggggtacaatattgatgttggtcaagttattcggggtagcattgagcaaattattcacggagccataggcggtggccttgggttggctggagtgattactgatctttgcgggacctatgatgtgcctgaattgaaatatgacaacaaagtggtactgcaaagaaaaatggatgtcagcatggttaacaggctcaaggagcctcatccttatgggcagccacccctgaaacgcaacagcaagggagaaggcgacaaagggagccaagtgttgaagaagagaaggaagagccaccacaacttcttgggcccattgatccagcaatgcaatatactcatgcacagccgagttatacacagcagaacaaccacatgcaaaactacaaggtgcaaatgagtatctacgatgaggggaaagttaatcaactcaactctctgatcaccagaatgaacattgggattgaggaccctaactatttggcaccacctcctcgttttcacccatatgaccagccgccgctagggctgagcatgggttgggttggccgggttgaggctattttaatgacccaacccaataacatcggcctagaaattttcaacccaatgacatcctgaattttttctaacccgacccattttttccttttatgggttgggttggttacaacccttatgtcatntaaaaaaaaaattgaattttcataaaagttcaaacataaacataa

SEQ ID NO: 312199 - DNA, 942 bp, Cannabis indica
ttctcgtcgaagctaatggcaagagctttattcttaagaaccctcttctttatgtggaggtttcgggccgaaacggccggaatctgttgccgttcgacctcttttcccattgttgcttgtgtgtgccgagaaaaaagagtgcgttggggtttgtcagcgtaacagactgcttcgggtttttcttagatgggctttttcagtagtgatctctcccattgtctagtaatcctctgattcaagacctaagcccataatgtagtaatttgtggcccaaacataaacaacagtattgggctttcacatactgagtttgaagagaggttttcaattcttcctagttttttttttttttttggttgaagtgctaacatttaattcttcaatttattttttttttttgctaacataataattgcgtatttcagttgttaaaaaaaattgcttctttcaggagaataataatataaatataattgttattactgtagaataagtgatgaatatgtttaattttatttaaatgggaaatgataaaattgaataaagattcaatgattgaattttagtacttacaaaaaaaaaaaattgaagattttgtttttattattattttcctttaaatactcaattgatttaatacaactttttttttttttttgctgaataattgaatacaactttacgtgtcttgtttggtgacgggtctgatttggttgctaaagttaaagaaacatatcctttcaaaaaaaaaaagtcaagacatattttcacacacatgtagtcatgtacacacacaacataaaaagttacgaaaatgttttttttttttttttttgatttaagcgtttataagttacgaaaaactgttagggttactgtttaacttactaaattatgttaagcactaatatctaccatttaaaattttaaaaaagaaaatta

SEQ ID NO: 312200 - DNA, 1428 bp, Cannabis indica
agggaaattattatccagtccctcctaaaactcaaatattttgtaaataagaaattgaataattttgtcaaattggtggagggacattattattagtcttaataatttttatatatcaacttctttattttttttccctatattttttatatcttttaagtaatatgtttttaggcaatacatatatatgttacatattaataaaaaataaaataaaataaaattgaatttgaaacattataaaaaatagagagtttacggtatttgtttttttttttttgtaaagggtttacggtatttgtttggaagtgtatttatttcatttttatttatttattattttaaacgagttactggagctttttgacctttagaaaggggtttaaaaatatattgtaaattgtttcaagggtactactatgtgacaaatgcatgtgaaagagacgtttaagaaaaagctttaacggcgccaaagtagcagctgcacatgcagattctgtctttgttgaaagcccaattgacaattgccttcctcatcccattttctttctgaattccccattttctccttccccaaaccctaacctgacgtctttcagagaaagaaaagaacaacaaaaattactgtactacgctctcttctcttggtctttgtgccctttatttcttttttcttggtttgtgcccttcatttaggggttttacagtttagccctctgaaatgaatggtcagaatttaggtcttagggtatgtgccctgacgtgaaagaatatgtggagagcaattcttcttgttcagtacgtgcctgtcactatatatgaaaccctcaaaccctatcatctattttctttgttctttttcactcaattttatatttaaaaattaggtattatgatattgggataaggataattcggtaaaaggattaattcgatttgtagattccacatggaaagctaaacggccgaaacctgtaacaaatcaacttgtagttgagacctaacttccttttgtactattccatttttgtccaatagcctgtggagatttaatctgcaccgtttatcttttcataaccgtattggatcctaatgggactactttagattttgctagcttttatgtttcctcacccatttccctgttgctatggattcacttgcccatccctacctcagctaaggatttgattctctgcaaatttacatgtcaatttcatttttatttttgaaaaatccgatccaaaggttgaccaacaaatgcaacattctatatatttatttatgttcttctcaaatatacctttcttatttatttatttattttttggctataacttgtgaaactcctttactagtggtagaatccactcttgacacttgagacgggaccatatttaacatagaaaaagaatatatatatatata

SEQ ID NO: 312201 - DNA, 1656 bp, Cannabis indica
aagggctagagatcttgaacggaaggagacattatattccgctgcaatcaatgtaaggttttcttaacccttatgtatttatttcattgttttagagatattcatatttaggatgttaatcaatatacttgttagtaaatctagatcctggtaaaatattctcaactagtattgtggtaataaatcaactgtgtcaccaggctacacatgatggatggaatattaagaccacttgagttgtattgtggtaataaatcaactgtattatattccaacaacaagaggagctcgacgaagtcaacacatattgacaacaaactccatggttgcagacccccttactaagggtttgccacctaaggtcttttatgagcacactactcatatgtgtgttttagagtatgaggatacctaaattcaatgggagtttgtctttctaatcctttgtaatttttatttgtatcatgaaacttgtgtatttgaataattttctgataagaaattatgttatttagtttatttcactttgtacattaagctaaagttttgatctctataaagtaaagtaggaccaattaaaaattgacatgaatagatcgccatgcatgtaattttcataccacatatcatgattgatctatgtcaattggctatgttaatatatgtgactattgatgcgtttagttgtgattaatacaacaaaaactgctttgatcctatattgatatagttaattgatgagattgcacatgcctacggttatgatgacaaagttatgaggtcaataaggttaacatatttatatatatacatatgtgaccgagtgagagattgttagaaatttatttatttgggatcacaattgtatatataaaatatgtgttgggtcatcatataaatgtgtcaaatctaagtggtcaattttagtataaagtttatgacttaaggacatgattgtcatgattttaatatgggaatactataaagacaatttttgatttgatgaggggcaaaattggaaatagtcaaaaatgattaattactattttttagttattaataaacaggtactgatccctatttttgcatcgcattatatctttccactcttgaattcccattatttaaggctccagggaaagttatgatgcaaaactggaagatcataccattctaaagtcgatttatgaattctagtacacttccgctaatctttaaagctattgtttgattctcatgaattacttaagggtagtttcagaataaaatttttctacaaagagaacaaggaaataaggaaaaaaatatttaattttatttattttttaaaattattctttcaattttataataatttacttattattgaaataattaaaattgtgtaaactaataagaacataacatgtatatatttttgtacatattagttgtctactttggcatttaaaatttttttggatggaacaataaatattaaaacagaatatgagtttaaagaattttactattaaagaaagaggaaattacatttagtatgagattttaaaatttcttatgataaatatggcacatttaagtttgaccaatttatattgtatttttttgtttttaggtttttttatggtatttgatatgccatatatatataattag

SEQ ID NO: 312202 - DNA, 2481 bp, Cannabis indica
ttctcgacatgtcacgttacgattggctagcgatactttctaaaagctattatatatatatatatatattaaattatgtgagacccgatacttcgttagacaaatagcgatattaacacctaggagagtgctaggcaccactggtgccctttaacatttctctatattgaaatatgagactgctaatcaaagagaggatgaattaaagtactcctcttaattttctagataacaacaattattattagttgtatcaaatttaataaggaaagaaagcagtgaataataataagtgctttactaatataaagttagattttgttaggaaaattgtttttttgttcattgacaaaatgcttgattgataatagatgtgagaagagaactttaaataatatatatgctggattcatgtcatttattaaaatgatcttaaattataattttgtccattacattggcattgttttatatgactatatgaactaaacattaattgttattttatagtttcaaacttccaatattgttaatgtgcctttttttttttttttttgtacttttctaatttaaggcaccagaaatttcacatagaaaacctcaatttttgaacaacttcatcagagttctatgcaatgccaacatttcagaaggattccaacccaaaagagatgtctcacttccagaaattaacttgagagttggaactttaggcccacctaatgtgggcctaagcccaagaaaacgtacaactcttgccttctttgcaggaagggcccatggatatattagacatgtcttgttcgagcattggaaagataaagacgatgaagttagagttcatgaaaagctccctataggccaaaactactccaagttattgggccaaagcaagttttgtttgtgccctagtgggtatgaagtggctagtccaagagtagtagaggcaatcaatgcagggtgtgttccagtaattatatctgataattactcgctaccctttaatgatgtgcttaattggaacacattttccataaatatcccaacttcaaagataccagaaattaaaaatattttaaaaaaggtaccgattaaagagtacctaaaaatgtatagaagagtattactagtgaagaaacactttgtgttaaacaggccagctcaaccatttgatgtaattcatatggtgcttcattctatttggttaaggcgacttaacttcaagtttggaaatgtaaacaacacataattaaggaatatttagatttgattagaaacgatttccaactttctttttgaatggaaaaggatcaatttattaataagatgaatcattcttaacaatctctacaaactcatgtggtcagttgtagtcatgaaagatacgaactgacgaacaacaagagcttctcgcaagaaaatgcaccgccttgttagcagaacgttttacaaaataaaaattaacataatttaaatcagccaaaagttgttgacagtcatgaacaagcagtccaaaagtagaaggaagatacgccgaactcttgattgcttgaacaataactaagtagtcggattcaagtgagactttttgccatcttttgctttttatccagctaagtgcctctttaatgcctgtaatttcagcaatttctagtgcaacatgaccaatttttctagctgagactgcctctattagagtaccatcactcctccttgcaatgtagccaaacatgaatgaatttgtagctttaaaagttactccgtccacattgaccttaatcgtatcattcgcaggtgtagtccaatgctcaacctcagcaacttgttcatcgaaaacaaggagaggttccataattctttgatgagcaaaactccattaattaagggtagttcttgcaaacaaaactacttcagtagctagcttagattttctattccaaacaaggttgtttcgggcattccaaatagcccaagatatcatcagtatctctttcatggtgttatcatccttacctgctattttctctccaaactaggtgcaaaaatcagcatggttgttgacactatagttgataatggacctgttccagcaagaagttgcaaaagggcagtttactagaaaatggatgatagattcagcctctatattacaaaaaggcactactacaaaaataggttttcccgacgttgtaaatagttgtttaaagtattactgtcggtttttataaccgtcgcctatacgaccgtcgtaaaatgagcataataggcgacggttcaaaaacattgctaatgtgagtttcccgacggttgtaaaacagtcgcctataattgggtataggcgacagtttataaccgtgcccttaaatcgtcgcctatagtatagggcacggtttaaaatcgtcgcctataccctgttataggcgacggttttagatcgtcaggaatgtaaaaaaaaatacagatttttctgccattaaattt

SEQ ID NO: 312203 - DNA, 876 bp, Cannabis indica
aaaaaaaaaaattaaaccgtataaatgttaatggtgatatatactttgtataaaatttcttatacataacataatttattatgtatatctataagaataaatactattttgaattttgtgttttgtataaattattgattggactctctattttgttaaatgataaattagaccttgtatttttttgtccaaatgaaagttaacaataacccaatatcttgatcactttttatgacaaaattagagacattttctgcatcagtttgtactaaaaattatctgccagtgtgtctgtatatctcaaggagcttcgcgacttccagaagtaggctaagtcggaggcctctaaggctgctctgaaagctcttgtagctccaatcacttgtgagcagtgcgtgaagcgctttgagcacagtgtcttgatggcctgaagatccaataatttcaagcccaaacttaatttcttacccaaccatgaggcaggtctagcccttttttttggagaaaaacaagaaattagaggccaaactggctgagactctgggtcctcgcctacctccaagagttgactgcactgcaatttatcacagacacttagaatcctagactattgggtgaatagtaatcctataagatgacggtagaataaagtaaaacctaatttagtggtcatctaaacaagattaaaacaataatcatgacattgaacatagaagaatagaaacaatttgatataatggaaactagaaattaatattcaataaagaaactaagaattcatgtctcgagttttgaaataacccttaactaaaagaaaactactcggaactagacattataatgaaaatcataattcttctcattctactcttatta

SEQ ID NO: 312204 - DNA, 656 bp, Cannabis indica
tagtgggctcaaagttcggatctagagtccgggtggattttatggtaaagatagcataattttaagcaaatctattaatacaagtcaatacaaaatataatattattttaaaataatactatataagacaatacaacccaacctaatattgtacaacatattatatatgatgtaccaaacgaaccctaatattaatatacaacacagtacagtgtactaaccgacccgtagatgtgttaaatattgtgctatcagccaagaagtataaaaagtaaatactgagtgccttgaagttcatagattggtggacaatgatccacttgaagattaaaaaaaattggggttccacacaacatgtttaatcttcaatttagaattaatgtttttagaaaaaaataaacaaagttgcatgtaatatatttatcttcacaaatttcaatctgtaataaaaattaaagagcaatgttattaaacagtctacctagcataactattaagtggtactttaagaataattagcaataaaaattattattttatattaagtacgattttttttctttttgaaaaatatatattaagtaggatttgatacttaaattaaaccatgatatatgatacattcggtggtgattttttttatgaatatatataat

SEQ ID NO: 312205 - DNA, 726 bp, Cannabis indica
gatgttaatgaaacatacatggtagtaaatctagatccaggtaaaataatttccaacaagtaaggacgtgacactcagcaaggaggaagttattaatttgtttggaaaaaatataagttttttaatcctttgtatttggtcctatttatttgtttatttcattttaattttagtctaatgatatttttgtttttatttacaattaacagtgtactccttttaatgtctccaaccaaatgaagaagagtttttgaagaacgtcactggagctgatgcacctctatttgtggtaaataattaaggattattatcctaattaagaaaataccaggttttgaagatgatacctcctagttttgccttagccgaaagagaaagagagagagttctctattttgtttttttttcttaatttttgattttccttcattatccaacatactgcatttcacaacactaaactcagccaaatagaaagggcagctgtcacacccacacacaaccacctaatcccctaattaaaatgaataaaatgccctttggtgcttaatcttaagctatttcaagcctaggggtaaaatggtcaaaacctataaccccgctcaatctcggtattctattttctccaatatacatagcactaagaaataaggttctagacctacccatgtgatcaaactagcgatccatcacattttccgttgtcgccgagcaaaaattgtaaaa

SEQ ID NO: 312206 - DNA, 575 bp, Cannabis indica
aaacttaagtatttatttataataattattaaatttaagtatttatagcgtaaattaaatatatatttactaaaatataagtattatattgactaataaatcttgtatttaataattagacaaaagataaataagtgatcaaatgtaacaggccgtaactaagataaatactaataagataagggaattgtataacgtgtattattaatttatgattacaaaaatatatatattacttttgtaaattggtcaaaaatagtgaggtgaacaattgaaccaaaactataagcgatcttagccatagcagtagttcccacctcatcaaaaattcatcccaataataagttaaatcaatgagaaagaatcataattcacatagaactacaacatctgatgtttgaccaagatgctaatcaaatatcatattacttcctttgaacatgttctttcacaatttcccaccaacaatcaacaatcaaaccattcacatcaactgatttaaggtgtgtttgattgaaggtaatgaaatgaaatagaaaaaaaaaaattcattctatttctttatttggttgcat

SEQ ID NO: 312207 - DNA, 3045 bp, Cannabis indica
attgcccaaatgtatttggacatagctgctttattccattcttttaactttaccattttaccatactcaatatagacggtttatattgagtatgaataaatttaccattttacctttcaatgtattttatccttaaaacacttagctacttgtatatgatattttagtaaactaatataattactgaaatgagtgctctatcattaatcgcgttaagccaaacactaaggaaactaccattttacttctaatagttatagaagcaatagattccatatctatgattaacgttctcactcagttgcactaccgaattcccaagatgtaagtatggactagtcctacgggtaagctagtaacaaacaagtcaaaaaacctatatagtacaattaagctagaacttaaccatatcaggattgagatcaattgacctaagatcaaataagtgacattgacttagaaaagacgtaacaataagtttatgatatctttttcactatcaatatcggtccagcctgatatatagctgatacatccgatactactttactttgctaatgccctggaaaggacattccacttatacaagtgtaagtaaaccacatcgttgattattacgtcagtgtaaatccagtgcactaataaattgtgagactaaataatttgaagcatataatcacaattactttccactgtgatgacaacactgtaatttgaataactatatgtttgggacagaacttatatattaaacttataatcatgtataaatatgtaaacaaagcatatgactaagtcatggtatgatttctgatctttattgaaagtaagtacgattatataattttatttagggcagaaaatcccaataaactcctactaatagtaatataaaactaaagtgcatttaatttaatcttatatacttgatgtcttgatcaaatatagtatttggcataaactatgtaataggttctaataggttgtattcagtatcaacctactcctccatcacattttccttagtaacaaaaattcataattttgagaattctccatctatatattttactcctcttaggatataggattcattattgtttggcaattgcatttgtgttataaaggaatcacactagaaattattctatgtcttgaattatgccaaaatatgtgtcgaactctctcgagtctgaataattccctaatttcctttagagcagccttattaattattcagccttactggtagagttagtgattccagataggcttttacacttctctagaaatcactgctccacccccacagtaatcaccatcgcatatatatagacttctagaattgacactgtttgccgagtttttttagcaaccaaatacttttagaccttaaaaaagtaatgaaggcacgaataatgaaataataaacaagagatttttacgtggttcaggcgttaactatccttagtccacaagtccattttattaggctcatcaatctgtggctatttatacaaatacaaatacaacagacttttttcctattccaccgtgttcctcttgaataagaggaaggttagtaggaatattctagagttaatagtagggttactgtaatgtgttttcttgatgaagagtaagtcttcaatctcaaagtgaaggtccaaaaagtggatccttcctttgtgcttcctctggggtatttgtaggccaaccccattgcatgggctgtcttggatggatcttcatagggatgtcagattgtacggtctgtacatgctgagctttggatgcgtgtcacctcagggccattctcattatttgttttcaacaaactttcatctcctttgtcgcccagcgccggggtctagataggatgaagtaactaaagaacaagatctagaaggtgattggtcaatgcgaggccatgttcagggaatggaacgaggctcagtcggagatctcttgcttaaacaaggaagccaagaaggtgaagagggccaacaaagccgaacttgaagctactcagaaggaagcaaaggacaagtccgagctatgctaaaaactctaggaagaactcaatgcagccaaagcagcgctcgaggcgaaagaggctgacaccaaggagcgatccagtgccattgccatgcactccatctatcgagcctggatggagaatccataaatggatttgagtttcttgggaaaggccttggacgaattccttgcttactgcgagcaagctaagaaagcagaagaggaagtcgaggtagcaggagaagttatagaagaagaaccatccaagtctcctactatgtaggcttggtttttaattatttacttttattttttattttttggaaaatggccataaggccgagacaatggtttgcccttcatggcacttttgtaaagacagatttgcaaagttggatgaccaacttcgcttttattttatcttttattgagtgcctcgtacttttatatttgaacttgatatatttgcttgtttgcgttttcattcacaacttaaacaattatattttgatcaaattttaaaatactttaagcctttttattgctcgtattttcctttgatattgtttaagtagttagcaatctactatgtgcgtgggcagttattgtctgctatgcttttgattggcgaacactttattaattccgctttgcataaacagttataatctgttttaagcaaacttaaacataattttaatgattcatttcgtgactcactttgtacattttttattgcttatatgaatagttaggccttctattcatattttaggtttaagtattttctcaaggcatcttggtgactcgtttaatactttcctacaaaatgcgagtcgttagtattaagcttcacatgtagcttaatattgtttttatgagttaaatatcatttacaactgctacttttgacttccctgtctcacaagaaaggttctttaatcaattatctgaaaaaactttaaaaatttaaaatttttaaagtggagtgggtttgcaatatat

SEQ ID NO: 312208 - DNA, 1515 bp, Cannabis indica
attacacttagtaatctttgggggtcaacacttgtccccaagtctataagaattcttttatgtgttcctgtagactaagtgtgctgagtttcatctttacgaatagaattttcttcccttctcctttttatttcccttcgccaggagtgtaggctttaggatttatcccgacccctttgaagttttttttttcacaatgagggagtgtgagctcaccaagcttcctcaacctcttatgggttacttgctgggcataaaggagtttgtgacttgttaggccgctctcgaccttttaataaatctaggaccatattgggggactttgcagctttttagacagtgctcaaccccttatattgtacctgtgatactaagtgcgcattttgggtgctaaaggattggtactccttttagagaggcgtccctctcatagtcgtattctattcttattttccttgtaatatattaagggagatgatggttctgtgaatcgactcgactttttggttttgatatttataagggagatgatggttccatgaatcgactcgaccttttatttttgatattttactcatttccctatacatgttttagggctaactttcaagggcattctcctcatcattatgagtgctctttcatgtggaattacctttaggctttcactctcttcttggatcgttaggggtagtcgacccttgtagtcataagagttttgtttgctttggcaatttcaaattgacaagtacaacgagcaagttaagcaaaagtgtggagagtggtgaatgtcataagtaaagtgaaaacattccactgataaagcaaatgtgtgatcgccggagtgcacatgttatgttcagaaatcaacatacgtgcctcctctaatttagtataggtgaacttgctattgctaagagcgctttctcacatagtagtgttggaattattttaccaggatcttagatttactaacaagtatgttatttaacatcctaaatatgaacttctaacacgatatgaaataaacacatataaagtataagaaaccttacagtggttgcaccgaaatataatgtctccttccactcagatctctaacccttgtatcctttctgtagcagagtatcaccaagatctgagtctgaatctccttatcttgaaactggattcttcacagccttacacactatgattgagtactacttgatgtgtctgggcactcactcttttcactatgtagcttcggttttgaagagggaaagagagaaagatggttttggctagggtataggagtggaggcccaaattttatctgaacgattgagatgcatcatcttttcccttaagccatcactacctatttataggaaaccacctagggttaggttagatttatttgacattaaaataatagaaaaaataaatggtaaaattcatacaaagtagccgcccatagaataaatatattgtcatttaatatatttattaattagactaatcaaagtctcttaa

SEQ ID NO: 312209 - DNA, 772 bp, Cannabis indica
taaagtctagtaagtagaattgagctactaacaaaaaaaaaaaaaatagatacaattattgaccaaattacagttacaataaaaggccaataatgggttgttaattatgaaaggagatccaggtacctgatcaatggcagatgggtacttgccatggtggaaggtggaaatgaggatggacatagcctgaacatggttcatgctcacattaaactgatcctgcaacattctagccctctcatcacacatacttgcaagagtttcttttctcttctctgtagcttgggagcacatgtaccagaagatccacaaagatgcaatagtccaaccaagtatccaaacaaccaaaagccttttccaccacatgttcctgactcttttggacccaaaacactggcaatagtgatggtggatcttattaaagctccctgagatcttcccccaccatttgaggcataccttgccaccatcaccaagcaaaccagtcttggtgtctataattccactattaaggaaccaattcatggaaatcacatatataatccaggaacatattgcccaaagaagatgacccaccctaaaaccaaacccaaatacatgaagaagcaaactcatccacagcagtaaccagcacaagttaaacaagtcacagtgccaatttcgatgtgggtctcacctagtttgctaattccaggtactaatctgatgtggaaacccgcgcgtgcttgtgcgtgagagagagagagagagagagagaggagggaggagagag

SEQ ID NO: 312210 - DNA, 1014 bp, Cannabis indica
cttcactataatgtaataattaaaaaaaaaaaaaaaacggtactaaatttttttatttatataaaaagttgtatgattaattttttttaattttttaaagatttttatattagatttattaattttttaataagcacatatataattttttaaaaaaaagatacaaaaaaataaattaaaaattatttgatactaattttattgtttaactaatatttatataaaaggctaatggatcgcaaaaggtctaaatcataatttacctttgtagtgttaaaagtacaataatccaattacgaagctcaatatatatattcatgaatatagtcagagatatgcatgcatcatcgtacatgaatttataactaagaaagttatattgtagcattttttaatctacctgtaattcaaaatattattaactcatggtactattgccttcctgcctagtttttctaaacatcaacatcccacatataattttgtctcttttttcaagcggccggccaattatatattattgatgttttaagagttgattttatgtcccataatattaaacttattttatatatactatatggtcatgcataagtacatcattaatgcctgtagtacatatgtaaactcgacaattttctgcagattccataattttcaagcatgctttctggttggaaacaatttcaagtatacgtgcaagccagcaggacaattagacatttaataaatatgtcatgtaatagtaatgtactcaaatttcaacatattaattaatttttactttttacacttaaaataatttacatatatatttttatataaaattctacattttgtaaatttcaagactgtccttagccgaatacaagtaacttaaattaattaacatagagagaagaatacttgtcattttaaagactgtcaattacattatgtaatgtgtacgtaatgtaagaaataatttaaagatgagaaaagacaaataaatataacaatatattattaattaat

SEQ ID NO: 312211 - DNA, 1092 bp, Cannabis indica
acccgacccgtgtgcacccctaacaaccacatcaatctccttcactaaattcaaacaaccagcaaccagccaattggtccagcccgtaaattccacagcccaagctctcttccccagccaaagaaacacctgctgtagcacttgaatagagaaagaacaaccaaagaaaatgtgcttatgcacttcctcaactcgttcacacactgggcaatttgctgaagtcaacactgcatgaaacttaagcaaattgtctctaattaggaggtgttggttcacagcctaccaaagaaaaaatcgatttttaggcagcattaaggaattccaaaccgctctatgataatacacctgctgctgaatgagaagactgttatagagtctacttgctttgaacttcacagctctcacgactgcaaggatatccacctcagaaaaatttaagcctcaacctacaaagtttgcgccaatacccacttgtatcctatttcagctcataggtctagaaagaggaattctttaagtaattgttattaatccatttaacccaaagaatatctcttctagaagataaagcccaaacatactttgctagactagcatagttccatttagctccctctttgaacccgagacctccataggccttcgggagacaaactttctcccaagaggccacatgattttgcttttattgcctgacaaaccccaaagaaaacctctacatagtttctcaacctctttggtcacactttgaggaagcacaaagatgctcatccaatagttacgaagaccaattagcacagagtgtatcaattggactcgaccagcaaatgagagatgactggttgaccatgtaaacagtctttttctgatctttctaattataatttcacaatcttcagctttccacttagttcgtcttagaggaactcctaaatacttaagagcaaagctcctttcagacagcttgagctcttggagaatgcagactttttcctttaaatcaactgttgggttttgtgccctaaataaaacccatttcaatatatcagatttattagttaataaatgtcagaaataacattttatgttgca

SEQ ID NO: 312212 - DNA, 1160 bp, Cannabis indica
taaataatatatataatattaatgttccctaataaatctcaccacattctctctcttaataaattaaaataaattattagctctttgatcagccaataccaaaaaatttaaataataacataaaataaatataataataaaaaaaaataaattaaaagaataacatttattaaaaacgactaaaaatttactctttctcccaaacttaattctctcttctcgtttcttctttgccgcttgaagactccatactgaagcaaggcttcagcgtttgtcatcgacaggcgtggatgagcctaatcatccctatctgttcgcaatcttttccatctctctctcgcctctccaacggaaaataagctctggctggggatgaaggctaatggattggttcgaatagaatagggcgatttggaggaacccatgccgaaggttgtagcggtggatgaacctcctctggatactccgctgcctcctcctccggatgttgttgacgctgttgttgctgcttggaagagtatgaagaaggttaagcaagtgggttcaagttcaggtgatgcaaaaagaatgagtggtaaaagtattaatttagttaagctatttaatgatcttaatgatcattttctgaaagcttctgagagtacccatgaggtttcgaagatgcttgaggaaacccgatttcactatcactcgagttttgctgataatcgaggtaaaaaaaagtttgcattttgatattaaaggtgtcatttttttttgtttggaatctgaattaaatttgtttttgctgtgtttaacagagcatattgaccactcggctagagtgatgtgtgtgattacatggaataggtcatttagtggcaaatttaatgttgaagatggacaggtttaggtcatggaagacaacgccgaagggtgtaagccaaggatgcgatggcgaagctagcaccctggtcaggtgcgactgtattgactattttttattttattttattttttgggttttgaagattgtatagatttctctttttgggttcaatggaaatggcatggttattttgtgttcatgataattaatgtatgtgttttttagatttcctattagtaataatatttttctgattttttttttttttgtatgtttttaggtcttaacaaca

SEQ ID NO: 312213 - DNA, 851 bp, Cannabis indica
ttgaactaatcttattatactcattatgctattattagtagatgcttttgttctttttcataacaaaacactgcttatttgaaacacaaagcagagttctaggttactaaaaacaaatgcagcatttttgcttgaacaactcaatttgttactatgattgagacaaagattaatttctcatatgttttgaaattgaagcttcgcaaagagtttagcaacgatgttgagtctgcgaacgaagcacttcgaggactcacagctactcaagcaacaggtcaagctgatctcaccaatctgctccgtgtagcagcatatgaagcgaagaaatcccgtgctagtaatcgaattcttagggtggtaagtagcttactatgccttcacttattattctttaaccaatttgatcacacttgacattttaccctccttaccaaattgcaatttttgctcttagattctcatctactgcagatcatctgtgcgaccgcaacaccaatggcctgtaaaccagaagtccttcactttggatgttatctaccttcatgacaagcctggacccgacaactgcccacaagaggtgtacgactcactcgtgacgccttggatcatgttagtgaatacgaaggatacattttcgagagcggccaagggctgcagcgtgtcctcttcaagtacatgtgcacactgctggcacaccctcaacagcgctgcgctcaagagcttgtggacttgccgaaggctcttacaagaagtcgccccaaacggcaacagtgccagaagataatgtacccgtctctggcagccaatgagatgaaggtatcagttgagtaaattcacctgtattttattat

SEQ ID NO: 312214 - DNA, 633 bp, Cannabis indica
aggcgggaggccgtagtttcgcggagctgcgggttctcagatttgggggtttcttaggaacagaagttgtggtttcacagagctgagggctcttggattttggggtttcgtaggaggcggagcttgattctcctcgcaggtggaggccgctgtgcatgaagagtggcctttgattttttttttttgagatctaaaaaggcttggggttttttattcatttaatttgtgtattttatttcttttaaataaaatatgatgtatatttatttgttaatattaattttctagaagtactctgtatatttatatatacaattctttttagtaaatttataattaaaattttaatataaataatatataaattatttaatattattttataaagttaaatttatagtatttcaagtctagtagaattagactatatagatatgtttgagttgggtctcactttcacgtccagtctagtgggactagatatgtttttctagtgcaacaatattgttagactagaaaaataccttttttatgtcccttgatactatgtccaacacaaaatagactagtaatacttataaagtccaactttgatggacttaaaaagggattttgtagtagtgtataattcta

SEQ ID NO: 312215 - DNA, 1313 bp, Cannabis indica
ttttttttctttattattttgtttttaaatttatataagctgagacttgagagagtccttatagtaattatcaacggagagagagtgtgtgagttcttaaggggtacttctgtaatttccataaatagagagaagtacagttggcaatattaattaattgataactattcctttcactgtgagaagcacttaatattattgtgtatagggaactgtttggatgatgtaagcttccgtacatgatcatgatcatagtactttgtcttatatctacccatcaacctttatcaattcgtactattcgctattggaatacataaagcattttaaatgctcactttattatttatttttttaaataaatagataggactattttaacctactcttagtgtattaatataaatttggcaaactaactattttaaatacaaaaatttataaaataatctcactaaatttactctatgcaattatgatagttgcaccatttataattattttgcaactataatagttgtttatagctgcatagtgtaattcataattatttttattatttttttattataaaattattttgctaataaaaatttatttttacaaaacactatttttatattcaaagagaataccaaacataagtaacaagataatctaatccaaaacacttgttgttgcctttttgccagttgttgagatacatgcagatctagagagagagagagttattactagtctcaccaactgaataaaaatgcattgaattgagtcatcttactcactgtctaaaaatcctgacaaaaataaaagtagacaactcaactaagtcttcttactacataataaaataagctaactccattatatatgcattaattcaccacacctattcaaaccctacctagctatttttttcattacctttctactatcattcaccattaatctcaaaaataaacaaatagggaagagagatatgtagtgaactttatatttacgttttatatttacgtatgtgtatcgattatgcaactatattaataatgatcgtctacagtatatatttattgtgaatctttctacaagttccaacaaagtttgaccaaggtagctagacttctaccaatggcaccaccaccaaactcaattcttcatcattatcatctcacattgttctcaatcttaatattattataggcagccgattttgtgcccatatttacaaaacacggattggaatctgttgtacggcaggtgggttccaccgtacttttaaatattttttaatttttgaaattttggtggtaacc

SEQ ID NO: 312216 - DNA, 1922 bp, Cannabis indica
tatcttagaattaatgggccaatataagtatacatttgtaattttgaattattgtaggattatagtttggactattttacccctagttggtttatttacttattgttaaagtaataggactttgtcttttagtttgctttagttagaattattagattttaagctacaataatatgggtttatcccatcacttatacttagctaaaaattacaaaaaatttagaaaattcaagtctctctttctctctcttggtttggccactactaaaagctaagaacccataatttatcctcaccaattccgattagattcaagaggcattcagtagaagctagggattttcataagctacgctaagctaaggtttttatcttttaatttctttagttaaatactaagttttacttgcaattttaggtttaaaatgttgttagttttgggattgctgagaattgttttctggggttatgtttgagttattcttggtggttcttattggttttggtgcttgatagtgagaaacacctaagcttgagcttttaagctcaaaattaggtcattcatggtgatttatgtttttgttagttcatgatgaaatttttggatgaattatgttatttatgtttcaaataggtattttggagcttattggaagatttgggttagctttgtgtgagaaatgagattctttatgtttttgtagttaaaatggcaggccattttttcagaaacgattacaagcagttagaaccagaaaaaatggcctgccatttttttggggtattgttcccgaaatatcatttttttagtattttctttgtatttagggtattgccacattatttatcgatagagaaacttttagttttgagtttaaatcctcaaaaagttatttaacatatcacttgccagttttacgtatgttgtgacttacgggcctgtaaatagttccacttgagttgatcgacacacttgaattcaaaattaaggtaagactagtataatagttgcataaatgtttacatatttagcgtgcatgttttttgattgcgtattagataacatattattaagagcaataatagtgtacatagaattgcactgaataccgacagatatatatttggcaaagtacgaattgatatcacattagtacgactagagtaccgagtatagactgatattatggtcaatcgtactattgtatgaacgttccagacttagtacacgttggacacgggataagattgtgaatgggtgtatgggcgcctggttataattcagtgtatgtttatgttatgtctatgcttttcctcctgattttgtcgaatcacagatgtttttacatgtgtagttgaaggcaaaataaaggatgaacaatagtgagctcgagctaataaagattgtgcatatcggggcggttagaccaggagtattcgatctttaggatagaagacttattttgatagttgctagacgacaacttttgtgactatgtattttgtaaaaaaaattgtaactttaaaacgggatcctgaatcatgtaaaatatttatatatttaagtttaattatgaaaatttaaattattcacattttttaataaaccttttgattaataagagtgcacagtaaattaaaattacgataatgtgcctaatttagtagggcgttacatatggtgtcagttatttcataataacagacgacatatattaggtgcactttatagctacgatttttataacataatcatcactaaatgtcaattttaataaacgagaatattttaatgatttaatttatcttttttattaatcaattgaaaaaattgcctctaaagacttaatttatagtggtatagtttagtaatcattgaatatgaaaataaaataaataatagatcatacacaaaaatgtat

SEQ ID NO: 312217 - DNA, 578 bp, Cannabis indica
catcataattacatatttaataaccttctctataaatagatatatgattcattttgaaccaaacatcccaaactaaatggttgcacaaagtttgttggagacacaattatctccggtccccaaccaactcgatgcaactgacctgagatgtaggttcaactagaactttggttagattttgttactattttatgtgctcttattttatagtttgaatgcagatagagcttgttgtgttttaggtactttatctccttttcaagaagaagctcttgcatttgataggattaagataggcacgagatattggattgcaagtcaaagttttttctccaattttctttttttgtctctcgtgttagctctaagtaatcactctatgtatattaatgacctataagtgtttttctttagatattaaaatcttgttatctaattattctgagactgttctctctcataataatcgtaattttaacgttatgactcataaattgactaaacatactttactgatagacaatacactttttaagatagaagagatccctattccttaggggtgttcacggattggt

SEQ ID NO: 312218 - DNA, 1968 bp, Cannabis indica
gggaaattctaaattcccggccattcccgacattcccaatgtctaataacccgtcccaaactactaacatactaagttgtgatttctactgagccaaacgccgggttccaaaataccgggcaccggaaatgcaaaatatgaaaactactgaatgacatagcaatgcatttctgaattcaataaataacagtataataaattatttaaatggctataaataatttcataattaatcataattaactgctaatttccaaattaaactaagcgggctttacaccagcaccttgaaccagtctacagatcagcctattgtttccaatgtttctggtaatgatttttgtgttcctaaatctacttggataatagatacaggggccactcatcatgtatgttgtgatcctaccttgtttcacagcgtgcaaaataatatcaaaattagtaatgttggattgcccgatggtagaaatgttgttgtctcttttgttggaactatacatctatctaatcttgttcttaaaaattttcttcgtgtccccaagtttcattgcaatttgctttctgtcacttctctttccaacacatctaactattctttccttttccttccaaataaatgtgtgattcaggatatttccaagaatcaagtgattgggatgggtgagcgtgttggacaactctacctcctgagacacaatgattctcctactgcattgaccatttctcctaccattttgtccatttctaattcaaaaattagtagtgatactatatggcattatagacttggccatgcttcttgtgtaaagaatcattctttgaataaagaacggaattttcattactctggctgttctgattttcattgtgctatttgtcattttgctaagcaaaagaagttgcattttgtgtctaatcataatattgccaacaagtgttttgatttgattcatatagatatttgaggcccctatcatgtctctactattgaaggatttagatactttatcactatagtggatgattgctctaggtatacacatctcatcaaaaataaattggatgcccaacatgtcatacaagcttttatcaagcttgtcaacacccaatataatgccaaaattaaagggataaatctgataatgccaaggaacttcagttccctaaattgttcacctctcttggtcttattcatcaacattcttgtgtccaaacccctcaacaaaactcagttgttgagagaaaacatcaacacttgttgaatgttgctagggcactcctttttcaatctcccatccctttgccttgttggggagaatgtgtcaacacttccacctatataataaatagaacacccactcctaatcttaaacacaggtccccttttgaaattctaaattctaaagcccctaattataatcatcttagagcttttggttgcttagcctatgcctcaactttaggggctgctagaactaagtttgctcctcgagccattgcttgtgttttcataggctatcctataggaatgaaagcctacaagttattggatttaaacacaaatagaattttctgctctagagatgttattttccatgagcagatttctccatttgtgactgctggaaccatgtcccatgaatcaattgatttctttcccagttctacatctcataccaacaatcttgacctgtcacagcctgccataccacctaacattacaccaaacgaacttgatattacaccagatttccatgacagcagagaacacaaaaaaccagttgatgttactaccaacagacccattagaaactctaaaaggccatcatattttaatgattaccatgtttttttgtctactaacagtgtttcatatcagggcaattcttctatcactgaacatcctttatctaaggtgatcaactacagtaggctgtcccccagatttcgtgcaagcaaacttgctat

SEQ ID NO: 312219 - DNA, 1598 bp, Cannabis indica
taatttccaaattaatcacaaccatttaatagtgatccaatggttaaaaaaaatgtaaccatgatggttacaataaaaatgtagctattggaacctcctccatatatatacatatagtgaccactagtataagactaggggtgacatatgtctttgaaatttaaatatttaagtttatttatttataatttagtctattttttgtttttgtttttatattttaattttataaatatttttatatttatattctcttttttcgtattttctatattatgttatttttgtaaactaattttcattatttcttaattttttatacataaactaaatgtatatgtatatataaaggtatttatatattacaaatgaaagctagctagttattaagactataaatgtatttatatattaaaaaaaagactataaataaatttatttatatttatatgttggtggtgataaatatatgacataaaagtcaaatatatattgatatttatttattgataactaaataaattaatatccatttacaaacaacgacaaaacaagaaaagaaaagaaagaaaaaaaagtacacatgcattgacgatgacactgtaaaacccaaatgcctttttaaccttaaaatattgataataataataaaaataaataaataaataaaatgatcaccaaaatttagttttctttcttgttatttacattagccaatttatattactagctatacaaaaaaaactttcctaccaaccaaacaaaaacttgtgaagataatctccaattttcttttaatacaagttgaagattaattaattaacagtttagagacaataataccaaaatagcaataataatgattaaaaaaaatatgagagagatgaacaaattaaagcttgacaactcatgcaatatattattatataagggttggtaaaagggacaaaaaaaaatagataagataagagaaatgaatagttaaatttaggtaaatttttttttatttatgtggggctaaaataaaattatctcttacaacacgatcacatcaacttctctaatattttacaatttaaaatacctcatttaaagttttactactaaaaaatcttacttttataattaatcaaaacaaaatttatgactaagtaaaaaaaattgtgactagttataaattattattcttatgttgtgactaaaaggtccacgactaaaggtattagtcacaaaaattacaatttgttgtgcctaaatgtatttttagtcacattacttgttgtgactacaattttattagtgacaacttgtaactaaatactatattttagtcacaagtaacattttattgtgacttaaagtcacatttagtcacaaaaaaaattatgttgtgactaaaaaattatcactaaaaataacagttttcgataatgtttatttttttttttttattttacacatacatataatatttataattcaataaatacttatgataaattaaaaaggaaaatagttagggtcgaccctatatttgttattttgggccttagaccattttcgaccataatcctatatttagtattgcactaatacaa

SEQ ID NO: 312220 - DNA, 645 bp, Cannabis indica
cacccaccaacccccaccccaaaacctagcaccacctccaccccgacctcgactccttctcgatctctcttccctttctcttctttcttctacgcacctccatacccaccatggacagtcgattcccaaaccaaaaaaaaaaatccaagagccctcccccatcttcgtacatctccaaatcacaccaccccaagtctgttagaacttattttaccatgatgttatttactatgacacccgttgataattaaatgtaattacctaacaacctaaaatatcattttctgaaatgataatgttaactcataaagtttattaggattctcaaattggaaaaagcagtagaattataagactccttctgttcaatcactctaccctttgattctctttttatagcagggtatttcaagtgatgaacctagatcgttctttaatctgaatttgcaatcgatatcttctacacaatcttccataattacctgagtatcacacttgactaaaatgggctaaatactcaaacactataattactagagggagaattctattagaggtagagagagagagagtaaagtgcgaattagagagagagagagagagagaaagcattaggattttcttttaggttgtgattaatagttg

SEQ ID NO: 312221 - DNA, 3096 bp, Cannabis indica
attaacataaataactgctaatttccaaattaactaagcgggctttacaaccacattctgtccctcttagtagagaggaggaatatacagaggttggttagtgtggccaactattggagatacggcatgtatccccccgattatggagttacgaagattgagggcccattaggttgtttagatggagccctagctattaaggaggctagctcagaaggcgggcatactctcgatatggatgacgatatgttcctttatcccggatagccaggaatttaaagaagagagaaagggccctttgccagtgcttggctcgcgggggcactattggggacgccactctactgatcatgcttggaggccagagttttgtcaggcccactcacccctcacctacatctagaagcaagggcaaggcagccactagtgattcagatgactcctcttctaaggtcggccagcctctggacatcacaaggctggtcagcctactccctacagatgcctggccagttagaattggacctggcaagattctggtgcacaaccttacatgtggactacaagttggactacaaattaggccctaacaacccaataaagtagataaaaaaaatatccatgtttaaagggcattttagtcttttttataaaatcaatttaatatgtagatatctacttattttatttgtaaattaggatttaatctctcctatataagaagccttaactcaaccctaataaacctaagtctaaggctaaacctaagtcattaagtctcattcaaaccgtcaagctctaagttttttagctttctctctctctcccattcacacgcacacataagcatctctcaacacttgagatttgtcatctttgattcctactttgtaaccttaagagacctatatcagatcccacctatagggatctgaatagtgttatctttcggtatcaatacaactaaaaggggagtaagtcataagggggtcaaacttctataaaaatccttgtgttctttacttttgagttctaattttataacatgtggcaaacattaaattaatacaatctcgatgttggttggccactttttgaggtcaacactatcatcatcctcactatcttcagtatcattcagtgaagtggatttgaatatgatattcatctttttttttatcaacttctccttcttcatgagaactcatgaaaatatcctcgttcatgagagaatccatgagcaatttcaatgcaggtgttgagagatccttcgcttcttaaatggcaaccaccttgctatgataagatttgaggagacttctcaaaattttggtcaccatgtctttttgtgtaactaccttgccaagagaattaaaaccattattaattgtatcaaaatgagtgtaaatgttagcaatagtttcatgttgtctcgtcttgaagttttcatattgagcaactaaaagttgagttttagttatttcatagagctaggtccttggtgagttacttcaagaattctgcatatatcatgagccaaggagacttgctcaatatttttaaatatatctctatttaatccacatgcttaaatttttagataatatttttttatcgttttcataatgtgcatcatatttcataaaaaaatgtacacaatctataatatgcataagaatgtaagaaccataacatacaatatgccacaaatcataatcaatagattgaaggtacttttccattctaatgttaaaccttctagcatactattgtgtgaattgcttggaaacgccatactcttagattgtgaaatctaccctaaaaaaagaccccaattgttatcccaagataggtttccaagagggaggtgaattaaaaatttaaactaattttagaaatttaaaaaccccaaagacaatttatacaaatattcaaattgaaagcaaacacattgataaacataggtataaacaaaaagaaaacaagaaatgtgaagattttaaggatagaaattacaaactcttgatttttacaaggttcagtagaactaagtcacctacgtccttggtcctcaaagctacggacctagctttgatttcaattatcgagtctagttagcgggcttgactaaactttacaagcaagtaattttcaccaaggtttttcccaaacatgtcccattttagttttcttccaacgactattaatctcaccggattgttgaagtgacaatctcactatgagttgcttttccactgatgccaacttaattacctcagctaatagtttttcaaaggaccatcaacctctttaaattattgtagtgacaatttcattctatctgggctgtttacaatactggtgtgaacctcaccaccaaccgggttatttaaatactggtgccaacctcacctcaatacgatagaaataaagcttttaacatacaaggtaaacactctttaataagatgaaatacaagtgaaatcctagagagaattgcaaacacactagagaagataagaacaagttttgctcaagtttgtgtggttggtgtgtttatgaatgaatgatgcaaagtaagtttagatcacttttagagatgtaatatgatcagtactaactcagccaactcatttgaaagtagaaaaaattgttatttataggccccaagtgaaaactagctgtatagagttgttaggcacatttttcaagaaatccagcctgtaactagaagtttggttgggaattggttgttagaaactgtgaaaatcagaatttcgatttaagggcagagaggacatggccattttttgatcttaaaatgtacataactcttagctcgtttatcattttttaaaaattctaattgtgttctcttagttaagatatgataaatcttaaaatataatttagaaaaattatatgtcatttttgaaaaataacttattgcacaagttagtgagtcaaactttaatgttataaacctcgaatgtgttatgcgaatcactttaacaagactaaagaaacttatattatttgattgagtgtagtcttgatgtagattaccttaatttgcatgttttgatccaaagttaa

SEQ ID NO: 312222 - DNA, 577 bp, Cannabis indica
ttttaacggctaaaaaagttcaagggacacgatttagtacatgtcaaagttcggagagaaaaactacaaattagccattaatatattatatcactattattcttgtttgttcatcctttattttttctaacatatatatatatactaaataatgtttaattatttagttttatattaggttatatattcttctttcaaatgttacaataattaattaatgttacaaatacataaattaaaatgaaagatcgcagtataatttacatgtcgaagtatattaaggctattatgcatgatataatactaatatcattttgtacttattattatttgggtcacaaaccaatccactttttaatggtaaaaaatctctaacttttaactaaatttattttaataatatcagctcaaataatttttttttaactaaatttgagaaaaaaaaaactaatattatttgaattaattaaaattaaataataaatttattaaagaataagttaagaattccaaactatatctatttagttatgtataataaaatcgaattaaaatattaattttatataatttatat

SEQ ID NO: 312223 - DNA, 633 bp, Cannabis indica
ggtaaaatatttccaacactaatgtcatctactctatgatcagtcaagaatagttcaagaatacataaatttcgcagcaataaattcagaaaataatgcttttactcaacatatattgcataaaaaaagagggaaaggcagcttactcactattcaaagctttctgaactttctcggagggttatcagcaatggagtttccaataagctttctttgaagatttgaggataaaaaagagaatttttttgctctcgttttataagagtaaaatggctaaaagaatctcccaataaaaagctttaaacctcttttataggtttttgagggggatagttaattaatttaaaatttgaatattttagttttcccccgtaaatcgaatgttagtactcattgcaaacggcatagacgtcatccatgcagtatcactcaaccgtcaatgcgtcattcaaggtatagctttcaagaagtattaaatgcctcaaacactgaagagacgttcgatcaggtcacatcggatcaaagatgataaccagacatgcgtcacccatctgaacagcttcctagctgaataagtccacgtgcgaccaagaaaatcttgtgcggaattgcggcaaatgttatccaaatttt

SEQ ID NO: 312224 - DNA, 1289 bp, Cannabis indica
ataatttaaatattattaccgtaaaaattacaacttaaatatttatttataattaggaattaaacagtatgtgtggcacaaattattctaatatttttcaagcttatatctaaccttcttctttttctcattttcttcaattatatttattctaaaaaagttaaagtaataattaaaatctaaactaaattattggattgaatcacttacttctacattaataactaaaataaaaatccattgattaaataaagacgaatatttatttacttgtagttgtacaaaatttaattaaataaaatgataatgattggattgaaaatttagtgaattttaagcaataattcctatatttgagattagaattaaagaaataaaaatgaagggtttgggtttgtggggttgatgctttgggaatacgtgtgtggagatgaataatgagccataactttggaataaggatgcggaacttccaagaattctcaactacttcttcttcttcttctattggattccacatgccaatatttcacgcgccaccacccagcgcgtcccatttatcttcccaaaatcaattttattgtgaaattaatttaattagttaatgaaatgagatgtggcagcttttcaatttaatgctcttattttaaatacacactacagttcttctcatttattacattggagacctggaaagatcgcctccttctctttattactttacatttataccaaagttattgtttttcttgagagcaacccttcatccaccttctctctcttttgaattttcaaggttttctgtagcattgttatgaatattatattgcctaacgagagatatatttttaatatttttaaaaattattaaattaaattataccagatttatactttattaaactaataacaatattttaaaatataaactaataataatatttttttaacgtaaactaataacaatattaatatataaaaaagtgtcaaacaccactaatacattttagtatttctctattaaaaaataattaaatatttacaataaatatttatattataaatatttcaaattttatatttctaatcactataaatgttaaaaagatattcttgatataagaggattcattattttattttttaaaatacttaaattaaaattttatttttttattttattttacttacatcatcatatttatttatttatttctttatattatttaaatataatattttaaacatttttttgttattttaaaagaaaaaaaattaaattaattttt

SEQ ID NO: 312225 - DNA, 993 bp, Cannabis indica
aaaggggttggcaaatcaacgttggtattagaacttttaccagcacaaaatgaaaagctctggcaaaaatgacttttctcagcgcatataaatccgctggtaaaagttagattttagtcactgcaaatgtgcgctggtaaaactttgacctttttgccattgcagtttgcgaaatgcgctggtaaaccagcgcagtagcgaactgtgctggtaaaagtgacatttcttatagtgagattttcattttagggtgtgggaaatggagaagaaataggtgggcatgtgggaaatagaaaagaagtaggtgggcacgtgagaaatgtggcgagaagtaggtgacgattttttaatgggccctcatacccgacaatgtaaaactatcggatatagtataggcgacggtttaagggcccaatactatacccgacggtttcaaaccgtcgggtataagggctcgataaattcacgaattccaattaaaatagtcgtctattcctgtaattactattataaaccttcaggaatactaaattttcctgacggttttaaacagttaatttttttagcgacggtccctaaaaaaaacatttttaggaccgtcgcgaattctgacttttgtagtagtgatatttgcccatcaagggttaacatttttatttttattttgaaaggaaggataaacataacatttaaatttacataaaaccttttggccccatatctaagatggcctaagaataagaaaaacttacttcatgtaaaggctatactatatataattaagggtgaattgtgacataaatacctaatatttcagattttatacatttaaatatcttatctttatttttagaggcaaaaatattcaatgttacaattctcttacacctgttactactacttccgttaacttataaatatagatacgtggagggcccaaatgcattacatttaattttttttattttaaaactaatattcttaatatcagaa

SEQ ID NO: 312226 - DNA, 1054 bp, Cannabis indica
tttgtagtgtttggcgtacgtttggagttgaatccactaaagtgataatttcgtaaatggaataccaactcgctagcgcattactatattaagacaagtacattgtataatttctttcacacaataataaatcccagcccaggtctccttgaattgattgtatgtaagattattcttattaatgcaattgaatcaagtattgtcctttgaggcaacccaacatcatatttcctaccacttattattaatttccatttgagatttgagactaattacgaacgtgtttctttctttttttattttttttttatatatagtgggaaagggagttattaatactaattagtcaacgatgaccatgaaccctaaagtctaaacccgattaaactatttgatatctagcattagtgtggtatgctttagcctttagttgataatattgaatatattagcaaaaacaaaaaacccacataatgtatttagccgaatttaagtgcctaattaaggacgactttttgacttattaattgttgagagtttgagctttgagtttttgaatatttctctcttcagcaaaatattctctctctcgctttattttattttattttatttcagagttgggcacaaatgtgaattgaaacaaagtgagacagcaaaaatttgaataagggaacgccaggctagcaaaatatatataagtaagagttttaatgcctatatactataactaatcaaaaatgtcaaatggaaaaaataattaatggtaccatttaagtgtacgtaccaaaccaaagtaaagagccattcctatgcacgctttagagcatccatagtaatgtagacaaataagactaaaaagaaggattaaagttttatttttgatgaacaaagtaaagttatatattcatgccttatcatttggattagtaatataaaggagaaaaggaattaatgctagtgttcagttaagtccttatcaaagaaaagaaaagactatacattagtgcatgtatgtaataaatctcatcaagtatatatgcaagagatgggg

SEQ ID NO: 312227 - DNA, 929 bp, Cannabis indica
tacccatcatggaaaacattttataaccattaagttttttccatacacaaatagagttaaacaaactagctttgctatgccccgcaaagcaagggaggcccaagtctcatgacaatctactccaacaactcccaataacgccccaaactttctctctcaaggctcgcaacattgggattgaagcacactgttatttagcaaagttgacaagttttcccgaagcttcaccataccaccgtagaagttgcttgaatctcaaagaacacacttctgaagccttgaagaggaagaggctgtcatcggcaaacaggagatggaaaatcacaggaccacctctcccacaaggaaagccaaacaacaaactattgacacaatcacgattcaccaaaccagacaagccctttgtacaatgtaagaacgaataaggagacatggggtctctgttgttttattaattttaaattatttttatgtatgagtgtatgtgtacatattaatataatatattttatatatttaaaataaatatgtattaatagataaaaaataaagaaaagaataaaaaatataatatataatgtaatgtgaaaatataaaatacacaaaataaaattttgatgatttattttgaaaaatagaagagaagctcttggactagctaataattacccaattacctacaaacacatccttaaaagaaagaataatgggatattgacggctaaactacctgaactttacggtttgtaacacttaaccacaaaaaccaaatttttggcagctaaactacctaaaccctagttctgttttgctctgcacacctccgcccaaaaatcacagttaagtgccacggtggactatccacgtgtacccacttgtacacgtggcaagtttttagtggtccacgtaatattagttttaaaaaataa

SEQ ID NO: 312228 - DNA, 811 bp, Cannabis indica
ggaatgggggtcccctaactgctggaaggaggccccctccggatgtctgccaaagatgagaaatctagagattctcctaggcaaacatcgggtgcaaatatccaaaaggaaataataaataaaaaaagagaggtgaggaaaaagggaagaaaaagacaaaatcatgaaaatcgcttcacactctcgacggtctcttggtgaagaaattaatttttggccctaaaaggaaaacgacagtaaacacacaaaaaactacggcatacgacggtcttcaccatgaccatcatatataccacaaaaatcaagtacgatttaaacgaggacgttgttctaagttttgccctaacatgcatgtagataaatactaagataaagtacactgagagatttacacaatggtgatgggcgagaagttgatgtggtctgatggtaaaacttggacaggaaacgatggaggaatatcagtaagaagtcgatgacttctggaattttttttcaaatgtgctatctgagtcgaaatggcagagtggtgaaagtaacccagcaaagagaaagtgctagcttttataggacagagagggtgcaaggcagctgtgatcaggcctcatcgtacgatgggaattggtatcgattcgcattttgtgatccaacggatgggatgaatgggtgtaacgaggagaaagggcggttaaaacatttgagcagctctctgacaccagcattaaacgtgcaggtctatcaatagatagaaagcgaatcgttgcctgcaaaaagaaataaatatcaatgatgacggtcataaatgcaaccc

SEQ ID NO: 312229 - DNA, 2856 bp, Cannabis indica
aaaaaaatagtagtttaaataaaaaaaaaacaagtttaatttctataaaaaaaataatatctataattgagatcattttttatttattttagtattttattttttttaaaaagaaaaaataaataaaaaaaacaaaaatttaaagttttttttaaaattaatttttttttaaaaaaaattgccatttcagctaaaacaaatatattaaaattttgttatacaaattgattaaaactagaattatacacaataaattacaaatttgtgatgtaaaatattatatttctttaaataagaataatattgttcataattagctaaaataataatcaaaatcaaaatttttaagtgtacaaattattttaaactcaaattattcatagtgatttaaattattcacaatgtgattatttgacacattactaaaaaagataggttaaaattatggataggtatcataaatattatttctattcaacatttaaattttaatattaactgaaaattacataaagactaaactatacgcaaattttgaggttttagggatttctttagttaggtataatacattcatcaaaaattaataaccaacaaataaaaataaaattaaatatttttcttattatatatgaataaatgcaatattttttaatatatattacatgtaattggagtagatcgatttttaattagattttgataatttcttctaaaaactaattcaatccaactagaatacaactactcacattgatcattttttgagtagtggcctagggatgtaagaatacatggttctaataatatatgattagagtgcttttgatgcattgaaattgtgtggatatgctaatgtatgaactagagtgctttatgaagcattgaaagtaagtgtttataataatatatgattagggtgtttaatgaaacattgaggttgttgattatgtatagcgataaatactcttaattttgtaataagtttgttcgtatagacgttgaattgtatatgtacgttgaaagagtatgacctattggcatgtataatttgttgtactgaaatttgctatcactttctatgattttctttatcttgtagcttttcttgctacgtcactgtgactcacgggtgctttgcggtgcagataaggaagttaggagctgtgttcgaccatgagttggaggtttcccagcaatgtacatatcaaccatgttgtcttggctttcgtgaagcatgatcaacccttttgtatgattggatgtataacccattcttgtattaatggttttgtaatcagttgtaaaagaattttattagctggggatccccatattacgacaatgtttaaaataagtctttattttgaatttaattaaaggttttaattaaaccacacttttccaaaattacaagattagtaataataagtttataaaagcacacatgtggcgtccctgagagtcagggtgttacaaggaatctcaatatataacattgattaagtttaagcaatgcttgaacctgtttatggttaagaccttagtcccaaaatcggtaggattatctttagttttgaccttctctaaattaaccaatccttcttctatcttctctctaatctagtaaagtcttatatctgtatatctgctcgtttcatgataaaccagattcttacaaatgtggatggaagactggctatctgaatacacagtcactcagccttgatttgttttaactcataaagaactccctgaagccataacgattccttaaaagcttatgtagtcgctataaattatgcttccatggtggaaagagcaactacaaattgtaactgagccttccaacatatacagttctggtttgtcaagaaaacataggaagtggttaattttcttgtatctctatttgaggcgtagtccgtgtccacgaaccctttcaactccaattctccttcttgtttctcataggtcaaacaataatcccatgtgaccttcaagtatttcaataactatttaaggactttccaatgttctatgcccaaattggagatgaacctgcttaggatacttaaggcgtgagctatgttccatctcatgctcaccatcacgtacattaagtgtccaagagccacatcataggtgttatactcaaaatttggctacacttcattaggtgacatgtgtcaattagtggaatgtgaaccacctaatataataatgttatatcatttaatgcaaaaaggaatatctcattaaaatatagaattaatagagcatattcataactcgctgacaatataatcttaggcaagacaaggatacaaaactattaatgtctatattgacgagacactgccttggaagacgcggatccaaggacaagattcattttaaaaagaataaatgaggttatctgaagtatttatgaacaatatatagcgagacatccacctcgctattcacaagacatattgcaagatgaattagttgttatacacttagtgcattttatacattacaataactagttgtaacaactgggaaatatgcaggacatgattgtccagtctcgaggccttatggttaaagactagttcttaagtttgctcagtacactggtgctcatgcgattgcttgaaggcatatgattgtccaaagtcagcattgatcatctacaggcaaagcgagatgctgttatcgaaatcaacatcaatcgtctttaagaataaaaataataagcaattatgcagttatcaattattatctacatgtgtttaaatgaaacatgggcaactcccacgtttaatgaagcgattatgtaatttaaatttaaatgtaaataactgccaa

SEQ ID NO: 312230 - DNA, 2031 bp, Cannabis indica
ttgtcttttcaggtgtgttctgacacgttggcacggtatagtcacaaccgggtatttcgagtcgaactgcgttcggggccgaaatacaattctgggattaattagtggcattatatttatgtgtgagaaatctaaaaattaattgggtttatttttttgtgaaatgacttaattgcccttgtatgtgcatgagtatgttgttagccctaggggcaaattggtcattttgacctttaaattataattgataaaagattgaatttttaagtaaatgagaaagatttttctagttttgtttccctcataccgaaccctctccctccctttctaacctatttctttcacttgagaaatatttgagaattcttgaatcttgctatctttggaacatggaattgaaggaagttcttgctataattgaggtagttttacagctttaattttggttattgttgctgaatttaaaggttgaaaacatgaaataggtatatgatgctcttaagttgcatgtggttgttttatggttggtttaagcatatttgtatttgaacttttgattgtatattggttaagttttagatgagagtgttggtgtgtttttcaagcttgaatccatgtatttttgacgctttgggttgctgtaaaatagggttgaaacatgcttggaagtttaaggtttcaagtaagaagttttgttgaattttgttcttgaatggagcttggtgttcttgggttgtaatctgaatttgggaatgttttatggatggattggatgcataaaatatgtgttttaactctctaatgtttgctagcaactttaatttgtgaattgagagtttgattaagttttgggatgaattggatgtgtttgggagctgatttttcgtgttgaagcttgttggtttctgggtttggaacccagattccaggacatggctttagcatgccgcggcccgcccctttcgttgagacctgggagctcgtcccaagtgccgcggcatggcgtttgcatgacgcggcccgcccccgagtttctgttgggctttatgccttaaataaaactctatttcaatgtaatctctatcatttaaatatcaataaagagacaaaagtactttcatcacttatttaatgtgttgtttggttcatgttgtcatttatatgtttatttgatttataaattcatccaaacccttatcacattaatattcttgtttattgtatcgtcagcacagtggaaagtaatcaagattgtgtgattaaatatatattcgtagatttatcagtacacggggttttaactgatatgataatctacaacatagttcacttgcaccttggataagtgatatgtcctttccagggcattggttaaagtaaagcttgggttggatgcatagagtatgcattggaagggaccgatattgaacttggatcagatatgataaatttactgtaataaaatacatggaaaggtgtaacggtaaatgaatccctatacaatgtaaataatctatagaggatcattgattattgggattataacagtggataactaatagtgtatctatatcgtggaacatatagagcgttctatataactgagagtgcaattccaagttctatggtgaatgcaacgaggaattaataagtcagcgaatttacttggtaaattctagatctgcttattggaagctcaaatatataggcccatggtccccatactagttgagacaatactagaatgtgcatttaagtggttaaattggaaaaatggaatttttgagcaaataagatgaaaaatgagaaaaatgacaaaattgcgaagtggggcccacaacccatagccggccacttcacaagggttttgccactttatttttcattattttaatgctaattaaatctaacctaaccctaagtggtttcctataaataggtagtgatggctaaagggaaatgaggatgcatctcattccttcagtaaaaatttcaagcctccttcacaccctagccgaaaccctatctctc

SEQ ID NO: 312231 - DNA, 758 bp, Cannabis indica
ctctctcttcttcctaaagattttgaaatacttagtgttagagtagttcccacacacagcaagtgataaataatttccaacaattgactatgtagatggctttcgattttgatatatgatttttatctactctctgctgtttttttttttaaaaaaaaagtcaattgttagttcattgttaagtttttgtattgcttctcaaagtaatctggtactttttatttgaatatggttgagtgtgttgtattatatatatattccaaataatgttaatgactctattaggattgatttagagaataatgattaaataggggttgagaatatcatcaagaataatgatgatgatgatgaaaaagaagaaagaatgagcttttgggacgtgggatttgtgttggaacaagaagaatttttttaattatatgaaaagtagcaaatattttttacaatttaaaagtagtatttattttgtgtaggtataaataaatggtatataattgaatggagtatagtggagatcgaagtcattgaactaatcatatgttattcaaaagttgtttaataagattctaatatcacctacttttcattttttttaaggtcattaatcatatttagagaatgtcttcatctaattttaaatcatctcctatgaagaaaacatctaaaaatatgcaatccccttcttctacttgtggtgctaaaaggaagtgcactagtgaaactgttatattattttataatataataagtgtaga

SEQ ID NO: 312232 - DNA, 1070 bp, Cannabis indica
ataaatgtataaatgtgtatatatatatatatatctttatacataatattttctattttaattttaattactgtgtataattgtatatatgtgtgcttattgtgtgtgagtatatatagatgtaagtatatttgtttgtgtatatgtgtatgtatatgtgtgtatatatatatgtatatatgtgtatatgtgtgtgagagaatgtatatatatgtgtgtgagtatgtatatatgtatatgtgtatgtatgtgtgaatatgtatatatatgtatatgtatatttattatgtgtatgtgtatgtatatgaggatgtggcattgtatatttttgtatatatatgtaatgaccgcatagtttaattatatgggaaatagcaaataattaaggatttaattattaatttgtgattatatactttttagtaaaaaattaagggtgtgttcagaaataggccttagaataataattactcaattatggagatatatttgaattttatttgtattgtatatgtcacataagaaaataagaaattaattttatatttttcatattttatgcccggtaaaagtagaatgcggtgatttgactattagagtcacttaaatacgtttgaatatcttagaattagcggagccagattgtaatattctaaaaatctaattatgaatcattagggtttattatatatgagttaattagagagtaataagcgggattatgatcctactaatccaattcaaggtgatcaattatgattttttccataagtgaattaataagcatatttattagttacatagatttatttagaatatgtggatatgatgtgaaatgtttgtgtaataaaaatattttcaagtttaacaatctttgagactcgataagaggccaaaaatatcacaacgagtttagttagcaattttatgagattagtgagacatgttaatttaagaattactggattattttgagatactcgagattaactgaatgccctaacgttagagttttcttagtggctaagaaatagtaatatatttttgtgctgaaattcttgtgttgccaa

SEQ ID NO: 312233 - DNA, 831 bp, Cannabis indica
attttatatttatttgaaacatacctctttttatatgtattgtactaaaaatacattggcataagagagttacatggagagtatcttgaagtgacatgggcaaaattggtacaatgtttaaaaaaagaggtaaaaatgatagactttaaaaaagagggtaaaaataaaagaggacaatataaaaagggtatagagtgtaatttcctcttaattctatcatttatacaccaaatctgaaaaataacataaaatctttataaattaaatattttcatttaaaataatttaataattcaaaacatgaaaataattaattaaattaattttatatctacaattaaagacttaaaatgtacaaatttaagtcttaatcaatttgcgtcggcaaaactaggcataatgtgccggtaaaaccttgcccgcaatactcggtcactaaaatggtttttaccagcacaataaccaaatgcactggaaaattgggttatataggcgagtttatgcgccggaattaatttaaacactagtgttaatagatggctaaattcgtccattggcgagtaaaatgacttttgttggcgtaattctgaactggtaaaaaatttgtgattttttaattggcaggtaaaacccttacctaccaattgtaatatgttgggaattaattataaattataattaaaacttaaaacttaaatcaaatataattaatcgtaaatttcgtttataaatacataaattattaattaatatatataaatttatatttatatatataaagcagagacataaagtggtaacataatattctaaaatttctttaaagctatt

SEQ ID NO: 312234 - DNA, 1754 bp, Cannabis indica
gggtatgttccaaagtcgatatcgagcatggttgcttgaccaccttcgaccaaaatcttcttcttctctaagattgcttcattcattacatgcacagaatcaacaataaagggttccaacctctcagcaaacctcttgtatttctcaacctcttctttgagcatttcggggctatatttaaaatctcggaatcttgatgcagcatctgataacaaaacatcaagtttctgagggaaagtatccatgtgcctcaagtcacctactctaatgccatttcgaataactttgctcgagtaacaaggtccaatccctctccttgttgttccaataaaagacttggcaagctcagcttctctaagcccatcaatctcttgatggaaatcaaatagtaggtgggcacgatcggaaaccaatatccttccgtcgcaggagactccattcgattcaagcccatcaatctctttgaaaaaaccaggaagatgaatcacaactccatttccaataacacacatagtttcctcattcaaaataccagacggcacaaggtgaagggcgaatttctttccctctgcattgtagatggtatgtccagcattagctccaccctatttaacaaaacactttcagggaaaacattcacaactctaagctcagctacacttgaaaataaaggacagaattcacggaattcgccaaactaacaacatgaaaatattaaattaccccgaattagccatattgaatttacattgtgcgatcataatggtggcacagtataaatttatggtcgttttatggtcacatagtgtaattaaaacaaaactgcaacgccattgcagcagctaaagtcaaaaattaaataattaagagctaagcatggcagattataatcatagagagaaagagaaatgttgttatacctgacaacgagcaactatatcgaagtgttgggccaatatgtcgactagtttgcctttaccttcgtcaccccactggcagcctaacacaccagagacctgactcaatgactcaattcgactaaacttatgggtagcggactcagcaacgctgctgagtgatgatgaagcagctgccggggggttgaaggagcagacaacgatgtttctgggacgagaaacatgggtccgaaagtgagctttgaaggccctgcacctagggttggagagaagattggagtccagagttgtgagggaggataagttcattggtatggacggcagcggtgttttgttcttaaagttctctagtacagctggaaacgagagagagagagagagtcatattagggtgatgaggttgaggttacctcgtaacataaacatgtcaaatactaacaacaatggtgaagagatgcaaatgaataattgttcattcacaacttctctaaacaggttactagtagttagtagctattcaatcaagtattgtccattttggttcaaaacatgtctaaacaggtcattacttagtaaataaaatttcatacaactacaaattatctctccaatcaacaacaacatagcattgcatgcaaagataacttatttgtcactatgagaataactccaattcaaattgcttagaaacacaacattttatttggagagaagtttctcaataccagatatttcttacaaccccatatatttaagggcggactcacatagaagcgagaggggccaactgtcccttagaaaaaatcgagaaaaaaatatatatgtattttagttagt

SEQ ID NO: 312235 - DNA, 1872 bp, Cannabis indica
actacttcattttttgaccaccaattttacccctcaaataacaaaactaaaacccaatcccttttccttaaattcccttcactctctttttatctctacaaactcacccacacacacacacacacttgccggattcttcatttgccagataatcatttgacagagcaccattcttaaaaaaaataataggtatgcaatttatttagtatttattgttgattaagttatttttagttgtatacgttgaaatgaatagatctacatatatcaatctttttatttttgttgtattgttcttgaaactcgagcttctaggaattctacattttttagttttttttacgtattttagcaacatttttcgatacttttcacgatatttagcgatattagagcatactgaatgttaggaatagcttttaacgatatttggcaacatgttttacaatatgtagcgacattagagcatactgattgcgagggatgaattttaacgatatttcgcaacaagttgcaactatatttacgacgtgttaattctatgttttctaactacgatggttgcgatgtttgttgacattttttgcgatatttgttgatattgtttgagttacatattggtgaattagggagtgctatttatcgacatgttgcgatatgtggcgacaaatgtatcaacatttcatgatatcacttgtgatatttctcgacatatttttgttaactaaggtttttctttctttttttacagattcaactgtatttgtagttgaactttatgatgaggcttgggcagttgaaggtttcaactggatatttaataacgcaaaagcaagatgttaatatttgaggttgacactactttatagaagatgcaggaaaatttgtatgaagagttggatatagaccctcttgtgtacaaactgaaagtagaggtgtgttacatgtacatgaaagacaatatgatactgccggagattttagtgaaagatagtcaggtaagattgttcttaagaatgaagggaaaaataagtgtggagaacttgctgccactgtatgtgactaaggttaagagacatgcgattttggggcctactcctccaactattctcccaagaagtgttgttggaagttttgttctagaaatagatccagcggtatatttgaatgagcagacccctactaatatagatgaggacaggttgacaatgcacgtaaccagtttgatgagtttgatactcctttttacaaaaatgatcctgttttagatttgaacgaggatgatgatgtagagttgcaagttgatgaagttgtagaggtttctgctttgaggttataactacctccactactgccaaggagttagaggacagagcaagaaaaaagaaccccttgtagtgaaaatcattaaacaccgagcactagtagcagtcggccaggtcctattcgtattgctgtaccatctgattttaaagtttgtacaaaattcaaacctattgtgtggataagggaattcatggaggaaaataatatttatacaacttctcttagtggtacgccttcaggaaaaatacatgttggtaagttgtacataaacaagactgaattgaaaaatatagtgggaaggtttgcattgaaaataaattttgagtactcatggtgaggaagtttggcaccgatgcattttacgcaacttgcaaggattcaaattataaatggatagtgacaaggaggaagaaggcacattgtgagagtgaaacatattaaaaaaaaaaagaaaaatactattttagaccctgtgttttgcaaaagttagtaattggaccctctgttttattaaatgacaaaatagactctttgttttgttaaatg

SEQ ID NO: 312236 - DNA, 528 bp, Cannabis indica
acctgtttctgtttcatttataagcaaatcaaattaatttcagattaatacatgcattatgcttcataaacacattaatctaaattaaaaaaaaaaaacacagagagagacttagagatggtaaactcacatgtataatagatcgataaacttcaattacattatgtctcttcaagctttggacaacggataatactaaaatgcttcacttttctgaagttgtcgggaattgatgtcaaattgggacaagcatctatatggatagactcaagggaaggaaggttatcaatcccttccagtattgatgtcaaattgtgacaatgttgtatacagacagtcctaagggaagcaaggttatcaatcccttcaaggagtgatgtcaaattggagcaattttctataaagatatactcgagggaagtaaggttaccaatcccttccatcgttagtgatgtcaaactggggcagcttcttataacgatagaccttagcaatgaaatgtttgggtgagtgttgtgtgccttgctt

SEQ ID NO: 312237 - DNA, 2648 bp, Cannabis indica
aaatagtgttgttttttgttgtattctatggataagaagattattagttataatttgttatttttgtgtccttgaaatggaggtagagtttgtttcgaactgctgtgttttttcattttttttgcgattttgagcgacattttatgatttttgtgcgatgccatcagaaatcagaggttagagatgacattcatttttttttggcaacaataaacaatgttcttgcgattttgtttgagatttttttgtttagcgatttgtgcacgataccatggcagcattatgcaatttagtttatgtacgtgttaacgtagattttcgttaaagataagaaagcctctttttcgtgataggattagtacacaaattagttgtaatctaagaaataataataacgtaagaacaatacaaagtttttacgtggttttgtggttaaaattctacataatccacgagtcaatcttattcagattattttgatacaaactagggttttttccctcaaggtttttccgtccctttttctgtacattctgcccatatttatagtaacatagagtgggagttaattacaatcagatatgaatcccaaaatatttgaaattgtgggctttaatttcacaccacgtaaataaatgcagttagtatttgaaaataatacagttttgacttatccgcctttaatgggtcaatgctcacgtggattcagatacgctgcaaagtgcatctcgctgggaacattgcaacaataatcctaggttgataatgtaaatcccgtctcttctgcgattgaagacattacgctccatctgacaattgtagttcttcgttacaaggttcttcagtagtcaacatcatttaaatgtcaacttctttctgaatgtgttgactcgacggagcagtggatctccttaaaagatctctagagctgattaatgaaggaaactggagtgtgccttcctatagcgagatggacgcctcgccatctatcacttaggttcttctagctgctttacttagttagtataatgcttattatacgcaaagtgttttaacagtcaacatgtctcttcatcaccttttatacgttgcgaggttgatacctcgctatgcattattgatgtgatccttatgattgtgtattctgacgtgaaatggtttctcatcaatatgtgaatcaattagttcgtacattcttgtctcgcttaagattatacattcagcgagttttatatatacgccatcaactctgcatttaatgagttattctattttaatatcctttaatataattgccattataattgttgattcgtattctccaaggttgacgtgtgtcatcctctaaagtgctagccgaatttcgggtaaacaattgctccttaaaaagttctttttagtgaaaagtgctttttaaatgattactgagggtattttttgtctcaatccattttgagaaaacgcatgtctgattttggcagttttatggtttcgaggcacatcagcacttaataaccatcttttccacttcttttttaatttacccgttggatcaattgtctccttaatctgatagagatcaacccaagagtataaaatgaaaaaaggaaacaccttttcattacctttgccattttaaaaaattctagaaattttttgagcttctctacaaaaaaccatacccagattgtttcgaaactttgcatgccatctttgtctttgacattctttttgcgagtttcatctaatttgctatttgaccttaagcactcaaagggatcaccacgatgtttgttgcaccgtcgattgtaggaccattcatcacgccaaacaccgacttcataagtaagtgattcctctttctctattttcttacatgctttttatttctcacttttgtgtttgatcactagtttcttagtttgcacatttagctccttatctggttttagcaattcagggttgaactataactgggtaaatttttaggcagaatgtagatttttgggtttctcaaatcaccaacttcaggtttgataaattttatctaggaattgggattgctttcgttttgcaacaatgtcccaatctggttcagaagtttatcgtccagaatacttagaaacagagtgccctggtgaacttgccatcccctataaacccagaattttaatccaaatagagataaatgatgcaaaaattaaggaacacttagtaaaaacccaccaagatgacatttccagtcgccacagacgcttcttgcaagaaattacagaagacaaatgtcgtttcttgcgagatgctgcttggcctgaatcccccaatttatcctcaattcctctggctaggcctttatttttacccagagtaacaattgcttttgagtcaggtgacttggactttgaaatcatgacctccaagcctcgaaaattaaagactccgtaggatcctaacgtcaccttcgaggctgaactgatagagtcgaaggtgtgagccatcagagattacgtaggtaatcctaaggacttgtgttattaaatataagcgagaatgctgggttagatcggtggctgttggtgttgggaatactttaccaggatttaaatttactaaaaagtatgtcgaattaacatgctaaatatgaattc

SEQ ID NO: 312238 - DNA, 1159 bp, Cannabis indica
atcaccagtagtgtgctttgtgttcttgattctctattgttgtaagttgtaatctttgccattcaataataaaatcatcacaaccaataaagttgtttctacccaaggattaggtccaagttttatccaaaacttgtgactgaacctcattatttcttgctgtcaatttacatttctggtttatagtttctggtttaatgttctaagcttatttcttttcttgcattgtgttcttgtttgtgcttgagtgcacaacaaatggtatcagagcactagggagattagggatcagattcaagaatcctttgcaagaaaataagattgatacaagatggcttctaccagattcgaggtggacaaattcacaggcaccaatgacttcactttgtggagaattaaaatgaaagattttcttgttcatcacgggatttcagaggctttggatgatgaagctatgaaggagatagataacaagaagaagaaagctgagattgaaactaaggcacacagtgccatacttcttagtcttggagatgaagtcttgagagaagtgtcaagtgaagaaaaggctcttggattattgaacaaattggatgcaatttacatgaaaagatccctagccaataaattgtaccttaataagaagctatatactcttagaatggatgagtccaaggagcttcgaagacatcttgatgattacaacaagattattcttgatctgaataatcttggagtaaagattgaagaagaggaccaagcaattatcctacttagttcattgccaaaaatgtataaacactttgtaaacaccatcttgtatgggaaggacaacttgacaatgacagaagtcaaggttgcattgtgttcaaaagaaatttagaggaaggatgatcaagctaaaaatagtggtgatagcctgctcattgcaaagggaagatttcaaaagaaagactacaagggacacaagaattcctacagtaataacaaagacaagaatgacaagttcaaatcaaaagctacagtaggtaaacactgttattactgtaagaaagagggacattttcgtgatgattgtttagctcttaaggcaaaactgaaaagagagaaaaatcgtggaaagaatggagaagctgacatagcagatggctatgaatca

SEQ ID NO: 312239 - DNA, 558 bp, Cannabis indica
agaaaaccaaggtgatgtcctatatatctctttcctaatttcttttcatagtttctttttttcttccaatgaatctaaagatattgatagtaatttataattagagaatcaacacaatacaatagggacaccacttttgttctaactgattactgaattattcaaccaccaaaatcgagatgctacgtacgcatgcatgcacgcacatgcaattagtgtatgatttcaatttcttaagatgcaagcatcactctttttttttcttttcacataatattttcattaaattacatgtagactagtgctagaggttaccctacataatatcccataaaatatactaatataacctaataaataataaaaatggcaacattatgtatttagttgatatttgtgcaggctaagtcatgtgcatagacgggttaagcctgtgcctagagctcatcttgcctagagatctaaaaaaatattgagaaatttgactaattatgcatttattggaccaattttttttctaaacctaaactattcaatattggcagaatatgtcatttt

SEQ ID NO: 312240 - DNA, 474 bp, Cannabis indica
acttacgtaagtaaaatgagcatgatcattttcttgttacacatattaattattatggtactaaacttaattacacaaagttgattaacgtaaatagtggtataaatgcaatatttatttttagcggcatacgtatcaaatgtttgtaaaactgtaatgttctctagtttcgtcattaactaatactacatgtttctttcaagatccaataatgatctagaacctgttaggggtgttcatccaatccaatcagcactattttgctcatagtgcatccgatccgcactaagtacagattttattttttggattcaatcctatccgcacaatagctcaaatccaatccaatccaatccgcaaaaaaaaaaatttaattgtatgtataaggaaatgtttacttttatcttaaattgtatgtaaaaaaaatttatatataagaatagaatatacatttgatctattgagttttgaaat

SEQ ID NO: 312241 - DNA, 910 bp, Cannabis indica
ctggtaaaatatttccaacagcggaggcataccacttacaaagcatcgagatagccttcgtgagcacccttcatttgttatcaaagaaagattcttccgcactcaagttcttaaaggaagatgaagcgaagtatttggcaagggtacaagctttggataatgcacatatcttttggctaactcctccgaatctaattaagaggctgcttctcttaaaattgtggttgtatcttccaaaactgaacaccaactcaaaatagaccagactgaccaaactccaactcaagaccaggcacaggactagactcaactatgagattgcgacactttccacttctttatcttttttatttctttctattttgggggcctttggctcccttttgatatttacaaagacagttaaaaatgccttaatcgccaggttgtttgtaataacttgacatatcttgtaacactctaatctatagggactccacgtgtgtgattttataaactagtttaatactagtagaataattaattattaaaaatcgtgataatattaaaaacttgactaaaataaaacactaaaaacggacattataacgacataaaaagtgtgttccgggtatccctattataaaaaattttgctaaagaaatatatacgataactatttaaacataaaatcaaaatacacaacagatacagccagtccaaaacaactcctggcaactcggcatgcaggccggtgaggtcaatatgtacattgctggagaagactgccacctcatggttgatctagcttttctttgcctttacttgcaccacatagcactcatgagtcacaaggactcagcaagaaaattaataataacaatcatatagtttattatttgaatattgtcattcatacacaataagaatc

SEQ ID NO: 312242 - DNA, 886 bp, Cannabis indica
ttttttttttcttttttttatttgtatatttaaattaatttttaaataaaaaaaataataacctaaaccaataacaggctgcatgtggtcatgtgtcaggtacgtataagagttcctaaaccagagacattaatttgttgccaagttcgaacatgtccaaaactttactttcacttcaataaaaaataataataatattaataattatataggaaaatctaaaatcccaaatctaattattttttcaagtggcgaaactgctgtcttattttattttaaattattattgaatattaacaatgaagaataatgcgttgcaagtgcaagtaatatataatatttggttgaaagcgtgttgcgagcttcaaaaattatagatattagataatgttgtaggaacacctaaattgactaataatatatagttgggaagagtaatgcttcaaatcgtatctttgaaaaataaaaattaaatatataaacttttaaggatgtacgtaagagcaaatatttattttcatagagattaatacgattagactaatgattaatgttagggagttttttttttaattttcctcttgaattaatttataatacaagtaatatgtaattatatattatataaacaaagaagagagttggcgatgcttgtgttctcttctcacttagtagaagtgtttgcctttcttacggctgtttgccttcaaattttatgttgataatagtttatcattatcaaattttattaataataaaaaataaataagtattggtattttttctaatcgaaaatatgtattggtacttcactacagcaattttggttattaggggcggacctattaccgacggggaaggtccgcccctaataataaggttatta

SEQ ID NO: 312243 - DNA, 1447 bp, Cannabis indica
ttttattatatatataacaaagtatatatataaatgtatataagttttctgatggaacctaaatttatcagttttttttttacaactccagcttcaataatagtaaaacaggtcacagtgggttgacacgaacacgacacgattttttacgggtcaggttaaagttgagaaaattagacacaagtcaaaaaatgggtcgacacgcctgacatgaaatataaaagcgggtcacataaaatatgacacgaacacgacacaataacacattttgccacccctaatctatatgtagttatgctgactatgccttattcttcttgcaatgcaaccaatctccttaggatgttttaacataaaaattagcacctaagtataattcaagtaatacttctcatgttcttccattaatattgagtgaggcatacacgagacgttatcacaatatgataattgcaaggtaaatcatactggattgttgtctagtctttcaacatactcacgagtatatgggtcaatgagctgcagactctttgaataattcattatctaccctttccaaatatttgtcgatttctcgtgtattctatggatcccgagatggaccttttttgtttcttgttcattttgttggtcttatcagtcagtagttattattcatggctcatgttaattttaagaaggtgagtttgaatatttcttccaattgaactttccaaggcaagttgtctaaatgtagttattatcgtataattcgagctggttcatattccagcttcattacacgtgccagtaccatattgctactcaatatatgagtataacaatttctccctaaaagtgctttttaaaataaaaatgattttttaattacttaaagggtacgatcgtatttttctcactttaaaattgcacgctttattttggtagtttaatactttgatgtacgcatcatttcaacatttattatactgatccctcttttttcaatagttcccatttgttcaatcaactatcattacgatcgaactatttttattattagggtataacatccaatgttcctcttattctgccattaccaatcaggagacttttaaaattaaaaaaaattcaaccattttgctctctgaaattacatgccctcattatccttcacatatttcctccgagtttcgagtgatcaaacccagaattactaggggtgttcgcggtgcggggggtgcagtttttgactatttttcaaaccaacccgcacatgtggtttttcaaatttcccaaaccacacccgcaccgcgaaattaaaaacccgcaaaaatagtgcggtgcggtgcagtttttgttgtttatacagtttggactatcactaaataattaaactatcacaaatacaacaaactttgagtaaaacttatcaaaataccacaagacttgaaaataaatatgaaaa

SEQ ID NO: 312244 - DNA, 961 bp, Cannabis indica
ttatgatttgcttctttcattttacagagaaactatggacctccgagtcttaagaagtaccgtaagtgactatcatttaaattcaaaagaaaaaataaatatatcattatagcctattgtcatatatatatatatggtaataaaaagtattatatataacattttttagtttgtaattgtatatttttatttttggataaacagaatgcccaggagaatgcacaagaagatgcagccaaacacaataccataaaccttgcatgttcttctgccaaaaatgctgcaacaagtgcctatgtgttcctcctggctattatggcaacaaagctgtgtgcccctgctacaacaactggaagaccaaggaaggaggacccaagtgcccttgagccattctattatatctattttagttaaattataataattactactgttactactattgggtattagtgtttccctaattatttcaaataattagtcttaagcactaattttattggtagtttattaagatcattgggaaatgtattgattattatgtaactatcaaatcaactaatattaaatggtaacttcaaaattgttgtatatctatcttaagttctcgctatgtaatccccaagatgagacgaggccctaaatgtaaattggtaggcctcacggtgtatgggataagattgatttttgggcttgccccaaaccttttccaaactaagcccattacccagttttcttacttatatttcttagagaaatgtatacctattttattttacttatttttatttggctaattagtaatttttttccttgaactttgacatgtactaaattgtgccccctgaactttttgccgttcaaattccgctcgactattgagattgttaaatttaaggatttttgtctaatttcattcaatttactgttttagtgattgttgatgtactaaatcatgctc

SEQ ID NO: 312245 - DNA, 635 bp, Cannabis indica
ctaaatattagtgtcataacagttaaaagcgaccaacaagaaatcaatgtattattcaagaacacctaaagtaaagaagaacattccctcactctaaatgacagatatcaggttgataaacaagggaaggtcacctggctcaacacactttaatgacgataagaaggaatcttgtaccttgtctgggtttaaaatggtcaatgctaatttagctattaacttcattaaaaagatatgttgtggctcgcttcagtcaaaaggtggtactttgcttgtgatgatcaccttaaaaggttcgtgatctggaccaagttaactttttagtaaacataactcaatctatggctcactcaacaaaatttttgaggagaaatgtcttatgtcaacctgctcaactacagcatgattgtgaccatgtcaaagcagcgattgttttatgttttaaatatacaagaggttattcatattctcacctattggataagtatatgaaacatggagaatgtccatattttataaccgtagtatagattagatcaaataactattattctattcctataaatagtagtaagaacattataaaaggggagagccatcctttctaattgagaaaaattctgccaaattgtaaa

SEQ ID NO: 312246 - DNA, 617 bp, Cannabis indica
tagggcataaaacccaacacacgatttccatagttttgattgaggcctcttcctgatccagggtatcgatttggagcattggttctagatccaggttgagcttttgtttttcctttattttaggtttgtttttagttgtttgataattgatgttatgtctaagttttctaatgaaaaagttaatattttttcgaattataatttagtgttgaattttagttcatcgagttcttgggtttgagaatttttatattttacttttatatgcattgatttctttgcactgattttttttattggaattttttttaagtttcattattatgtttccatattgaattaaaccccataataatgcttaaatgggtctttgattttgttatgagccattgtcacttaatttttctctatttttgaagctatgttagggtacttgagtgtcatgagatagatttagagctagtttggcacagttgtgttgtagcctgtaggaaaagaaagttgtagctgtactgtgagaaaaaacagctgcagaagaactgtggaaaaaagcggagctgagtgtttggtaaattataagttttaaagtattgtgagttgttatgatgtattataat

SEQ ID NO: 312247 - DNA, 1087 bp, Cannabis indica
gagagagagagagatagacgaagagagagagatggggaagagagagatggggctgagttatgagagcggtagtattgggttttagataaaattgtcacatattttcaattttcacatgtattcaattagggaaaaaattatcccccaattaatgcatagatattcaaatttcccgttgtaaattcgtgcgcgtcgtattggctcggcccatattttttgtgcttttcaaaatatgggttgtgatgtgttatgccctatatgggtcttactgtaccgcgccaccattttcaaagggtaggcttgatattttaatgtcgtgctctgctcggattcgtcccgtgctttatttgtatcagtccacttttcttaaacggattagctcgttttcatatcagggctcgaatttacgttttacttttgcattttttttttacaattaataagttaattactaaactataagtatattttatagtttcaattatatttatgtaatccttcaataatattttaagcagtcatataaaaaaataattaaaattattagaatttaaatatttacctataaaatcttaaatttttatatctcactctataaataaattaatatatagttttagttttacattttttaataattttttttttgaaaatttaataattttaaattataatattcagtgttatatttaaattttattattattttatcattgacaaatacatatattattattaaatttatagggtttttttgtcgtgcttaatcacatattttctatgtcgtctcgtgccaatttataggccgtgtcatatcgtgcctaagcccatattttttcatatctagtcgtgctcgtatcttccaggctcatgccaatttcgtgttatgtcaaaaagctcgtcccatatttaaaacactagatgtgttagttagcctaggggtgttcatcaaatctaatctgcactattttgctcatagtgtatcttatccgcactaagtgtggatttcataatattgctaactatttttatgttatataacagcacgcttttcttcaaaaaaaaagtgtggatttcatattttgga

SEQ ID NO: 312248 - DNA, 1388 bp, Cannabis indica
ttatttaattaaagataatttgaattcagctattcagtaatttatttaaatttaaaatttaaataaataattatttatcttattttataatgttaaaaaaattatatattgtttacatcaaaagtaatcctaatggcgtggacatcaatatttgacacgtggcaagaaggaaaatattcacgaagtgaaggaactcgagtcatagcaatcaccttaggaaagggtccctagctctggacctaggttgacttcgaggctccgaaatgggtaattggatcttgccaaattgtttccaagctaccatcctttagtattcagagtaatgaagacatgaaaaatccaagtccaaggcccaaaaactaaaaatacacgaaattccacctcgagagtcaacctgtgcgcctaggatttcacctagcgccaaggttgacattctaactagggtttcaatttttaggaccgtcttagtgtaaatggattaaaatttgtactgaaacatgaattagatatgtcacaaacatttttgaggcatcagaatcagattcaaagtacttttattttttagcacccggagcactaggtgccctaggcacctaacgcatggttgacattttgtcaacctagggcacttccaagcatcaaactgaagaactatcctgagaaatttctttgtattcatcaaaaatgaagaaaaaagtgcttttgggggaagaaacagaccaactttgaggccagaaaagggtcccaacacttaggttgacacttggtgctggcctagtgcctaggttgacatgttgtcaacctgggtcgtttccaaagagttttttaaagaagtattccaggaatattctttgtttttgtcaaatattaagatacaagtgtttttaggaatcaaacaaaaccatctggtggcctaaaattggactcaccgtctaggtgaacacctgggggtgggcctagtgccctggttgacattttgtaaacatggcttgttttcaatcatattttcaaaaaagtgttctaggcatattttctttcatcagaaataaagaagatacaagtgaactcagtaagaaaatgagaatctaggtggcatgaaagttgagcccaacacccaagttgacaattaacttggtgcgctggttttgatcatctaaatgcaaattctactctaagcattctattcagcatggttaaaaatggggtaagagacctcgtcctcgattttgagaaccttggaagtatcaaaatgacttcttggaagctctagaaagagcacgcaacgcccaagttaacatgtgacctggtgcattgagttctgctaatccaattctaattttggcttgagcgttcatcaagttttttataataaacgagagctatgaact

SEQ ID NO: 312249 - DNA, 1587 bp, Cannabis indica
ttttttataataaacgagagctatgaactaaaaaaattcaaatttaaaacttcatattttcacttttttggtaaagtgactaagtcacaaatcgagtagttttgtgtctcccaattccgcaaaacagcaacatttctaagaactggtgaaaaagttcatcaaaacaaataaattgactaagtgatgtcaaaatatcacttaggtatcaaaaaaatacatccccaacatgttttcccactcacccaatgtccaggttgacgtcatatgtcaacttgggcattggatgtggagctgtgttatcaatttgggtgctggtataagagcagcctttagtaaaacgttcataactcacttaatattgatctgattgatgcaatttaacttacatttcaaagctatttctactacaactttcccaaagtgggtcccttggacgcaaatcaagatctggaaattgacggctgaccttcagagttaatttcaccattaggtcatcatcaacagtcaaaaatggcttaaatttatttattcatatttgtttcatatttaattattattttaatatgacctccttccctataaaggagagttcatttagttcattttttacattcagaaatgtatccataaggtcagagcatctctctttagtttttctttctagaaattagagttttcacactttgtcaattctcttaataaataaaaagtcaaagtagacgtagctccattactatcgcaagatagggagtgaactactataaattttgtgtctctctatttactcaactcatttcttgtttcatcttaccaatctaacaagctggtgttggctattttttaacgtcatattttggtgctttcattgagaaccacaactcgagtttcccaactacattttgatttctctactaagaaatttattctgaaagaaattcataagtgtaagcaagcaatcatttatgaatatgcaaagccacactaccactcctggtagtcgtgccactactcaacaagcaggaagcgctgagattctctataaggaagggaactacgagtgagcgtaaaaaagaactcagactcgtgaatgtggatctatgggtcctctgcctgatatggagcagtcacctgctaggggaacaagctacgagtgagcataaaaaggactcagactcgaaattgtagacctagaggtccaccacacgtagctgataggaccaaccgcaattctgctcaaagcagttcgaacaatgcaggaaatcaatctccaccatggaattctcttcacatgtataatgactctaggccaccctattattggaagttattttaccaggatctagatttactaacatgtatgtttgattatattctataatctcacatcctaaacataaatttcctaaaacaataaattaaacacatataaagttatagaaaccttacatttgtggcggcgaaatattatggatccttccgtttagatctctaacccttgttccattctatcgtagagtattgccaagatctaaacctggatcttctctattgatggaattcttcacaatcttccatactatgattgag

SEQ ID NO: 312250 - DNA, 1032 bp, Cannabis indica
tttttttggtaaattagtatgtatatattcacatcaaaaactcaattacaaactagagcgcaactaaaaaagaaactattaattacaagcttttataaattcccactaaattttgatctactctattgaaactttatatattcataaattgtaatctaaaacaaattgaataaataatatttttcacaactacatgaattgctggaagtttttactcccacaatattgtattcctactttttcaaacaaaataaaccattgtagtgataatgcaaaagaaaaccttccttctacctttcaagattttccttttctaaagcatatgaagcatttttttaggtcacttccattatagttcagcccacaccattcagtaagatggcccaaaactttcttgctataacaacacccaaaagaaaaagatgattcatgtctttttttgcatctccacacagtagataatcgtcattttgaagcaacccaaagtggtgcaacgaatctctagatgtagtctctcaagaagagataaccacataataattctatgtttttggatgaccaatgatgaatataagttttccatagcggctggaatacgccctgggagtagactatggaggaatatgttgaaaagggaattagatggcattgaagaattttacaagagggtggaaaaatatatctgtgtcaaggaaggaaataaagtcttggagacgaacaaaagcaagtgtacttctgaaacctcgccaaacccctacatggtctatcagacaatacccttaatgctcataagctgatacatccaagtgaagtctccactatacaacccataaaaaataaatatccgaggtattcgtctaagtaaagccccactatgtgagaagaagctcctagcgataaccaattcgcttttagtgtgctgcagtaaattaaagaaggcactcatgtgggccttcgagtcaaagtgagtgacgctacactcttggggggcacaaaaaaaaaaataagagagagagggaaatttttaaaatt

SEQ ID NO: 312251 - DNA, 1920 bp, Cannabis indica
ctctgtaacactactagctgcatctgtaccagtacatcatcaagtatcaggatattgtacaattactttctggtaaattttttcgtttaaatttagaccccaaagtccattgtttagcttagtgattcagattggttggttccaatattcaattaaattataattagtgctagcttaattatggcctagctacataagatatgtaaataaaatagcaaagataatctttcattggtacttgtatacttaattctagattctatgagtactcatattcctttgattacaatcatgtaaaagtgattggctatcttataaaataaatataagatggataaaatatatttctgaaaaacaaacaaaaataaaaggttggcaactccaattatgaatttcaaaggctgcccaagtggagtatcatggcggtgcttagtctactatattggctaaacttgtatttaagaaacactcaaaataatgttttacacaacccattcatcaagagaaactgagccaactcatctctttataatttcctttacagaaaaatggtgaagttgactttgggtagctttggtgactgtttcagcactacttctctcaaggcctatcttgctgagtttaatgccacctttatttttgtctttgctggtgtttgggtaaggagtactaattaattcttataaggttttagggtaaccctatatgttcatgggcaaacaaccctactactcattcatgatgtgttttaattttctttttttaacttcaaaagtagtgatggcagaggtgggactccatttcaccacctgcccacaccagtttgaagtgttggttattgttcacttttgttaaagcaattttggcttttcaaagttggttgttgttggcttttgttgagctgaggtacacccttttggtcctatgtttgaattgtatttggagaattaaaaatgtatattttcaattgctatcaatagagtgctagttttatatcttttgtttcttcatatatctcaattcaagatatttaaaaaaaaaaaaaaaaacagttaaagtcaattgttgcaaagggttacaaatttagtttatttttttagaacaatatgaacaagatttaacaaaatccagttactgggatgtgactagtaattgaataaatacaaaataaactcttgtagtctcatttgaaagtcaaagtgtgaaccaatctctgtaatgttgattttgcatcagaaatcagaagtcaaaggttatgtgttcgatatttgtcaagaataattttcttaacatctgtgttatggaaaaatatagtatagctataacatgagagacttgaattgtacaatggttaatattattagatctatcacatctaattagctcactaaaataacttatgtagcatttcttcagtcaacttttaaggttttggaacacagcacgggtcttgtggaagctttaaccacggcaattgcaacagctttaacaatttgaagaagaagtagtagggaaacaacataccagctgagaataagagagaaaggggacgaagaagagctgttgggttcgctgctgggtttgcacgccaaagagagaggaaggcgacgatgaatagggctagaagtgttactgtgactgcagggaagggacgacgtgcggtgctggtctcgccggtcgtctggaagatgcgtgggacgacgttaatggacgaagaagaagatgtgagattaggttttgttttgggttttttttggcgggccgatttgtttaatttgggctatttacaaaagtatgggaaaatgaagatatgttttgatatatatggtataaaaacttaattgtcctaaatatgacattttttttagaaaaacttacaaatatggaaaaagatcaggagtaatgccataaaaaacttta

SEQ ID NO: 312252 - DNA, 1686 bp, Cannabis indica
tggatgaaaggagtcaattgtaacatacagttcgcgagccgattcttaatcattggtgaaatctcttctgatcctcgtggctgccactagaagctttttggtacatatgggccgccgcacagtagtgataaagaagaattctggactaaaacaggggaactagccatgagtgcgggtacaccaatcttactttgtggggatatgaatgggacattgaaggatttggaatgcttcaactatgttagacgaagcaattcgtccagaaatgcattcgatttccgtcgaatggttcatagagttggattggtagatcttggctacttgggtcctggtttcacttggatcaaaggtggaaatggcagccaaatgggaggagcagttaaaaaggcaaggcttgatcatgggctggcttcgccggatcggtttattctctttcccaatgcaatcataactcacctttccgccattggctctgaccacagacctctcctacttgataccacagctggcgcaaattgtagagcacgttccttcaagtacgagaatatgtgggtaagagacccacgatgtttttgggtggttaaagaagcctgggctagtcaacgccaccacaacccaacaggaaactaaaagctacccgtgacaagcttaagtcatggaataaactccaattcaaggaagttaagaaacaagtccaagctgcaaacgattttttgcaaaagattgaactggaagatccgattaatggaactgcgatagaacaagcaaaaatgcagcttaacaaagcccttcttagggaagaaatacattggaaacaaaagtcaagggtgaaatggctacaagagggggacatgtgctctaaattctttatgtcctcaaccatagttcttcgtcggaggaactatgttcaatgcatcaaagactccccggatggggattggattagagaccagcagcaaatagccaattgcttcctcgatgagttcagagaaggctttaggaacccaagaaatggacctgcctcaattcctacggacctattccaaagagtaatcactatggaggaggggaatatgctatgctctattccttccgtaactgagatggaagaggcattctcagaaatggggaaagataaagccccgggttcagacggattcccaccgagcttctacaatcaccattggaccacggtccaatctgatcttttccaagtgatctctcattttttcaaccataaggaattgccgagctacatcaatgatacttccattgtcgtcatcccaaagaaggattcctcctctcttctcacggattatcggccaattgctttgtgcaacacaacttacaaggtaatatcaaagattattgccactcgattgcgcccttttcttcaaaggattatctcacccaatcaagcagcctttgttaaagggcgacacattgctgagaacactatgattgctcgggaaattgttcactctatgaagaagaggaaaggaaaagggggatacatgctcatcaaaatcgacttggagaaggcctgtgatagaatgggctgggagtttgtcatcaaagttctcggtctgttgggcttcccaaacacgttcatggagtggattaagacctgcaattcggtatcaaaaattaaagtctgctcaatgggtccatcgtgggaaaattttc

SEQ ID NO: 312253 - DNA, 584 bp, Cannabis indica
taaatcatacacaatatttttaaaaaaagcacagtaattttgaaaaaaattccgccccacaataaaaaaataaataaaaatttcagtacgtaatgtaaaaaccttttttttttatttcttttctctacttcatttaaatattaaatttttaacaatattttattaattgataaaatgtaataatattacacattacataaaaaagttaaataatgataatatatttttagcctaacaaataattatttctatatttagctaagcactatatacaaaagcattcattgttgtcatgcacacacttctcaattttgaatgtttacacctctttatctatttcaactctccatttgatattactgagaactaatatcaatccaaccaagtatttgagtcacaatttctttacagtaatggcatttgaaaaatagatgagtaagattcactctctttctcagatcaagtaatgatcctataatgctttaatgaaaggaacactaccacttgttacgattacaatgcactactagagaaagggcctttattttcggtttttaggccagtttatcttcggattttattaa

SEQ ID NO: 312254 - DNA, 2450 bp, Cannabis indica
tttttagttgtttttttttttaaaaaaaataagacgttcaatagataaagaaaattagacctcgtcattacaatggatagaaacaagtatggaggatgacttcataacacctgtaaagttctgggcgaaagcacatctagtcacattatggacagcaaaattacaaatacgggacataaaagaaaagttacaagaaagaaaataattagagagttgattacacaaagatacataattatcaacattccaaatgtagtgcattcccttcaacgctttgataaccacatctgaatcactctccactaagacatagtcatgcctcctgagcctcgccgtgtccaacgcaagatgacgcgccgccgcctcaccaatcagagggtcactgaagttaagacaggatgtagcagcccacacaactgcttttgagtgatccctggccagggccgcaatgcacatggagtttccaccaactttaacattacagttgattttgatccagtcctccggtggaggtgtccaagtaggcgtaaccataggaagaaccggggggaacaggtaggagacataatctgtataacaatgggacatagagttaattatattcacaatattaccctgaatcgagttatgtaccttatgattgtggattttccaaatcatgtccacgcgattgaagcataaagaaacagtttttctgcatcatccccatttaactttaagttccaaaggaatttaacctaatcccaaaccctaccaccagaaccgtttaacgggtataccccccaaggggaggacctccagatgtggtaggcaaaattgcaatagaggaaaaggtggtcaatggactccgcctcctccccacacaacgggcaagtctcgtcatcaatatggattctcctagccagggtattttggaccggcagagcattagagaggatactccaccaaaggattttgtgctctcaagaactttagaatttcaatgtttgttccataaggccggagccaccacacaggtaggggctctatcatacacctgtatcagataagcagacttggtagtgaatttacagcaaccctctttagtccaaatctacttatctctcccctgaccgtaggtctacccccttttaggatgttcgtaatcgtggcaaagtcgaacatagaccttagcaaggagatgtcccagtccccattactcaacaacagctccgaaaccttctctacgctcctaggataggaagagatgggtttcgggtagtaaaaaaccgtaccatgaaccacccagggatccgaccaaacgttcgtgtcttacccatttgagatgagttttcaagcgccttttctgaggatagctttagtcttgaccacatttttccaaaaccaagaatcagcattattataggtagcatccaaaaaaagtttacttttcaagtatttggctctcaacaccctgcatcaaactgactgatcctcgataagaagggcccatccccatttttccaagaaagcctggtttaattctgaagcctttcagaatcgaagaccacctctcgctttaggaaggcacatgtggtcccacgcctttaggtaaaggccacggttaccctgctcacagccccaccaaaaatacctcaccataccgtcaatttttgaaggaagtttctcagagagcttagtagtttgcatggtgtaaacaggcagagccagacccatagactttataagtgtggcccgacctgctttagagagcaattttaacttccatccatgtaactttgacacaaggctgtctacgatgaagttgaagtccacatccttacggttagatctaaaaagcgggagccccaagtaattgatattcgtggtagttaggttgagtcacaactcctgcatgatatcccttttcattatgtcaccttgtattattgctaaagaatattgaggttttgagcttattaacacgttggcctgacaagttacaaaatttctcaatgcaactccaaacacctttggcttcagcaatcgtcgctctacccacaagaataagatcatcagcaaagaaaatgtgagataaagtaggcccatctctactcagcctgatggctttaatagttccttcctcaattgccttttccaagattcgagaaagaatgtcagcagcccaaataaaaagatacggggatagggggtcaccttgtcgtaacccacactcaggagtaagactgctaacccttcctccattaagatggatattaaaagtagtagtagtaatacactgggaaacccatttccaaaataaattaggaaccttgaagctattgaggacatgatcaataaaaccccagctaagtttcatatgctttcaccagatcaattttgattgcgaagaggccttctctacccttcttgcgtttgaaagagtgaatgattttctggaccaaaacatt

SEQ ID NO: 312255 - DNA, 1066 bp, Cannabis indica
ttatttttctttggtgaaagatggtaagaagttgagataaaataattacaacaaaaattggatgctttttgctaaatatcacacatttttgtttgttgttaaatgttagaagttgctatatttggataccaaattagatgataattagttattaagagcaactccaatccaatccatggtggcaagtatcaacctcgtaaagctcaacttaaagcactcttcttaattaatatttgatcactttgtattaaatgtatttattattgtattattgattatgattatgatgtagaattgggaaatttaatgtcaattaaatttaatgtagggcaatggaatattattaagtgcgcaacataatcaagcttagcaatgatggaaaccctatgccacacggttggtggcctatataaaacataataatgtattatatgcatattcattatgatgagtaatttgtttattaattaaccactattttcattgcctttgcatgctaacattaaatacaaataaaagagttaattttatagtggggtcactttaattttttaaaatagaacacatttaaattacagacactttttacacatcattgtgtgtgataagtgcgagcaatctgagtttgtatcttttacttttataagtagagcatcaaaatttgagtattgttattggacattagtggtgcttagcaccttctttaggtggcgccccacaattagttagcgatcttttctaaaagttattttcttaaattacacgggatccgatacttaattatatcaatagtcaataacagtatcagtatgacacacacaaaaaaaaaatacttttagcaattctttaaaattttaggtggtgtttggttggaggttatgaaatggaatggaaagaaaaggaaacaatctccattccattcctttgtttggttgcatattaaaatgttggaatgtcattccaatagaatgatcttttcaccattttggtagaatgacaattctattttgaaatggaaggaaaaaccattctaatgcatgttgagaaaaatttaataattttatta

SEQ ID NO: 312256 - DNA, 1317 bp, Cannabis indica
atcatagtgtgtaagactgtgaagaatccaaacaacaagaaggagaatcagcatcaaaggaaggagagaaagagatccagattcagatcttgataatgctctactattgttttagaattcatattatgatgtcaatgaaacatacttggtagtaaatctatatcctagtaaaatatttccaacagtatatgcctccaagggcgtcacaagaccctagccgaggtcaaaagagggagaagaactggctgcccacttggagccttggccttggccgaccagaccccaatacctaatttagtggttagctaggaaccctaattccaagcataggtcggctagcctaagggtacaacccctttggccggctagacccctcgacagccacttatggctgaccaggcctcaaacaaggccttttggctggctagggtctgcatggatcagaacttgtgtcttttcaagaactcaaacatgttctttggtgttctttttgttctttgtgactcaaagagccaagaatcacatcaaaggtcagattcagatccttttcatttagaaatcacatattacgtatcctaaggctatcttgcgaatcaaaataccgaaaggataacaatctaacatacgattcaaaccatgttcaaagcaagaaatagttttcatgcatccatggctaaattaaccaaatcaagtgaagatattgggaatagaaagcttacccactacaatatttcattgaagaagaaggtgggaatctcagatcgtcgaaatggcataaaaatcctgggaaaatgaagcttttgggtttcagccctttagagagaaggaagagctttttctaaagcaattttctagtaagagaaagtgaaaagtaaaaaaggttttccctccaaaaaagcacttatgtaatgcatgtggggcccattcttcacttacttcactacacatcataaagacaactaaaacagttatttctctactgcattgagatcagacagtcaagacaaagtgtttcaaaaggctaaaagtgcatcaactttcattcagcaaaggctacaacagtctcgaccacatcaacatagctggtaaagtccctatccgtacatacgtccgcacagggacttggggggcaaatgttatcccaatttttattctcctaacgtggcatgcttacatggaaaaaattaatgtcatgtggtagtacaactcaccaatagaaagtccaagtcaacacttaagcaaactgaaatcccagcactaaaacgagcatcaagtgacagaccagctctctctcaggagctggtcgaccacccctgg

SEQ ID NO: 312257 - DNA, 834 bp, Cannabis indica
atatcaatttaaattattataatgcttaaactgtagctttaatttaaaacactaaaactcaaatattaaaaacacaaacaataaaatttaaactcagaacttaacacacacatcaaaataaaaattaaaccataaatgagtatttatgttattttttagcaataaatttaatattttaagtatttatgtcacaaattttttaataataaaattaaactatcaatataattttattaagtaattattattaattaaaatacacaatttatttttttatatataatttaaaatattttatatatccgccgcaaagtgcgggatgtttactagtttttaatatataatttaatatggcttacaaattaaaacaatttctttaagctaatattctaaattaagctaaataagtgatttaattaaatgagtttaataaacattttatttggtatgggcgttgtaacgtgtaatactcaatagtaaacttaattatagggtttatggggctctaatattaaggattggtctataagactaatctcaattactcctttcttccattccgtatgaacttataaagagaatattagtatatgaaaaactatatctaatattatgtctttcattttattaatttatacagagtaactttgataatgtttaatatctatgtgtattttgtttagatctatttctaacacagcgtacatagccaagtcgtaaagagtaggcggcatgtatataatttttttaggaataattatataaggtacaattttttgtaaaatatttttacgtttaattttttatattattacgattttctaaaaaaataac

SEQ ID NO: 312258 - DNA, 1070 bp, Cannabis indica
tgacatccaagtcgagtgtcgaagcatacataaaaactcaatccaatgcacaaccttttggcaaagattacggataacagaaactgcttcacacgcatcttagcatcttctggcaactcaaaactataagcaagaaaatataatgtacaaacaaatgcttatgcaatttaagcttacgaaataacaataataaagaggattaatgtgcctagagattccaagagatagatttacacccacttactttgtacaacaacacatggggtataacacactgatgaaaattgtttgattgtaaataggataatatacaattagcatggtgtatgtatatatatgaataatacatttacaaagacttgaaaccttgaccactcacacaatcacctgcccaaccccttgagttagccttaagtatacagttcacatgtcttaagaaaataagcacaagactgggaagcttaatgaattctctcaataaacaagtctctttaaggacacttcgacaggaaaaagatgaacatcccccatcacaagatgtggttatatgaaaaaatctctcttttcttttttttgttatcgtaggcgtccagccctggtgcattggtgcagcactctgccccaggagccccaaatattgacactatctaggggaccacacatcccaagtacaccaagcaaaccccttgacgttactaaacaatctcagattattgtagttgatacctgatatttgagcttcgcaaattctttaatatccgaccacaaagtttcagagcacacattcatatacaaagattgattttttcttccagatgctccacctttccattttccatgccccttggaaacttttccaaaagattgactacctacttggtcctgtacatagttgaaaatgttctaaattctctaaaaaaaaattatacacttttcactaagatcattggggatatgaattttataataaaaataaataaaaaattatgtagtaaaccactaatacagtttcccagtagaacaaaaagtatacatttttttgtttgagtgtatcattaaataagctcttg

SEQ ID NO: 312259 - DNA, 623 bp, Cannabis indica
gcttaaaataactaataaggatgctcaataaaataatataacatagagatgaaaaatacctccaacaatggaattcttctagtagctagttattcatgatagttgtaatggtggtccatgtaattccaccaagagaaaaattactataataaacgcgtaacattaaaattaaagttcaaattattgactcgtacgtgttttagaactattcgaacttacttatgtggtgttaggtagaaatgattgcatacatatagtactctctttttaaatttttttttctccaatagctatggactcacatatttagataaaaatttattatttcaatttttttttttattgaatcacgaatttcattgcataataactttttatgttacaccctatggctcttcaaacagtaaataactatacatcttactataaaaaacaagcaaactcttattgttagacattttattacaatggaagaaaatcaagatatatacaactcaattgtaaaattaatacaaggatataataaaaaaattaattaaatatatgttacagcacatatatacactatatatattgcatatatatatatatatgaaagatatagaagagaagattaatagaat

SEQ ID NO: 312260 - DNA, 2294 bp, Cannabis indica
gttactgtgatgtgcgatgccgcatattcccagccattttcaacataacctagaaagattcaactcttaggccaagttctgcacaattctcgtcctagacacttgtaccatcacagtttgaagaccttgtggaagtcaaaaaaagacaaggcaaacctctaaaggattacatctagaggtttatggctgagggtactaaagtcaaaggccttataaaagaaggctgatatgcggccatattggggtttaaatttcacttatgtgaattctggaaagatatttggaggatctctaccaataacatgaaggagttccttgatagagttgatggctttatcaaactttaggaagccatacaaaaagcccaggcgggcttgttaacaacagacagtcacgaggtatcgagcagcctcatgaatcattaggtgcataggcagacacaagtaattatgcttagacttctagtggcaaaaacactataaacaggcgtgacaccaacaacacttgaaagaacaatggaaaaaaggagaagtccaacacttctcccacaccatagaagaataaggaggagaagtacacctgcttcacccttctaacaaagaagcctgaggccatcttcatggctactcacggaacaatcccataccgaaagccctttcctatcaggaaagagaagggcaagaaagacacgttgaagttctaccagtatcacaaccacattagcctcaagagggagattgaatacctaataaggtgtaacaatcctcatctgtgccgttatgtacaagacgaccagacccaggcacaaggaggccaaaatagagtattgatgccactgtctgtggtaggacacccaggggtcatcattggtggaccccacattacagggagaccagcaaagctagggagcgctatgcttagaaactccatcacgagcctaaaagcgaagtcctagctattgaagattggagctctaagcaacaaaaggctgaagagtccacgatctccttcaccaaagaagatgttgcttgggtcagtttctcgcacaataaccccttggtcattactgtacgaattgggaatatgatcgtggcaagatgtatggtgcactacaaattcttctccaacattcttttcaaatcaacatatgaaaaatggggctttaactcactgacctggagccttgcagccatgggatgtatggattttttggccaaggcatcgcacctgtcgggtgtatcagattaccccttggagaaaatccaaccactagaacaatgatggtgcagttcgtcatgatccagattccctcatcttttaacgtcatgataggccaactggccctcaacgtcttgaaggcggtggtggcatctatctaccacctatgcctcaaatctcgaacaaggcatggggtggtatgtgtgaggggcaccaacagtctgcccatcactgctacaacttggccctgtcaaaggccaaaaaagagaagatgcctgccaaaagtctagagaatgagcctagcaaggggcaatgaagtctagcccaaggtggggacaaagacatagatcctcactctggggatcctacacgaagctttgaacctgtagaagatttggaagaagtggaggttgatcccactttcccaacaagaagactgaagatcggtaaaggtttggttctcaaaatcaaatcaatattgatagaatttctaagggcaaacttggaccatttcacatggtcacatggagatatggtcggcatcgatcccttcgtgatcacccatgaactcaacatcaatccaagaatctggtctatttagcaaaaaaggtggttgctaaacaaggagcgcaccccaagcactcaaagatgaggtcaaaaggctgagagtcaatgacttcataatagaggcattctaccctcaatgggaatccaaccaagtatggtgccaaaacctaacatgaagtggagagtatgcatcgacttcactaaccagaacaaagcatgtccaaaagactgcttttctctacccaaaattgaccagatagtagacgccacaactggccatgaaatcctgagtttcatgaacacgtattcaggttacaatcagatgaaaatgcatccaagctcttttgggcatgaagtcggccacaactgtcaaggaagtacaaagcctaataggttgtattgttgcattaagcctaaccgatgccataggtgcactcattacacgacatgtgtgaacctatggtgtcggttaatacctaataaccgacgccatagggttatataaaaga

SEQ ID NO: 312261 - DNA, 1032 bp, Cannabis indica
cagctaaacccaaaaagcttctattcctctttggattcgtttacatgatctaggtctccaatactggggaaacaaaagccttaatgctttagttagtactgttgggaaccaatcatggtagaccaacatactaaagatcgtactagggttcaatttgctcgaatccttgtagagatggatatctcagatgatcccctaaaatccctgtaatatgtcaatgagtttgggcagcttatggaacaatctattgactatgagtggctacctgttaaatgtaaaaattgtactgggtttggccatattacagctgattgtcgaaaggatactctgaagaaaaaagccttgaatcctaacaaacaacaacctaatctgcaacaagttgcagcaactaaattaggggaagttcagatggatgcgagttctaaggagccttcccaggttcctaaaagtgttgatattaacatagacaaatcttggcagaccccaaagaagactgaacaggggaaagtgattggtaagtagagctctaatctagttgaagttcaagctggaataattttagtgccctgtaggaacaaaatgatggtgaggttttagatctggttcaagaagattagaacaaaaaagtttaggttttatctcatttaccttatggatagttgcaatatttctagttcgaatgttagatgtattaataataaagataagcaagatgtcgttgctcaattttgccaagttaataagataggagtagaagctttgttggaaattaagcttaaaggaaataagatcaaagagatgtttgattctaaaatgtcaaattggaactactatactagtgacacgattgaaggtagattattgatatactggaggaagaactatgctagagtgatagtcactactgaatcccccaagtttgtgttgggaatattaaaccaggatctaaatttactagcaagtatgttggttaacatcctaaatatgaattctctaaaacaatgaaataagcacataagggtttaagaaaac

SEQ ID NO: 312262 - DNA, 1457 bp, Cannabis indica
attattttctccaattttcatacttttaatgaaaatttggtataattatattgaataattatatactaaaaataattttaattatttaattaatctaataattatttaatatgatttagtattttatttttattttcttttcttatatacatattttattttttgtactgcctataatgctacttcataatatatttttaatgtaattttttttatattgttgtaaataataataaaaaaaatatacgaatacatgataaatgattttttttatcatcaatttttaaattctcttttaaattagatatttaataaatttattcatgattcagcataaaatttgattaatgactttaatttgttttattattaatttttaatcaattaaagaatgacaaatactcaaacttctaaagataaaaaattatacaacaaatagaatagttcaaaatatatgaaacacaaggacaattagataattttaatgtataaaaattattttaaattcttgttacaaattgttataaaatttgagtttattttatgataagatttttatttattttaaatattattaatagataaatttattttaaatattttttttactaaaatgataataattattatattaaatattacacaatattaacttactatataattatcatctgtcttgcccaacatgacaatagaaattcacatgtaattaccattttacatctaaacacaaattgtattttaaaatatatacaatgtaattactatacggtataattactaccttatagtaattacactacataataattatacaattgcttccaaacacaccctaaatgaatattttgaaactaatatttttctttacaaaagaagttatatttatatattttttctttctgggagctatatccctaattacttttatttaaatacttataaataatggataattataaaataatatatatggatgtctaaatattttctattaattaccattaattgtaatttctatttctctccgtttttaatctatgattttcatatatttgtataaatagaagatcactccattaatataaatcactaagaaaattctcttcttcactttgcattctttctacatctacatttacttcttcttatttttcttttctattttatattattcataatatttttataacatgttattagcttgagtctctgcctaaagtaaataaatttttgttaaaattcttgagttattttgagttcacaataaattaaatatatatataattgggtgcactcttaatgggtattacccataaatgggtaatatttaattaaaaaaatatatcatttttacattatataggctgagattggtccatcagctgaaaaaaaaaataatgaaaaaagtttttcgacaaaaaagtgataaaaaaagttaaatttgacttaaatat

SEQ ID NO: 312263 - DNA, 628 bp, Cannabis indica
aaacaagtcgccagaaaaagtttgccggcaaaatcctcatagttttgccagcaagtttactcgctggcaaaagttatttttcttgtagtgtttatacggagctttactttgatggttcgataataatccatgtttctagtgtatattgtttcgcaggagtccaatgagtgatgttgggaatttgggtaaaaatttgtactttaccaggttgtcacctaggatcacgaagatggatctcgacaagcagtttgcattggaagggacggtatgaatgattgcttgagtttactttttctttttctagttatagaatttggtatcataatactattcttgcattgttttatttatgtttttcaggtggtgggtgtgcatcttgtgattgatccatggacaagagaattgttacactatgaaatagtgtaggggcttattagtaatttctaaagagtgtgtatcactataaatatgtaactgtgtggctattatgggatatgaaatgagtaaatagaactttggttcatttgggagattggcattgtctcgaagagtgcatttcgtagatttgtcctgtctcgaagaggactattatctaacaattggtgctttcattgagagcaattacagt

SEQ ID NO: 312264 - DNA, 1180 bp, Cannabis indica
aaagcggtcttcgatcaccactcaaaaccatgattcttgccgaaccaagaaccatcgtcgactgcccacccgaaaccacgagcaatggcaaaacgacgagatctccatgatgagtttcaaaatatcgtccacctacacagatcagaaagaagagagagagagagaataaaatagccaaataagaaaatacaccttaaaccagcaataaggacgtcggagagggaggcccttgggtcgatgatggcagggaggcccttcggaggtggttcgttgatgtcttagaggttgttcgacatcctcaaggttttggaggctcgttgctttgtcgtcttggaggtggatcttgtgtggtggttttagaaacgaagatagggagaagaagaacggctgggtttctttttgctaagtgatagggtttctaaatgctaagtttaagagagagaaaaaaagaaataggatttgtggggagaaagaaatgggaaacgttattattaaaaaattaaaataaatttcctttttattgtttttctttaatgtttttcttttattgttttatgaattcaattaaattctgccactttttttttaaattaaaaatctgctaccttttaatactttattttatcatattttttaatttagggttatgatatagtgacgcgctaagtgtgtgaggacacatatacccactcacgcctagcgcgtcactgtaggccagtaattttcaaattaataaaaattaaaaaattttgagttttaccttttagtgacactccataatatttagtgacccacattgcaagagactaacacagaatatttagagtctatttgtgtttgtcactaaaaatactcctaactctttagtgacacacactttttatgtgggtcactaaatagtgtcactaaaagtctaatttgtagtagtgaatttttatcaagagtcaatttccaccattaggtcatcatcaatggccaagatcaatccaaaatgatcttttcatattttttgtattattttattaatataataagacatccttccctataaaaggagagctcatctagtttatttttttatacattcttttagagcatctgtctctagaaatctgaactcttgccttagccagttttcttttaattctcgtaaaaactcaaagtagacataaatctatta

SEQ ID NO: 312265 - DNA, 2360 bp, Cannabis indica
ctgagtctgtcgactcacagttttgctttcatgtgtaggtaaaggaaaagcgaaagctgaacaggagtgaacctgagctcggatgaggttgtacatgtcaaagcagcgcgacctggagtgttcgatctcgggacatctggggttatattatgtcaaagcagctggataatatgtattttggaatattaagtttaaaaagtttgaaaacgggatccctgaacttgtaaatagttttgtatattgtaaagtttattaattaatataaaaattttaatttgacacgtttttcaaaaaaaattatttgattagcaaagacaacactataattgacaaagcactgtaacgtgccttagcattagggcgttacaatacataaaagtgtagaaaaacaaaataaaaagaccaagttgcgtgacaaaatagataaccaacttttagtatgcaaccatctttataaagatgttatggatggattatagattatagatttctatcaaaatctcttacaaaaacatatatagactaaaccactattaaaattaaatttttaagaagaatgtaacaagtttaagtatttaaaaaaaaaataaatagaatttttacatcttgaacttttttttttttgatgaaaagcgtacttatataataatgaaacgtagtcagacctcgcggtcattataaaacaggtgttctgggataaaagaaatcgggatacaattgaacctctggtgggtaaacactcacttagccacattatgggtaataaaattacagttcctactaattttagaaaaatacaactaacaaaataaggagaggatttaatacaaaatgagacatagttctcaatctctcatcgggtaacttccctattgagagcattaatcactaccctcgaattattcttgacaataataaacttaagaccatgttgcttcgcgacatccaaagcaagatagcaagccgctgcttctccacataaagcatcaacaaattccagcttagaattatggatacagatcaccctacccagatgatcccttgctacgaccgcagaacacatgctgtctaaccccactttaacatcacaatttagcttcaaccaatcctgatggggagggcaccaggcatccaacgaacgtggaggtacacaagggaacaaagaagcatggtgaacagcaaaagaagaacaaatattgtcaatacacataataacatcaactagaccattcttatgtacctttccgtttcgagtctgccagatagtgtccacggttagcgaggcataaaggaacacctcatcggcattaatgcctttatttttaaggtcctaaatgaatttgacccagtcccataatcaaattccaacaccacatcttgaactctgacccttataaagttatgctctctgaatttttctatggtacaaatattttccttgaattaggtaaattgttgcaaatatcccccttcagttacattctactcaattttttaaaacaatttgtttatgtctctatgagttacatgtataattgtattcaaatagtctatttaataactttaagctacttgaaatctaatttattgatattaaacatacaaattgtagctctaagaatccacaaacatactttcataactcatcattaaactgttatttgtgcattttttttggagaattatcctatctattattttttattttttttttcaaatttactgtttgtgttgcttcagtagtttccatatgtgagttgctatgtggattttggttgagatttaagttgctttattgatcgctatatgaatttatgtaaaatgcgaaaaaaaaaactactttaaagtacaaaaataaaaaggtcctttattttttatttaaacttattacacagttacactagatagcagaatgcaactacatacaaatagatgtttacaataatttttagaattcaaggagaactttagcaattgagaaaaattaaggggtaaaactctaccattgtcaatagttttaaaaagaaataaatatttgaataagttaaaaaatatcttttttttatttattaatcaaaaatatttttatattggatttcattaaaatatacttattttttgagtggattgtcgaatataatttcactctccacttaagtctagcacataatttacatcaatttaagtataatttagacattatctataaaaataagtatattttaaaaaatataaaaataaatttaaatttaaatagataaaataaattgagcatacaatagaggaaattacgtagaatatgacattttttccttaaatttcatagatatggaaaaattagagatttacttaacttatgg

SEQ ID NO: 312266 - DNA, 1509 bp, Cannabis indica
aagaaaaagctaatcaattattggaaaaactatagtacacttggtcgttttggtatctctttcagcattttggagaattttttagtcatttttctttgttgtaatttttcaagactgagttttcaaaaaatttagaatgttgaaataaattcaaataattactaatcgttcctacgagaaaatataagtatgtaataaaatatttaaattcaaataaattcaaaaaaatttatttttgaaacagtaaattattcggaattttctgaaatagtcaggagacctgttttaaatctagtacttacatatcaatattattggttaaagaagaaagagctaatcaattattgattgagtgaacatagtcaacaaagttattgattttgttaagtaaaaataataaaaaaaacaggaattgggagcttcttgcaccatggcaaggatcaataatcagagttccaacaaagttcatagctggtgacaaagatattggttttgagagttatcgtactaaggaatatgttctaggagaagcttttaagagttatgttccagatattgaagtggttattatagaagatgggcaccattttattcagcaagagaaacctcaacaagtcaacaatgagatactttctttccttcaaaaacattcagttggttaagttaagcaagaatttaattatgttgtatcattatcatattttgatgtactttgaaatatctctagtttgcaatgctaaaaactggtgttcatgaactttactttctaagggagtgacactcatattttcagctgttggataaattcccatactattgtcccataaataaagttacaaggaaaataaattagatctatttacaaagcctcaacagaccattataactcatagagttgtcggttctgttgtcataggcctagatctttatttctctttacaatataaagaagcaaacaaaatatctcaagactctaacaaactttcagctttacaaggaaaatatcacaacagaatatagttatttctcagctcaaacaacacagccagcaacaacaaaaacattataaataagtggttcaaccttccactttggggaacatataccattcggccagcagagagaaaaatcacaaggcagcccttgttttgctttgtaacccacctcagaaacaagagaaaaagagagagagttagtgagagatattgttatgtaaatcagaaaaataaagtgaagaaaagagagaaagaatagagattacctactgaactttgtggctaggaatctctcatccttgtaatcggtttggactttgatagtgaagcatcaagcgtctttgagggaagcttgacggagatgtactcttgatttcaagaggaactccgaaatcaatctctttgtcttttgcattttatttttctgctcataactttcgggtctactctcatcaacaaacaaagattatttttatctttgttattaccattttttggttgtctattgtgtgta

SEQ ID NO: 312267 - DNA, 1298 bp, Cannabis indica
tttcatttagaatttgcttaaattctatatcattggatgaatggtttataaatcatttgcttatgatgtcattctattttcttttatgaaattgaatggcgcagatgactatactcttgacattctatctcgaaatgatataaatccttgatcttagaaatctcctacttgtatgtgcttacttaaggcaatttaaacttagagttagattagtagtggttgtccaagctagaataattactcatgtttatttggtataaatttaagtctttgactttaaattttagattctaaatagaaatttaaatttcagtttcctagaatacattggacaatacagtatgactttcacaagttaacttccttttcttcttgttcccacttttcctcattttatcattttttctaacttcgagtggccttctcctcgcaggcttctcttctctcctatgttacccatcaacaattgtctcagcgagttgatatgctcgagactgagcttcggtagattagggagcatagggacgacttagccaaaaagtggaatgactcggtggtcgaggtttctcgcaccaaggacgaaggagaaaagcagtctaactgaccaaaagaaggtcaaggaactcgaggactctctcaagtccctccaagctgatcacgagaagaaactcaaggagttagaagctgaaaccaaagacagggtaaacaacatcagcagaaggaccatctatcaaatttggtcagccaacctcgatttggactttagtttcttgggcgacagtgctgatgccatgcttgccttttgcgagaagaccaggagagaagtattaggcgaggaaggagaagttgaagcagaataagaagatccaaccaactctcctacaatgtaggcttggtttttaagtattaggaaaatggccagatggccgagacaataatatgccccatgtgccacttttataagaacaaattttcaaagttggatggccaactttactcttattttatcttttattcattgcctcgtatttatgcattcaaacttaatatatttgcttacttgtgttttttctcacaatttaaacaattatactttgatcaaatttaaaatactttaagcctttccattgcttttattttcttttgatattatttaagtagttagtaatctactatgtgcgtgagaagttattatctgatatgcttttgatttgcgagcagttatcagttctgctttgcgtcagcaattatgatctattttagacaaacttaaacatacttttaataattcatctcgt

SEQ ID NO: 312268 - DNA, 1255 bp, Cannabis indica
atatacattttttttatataataaatctatttatatatatgcaaatttcttttcctttttatagtcgggtgcttatctaaaaatttatatatttaaatttattgtaaatatttgtgcttcatatggtgtaaaaatattatatgtcctaaataggagggtttttttgtaagaaaaaggaatatttgtttgtttaaaaaaaaaagaaaaagaaagaaaaaaaaaacaatatttgttgtctaattagactctataggttgacaggcacaattaccaaatattatattagagcatatgcaatgatagcattctttaaggatgctaaaaatttacacattatctaaagatataatattttattttatttctattccacattatttttggcactcttatttcttacatccctaggtagacaatataaaaaaggtgttcaaatcaaggagaatgtaattaagtgaaaacactctcttaattcatgtaattaatttatgagaaatgtttggtgcctagtatttcttttgctattgaattattattagtgtaattaaatattgaatttcatataattttaaaaagaataacttttaaaaaatatcgcatcgtaaaatactacttgtagaaagtactaaacaccattagtactaataatcttaatttatgaccttttaaaatctaaggaaaaaaatcctttgaaaaatctagtcatactcatataacatgaccttttttttatcctaaattgcatcaaatggtattatatcagttatattaaagaaataataatgctttcaaaaaaaattaataatgtgtatcataataagatttttttggatatgccttttttttgtctaccaacaaattttatgctttctctaacaaaaaaaaaaaaaacaaaattttatgctttattcaaaaaaagaatgatcttcacaatatccatttgttaatttccctaattaataagttgaaaatgaagccttgaatgaaccagcacattgtatttctactagtatgtttattattatttttatcttttttttttttgttaagaatgttctactagtatgaataaattaattaataacgttcagcttactattaaaaatcgtcatgtgtttgtagatatgaattttgtatataaaaactataattgtgattaagttgttcgtttaactatacctgcttgcttgtttgttgcagtatttaaattttgcctaaattattcaaccttgtaagattaataagttaataaaga

SEQ ID NO: 312269 - DNA, 460 bp, Cannabis indica
atgacttctaattttttattgattgtaaataaaattatattgaaatgagttttattttatgtataaaatcaaaatatatatatatttatattattatggtacaaatagtcacttatttagaaagacaaattgcattcaaccaaggcctgagtaacttcaaatactagtcatccgtatagttgtccttttttctagggaaatcacatagaattttctataagtagatgagatgatataatgtaggcaagaaatatttgtttactgccaccatcaacatatttttgacaaatcagttgcttggttattattaagtggaagaattccaatatgatgtgagagatggaagtgttgagatggtgggccttcattagttagctgtctattttatctacaataattgataggactcggatgtaaaatgattttaaatttaaaaattaaataaagttagtaaatatct

SEQ ID NO: 312270 - DNA, 588 bp, Cannabis indica
aaaaagtaatctctgtccccgccccgttccccatttagacgtggaattcccgctccattaaggacgggtgtgcatccctaaataaaaatacttgaatcttatttttaaaattttcaaagaatttacaaatatttttaaatagctaaaatatacactcattaaaagaaaactaaaacgctctcctgaattctaaaacaaatagaatgttaacccaagcgatcatttcaagggatgtactatagaattccaataccatttcaaaagttttggaaaaattattaactgaactttttatttattaaataataatttacattgtaattttcaaataaaacatgatgatatcttcaacaaaattttatttaaaataaaacataataataatttaatctaatgacgaaattggttacactcctattagaaattttaaattgattatattaaaaattaattgataaaatttgatctcagagtataatttataaaaataccggatcgaaattattatttaacaaaaacagtgaatctgatggtaatttttgacttttttaattttgtaattttatttattgatttattttttttttt

SEQ ID NO: 312271 - DNA, 3571 bp, Cannabis indica
ctttgtctataatacttcactttttgaagatgatcctccttttgcttcctgttgcctctgtttcaacctttaaaaacaacatacacatatatagcacaaattaaggcagtttaccacccaatgggcattgaacaatcatactaatcagttcataatgaaatgaagaggggcaagataagggaaagataaaccatgccacttgtcctcacaaagataaactagtataataacacaagaaaatcaagtaccagaagatagtatatcgaaatgagcaaatggccaatccaatttcaatatgataaataacttatttgaatatcataataacttatttgttcaaaaacaaaacaaaacaaaacaaaaaaacataacttacaatcaaattttaacatccaatttgaatatcataaataatgtttattgttttactattcaaacagcacccaacagtgtaagttacatacaagtacaaggaacacaatctaaacctttcaatcaacttcaaaactatgaaaacatcacattcactttaattgttgaaagatactatacctattgcgaatcaaactagactcattaaatggtgattctttgtaatgactaatgactaagcagattatccaagtgaagttgatctacaggtatgtgttagcattaggagatacattctctgtttcttaagtgccgctattaggaaatcatagaaaatggtgtttgaaaacagtaaaagcaaaagagacacacatctatttatgttgaatcaaaatgcttcagaaagaataaacaataagacaatgatatatataaaaaaatctacattctaacccaatttataccatcagtaagtacaatactgaaagcatggtgagaagagtaaaattggaagagaaaaaaatttataagaactaaccaagtccaaggacctgttattgtatatcagagaaatgattgatattctttctctggctgaggatatcgctgaaatacagcctgaaatatacaaaactttctcacttgttattgtttcaagctaatgtggtaaaatctaccacaaaaagatgattttttgtaaagtacaacatgaactaccagatttttcccggaaaactttgaattatatacacgtgtgtgtgtgtgtcagtatgtgtataaatatgtgagacaaacgttttcaaaaaaaatgcgggacaaacttaaagtacgctgtcccggtattatttttgagacttgacttagcttaagatgtttctcatgtttctcgcggtaccatatcaacaagttctcatcctgtaggtataatataagaacttgagctatagtacatccactatatggtcatacagatgtttatatgtatacggataagaggatatacaaagcttttgatgaataaaagaaagagtagagtcaaagtttgcaaaactcaacaaatgtttaagcttccaaaatgtcagccaaatcctgtcataactgtaaagcttggcagaattaagccaatgcaagcttgtgccaagtcttgtcgaccattttatgcgttttaaacctttttttttctaatcacattgagaaaattacaaggaattttcaattccaatcttaacaaaagtatgttttcattacagccataaaaaatcacaagttttcccaacatctaatatttgtgttttcaaagaaacttcattagaatggttttgtctcctcaaaaaagccaaatccaaatgtgttaaaaaaacaccaacattaaaattgaaattaaacttacattagaaagccggaaggggcaaaattttggacttcccctacgcccaaacttcagcaaatgttcccctttcttcacggctataatggcctatacctaaggacattgaatgaccattaaagaaaagtctatttaaacctccatacagaagaactgtaagaatttagaagaagaaagtgtagcttaaaacgaagcaacagacataatcaaaatcacaattataaaaattcgtttagaggtgacctaaaatatatgttctaaagtttagtttaaactttaaagtacacagccttgcagaagagttccaagaggtaattaaacagtaacaaaggatagaaagctcatcatcattgtatgctcattggctctggactcgcagagttaagtatgtctagtaaggaattgtgggactccaactcctcgtgccagagtggaagttggtctcccgggtagaagtttcttgtcactcccttggaattaatctgcaaaaccataaaatttgtaagctatctatgttgccacctttaattctctccctttacttgaaatcagtgttttgtgggaaactcttacgatgacagtgagaacaacacctccacttgccccgtcacgagaaatggcaagggaaactgccttcaccactagtttctataaccacagagaatataatagatattagaaaattaaaaatcaattctattctattgacaaccgtttaagaattagcaatggcaatcataaattctagcaaatggacaaggttcctggaaaaccaggagaccattaacaccgaaatccattaaaaatgacttgttgcttcgagcatttgtatactggtagaaatacatacctcagcctcctctttggtcatttcttctttccacgcttggtcaaagaatccgtacaaataactagagccagatcctggacaaattaatattcagcagcaaaataagagaaagaacaagctgagattgaaattggacttgtattgataggaatcccaggttttcacaaagagttcaatcaaaatgctagataccttttcagatagaaacaaactattatttattgctagtactcatgaggcttatcatacacctcagtactacccaatttattcccacataacagaatttaatagcagatttaattatctgctgccaccccatccttagctttcctagtcccctttttttctagcatagacaatagtaagtggaggcctatcactggcttggagaagctagctaaaattatgcaaaaaggttttctagtttaaataactattaacagaggtgtggtgtgtcaaccgattatgaatgcaaatataccagtggagttgagtaagaggttcaaaattgagagggaaatttagagaagaagaataacataccaccaatcgagaatggctgctggactatggttccaccaagaggaactccgtagatctttctgttttacaatgttctaagaaatttgtaagaaaaatcaagaacactctagaaagttttagagaaaacttagaatcactagaactaagattagataattctagagttgtttagaaaatagtaagaagtaattaattagctagtaaattagaaaaatctagaaatctttagatacatcctttgtagcctataaatataagtgaggtgtgtgcttaagatgcaagtttgagcaagagagttcaagtgtgagaaaaagagtctaaagtgtgtgagttcttaataagtgtctaaagacaaagtatcccaaaagtgtgagttatacacaagtgtgtagtaaaggtgtctagtgataaaataa

SEQ ID NO: 312272 - DNA, 1277 bp, Cannabis indica
tgaaaaaaccattaaggtaagtggttaaagatcttccgttcagatctctaccccttatgtgtttatttcattgttttagaaattcatattaggatgttaatgaaacatacttcttagtaaatctagatcttggtaaaatatttccaacaacaattgtttcctatcttcaggtatgatttgtctcgttaaaaccctttaggtagtttcaaatttgagtcagttaaatgctttggaaatgcgaatgggctattaacttgctaccagaatgtcgagtggtcgcgaagctttagcaccttttgagtgccttgagtacttaacaaactaaacggagtactgcatgaatgatactggtaagggatggttttctcgtggatgggagagcttctacattccaagcgttcctttatcataactcttcacgaagttgggctttgggaaaggtggctgaggatattacagattttggcgttgtcccttattcagggattgggctaaaattattgtaatacttatgcgaactttccttgcaaagacttcattaaacagagttttttgccactagacccacacataaattgggtagcaagctgcaaacgctatggatttaaggcggtaccatttgctcatggtagggataaaagtgcataggagttcaggtatggcccctgttcgttccttgcaaaacatccaacagatgaaactttaggaaacacattgaaattttgaggagggattcatgcaaggttttccgcttgggaaatttggttgaaaatgcatctcatttcaaggcttgcactaattttttttaatcttgagaaggaattcaattgagtcattcccttgggaaatttttttgaaaacacatcacatttttgggttgaatataagttaaaataaaaaaattagacatggataaataaagtaaataaacatagcacactgtacgttttatgggggcatacacagctagatatagcacactcaagtgagctgagatgtttggacgtctctgaattcctggtctcttatttaaaacatagcttgtggcttaagaacaaaaattgtgaattttaagtgtaaacttcttctattttcatttcattatacccgtaggcttacatagagaagacaattgttcaaaaatttacacaaaactgaagagatacatgaaagcttagtcacctcagcctattggtagtatcgatgtaagtggtctgcatgttggtttttatgccctaaataaaactccatttcaatgtaatccattttattcaaca

SEQ ID NO: 312273 - DNA, 2353 bp, Cannabis indica
atatttgaactgaaacattatttttatttatcaattggtatttgttgttgtgcaacatacataaattgaatctccaagcttataaaataaaaagtttgcttttaaaagtcaagtggctactcctgcccgacatgccaggcagaggccatcgttgcagaacgatgggagaccatgccaagaggccatgggtactagctcttttaaactaactcttactaatgagttaataaaactactagtggagagtagcattcatataagctggtcactagtagtactttcagaggtgctcctcattccaatatcttggcaggaaaaccagctccatgttctcgttgtacctgcctagcttgtaggcttccttactcgttatctctgtaacttggtaggggccttcttagttgggtctgaaaactcctgttttgggatctttggtgaataagaacacccttcgtagcaccaggtctcgtacaaagaatttcctttcattgacttgtttgttgaagtgtcttgcaatcttttcatggtaggcatgtagctttaggttggctgatctctcatttcttctacttcatcaaggaattctaccagcaagatgttgattatatcttggtcataggctgccctcctatgagacggtgacaccagctctacgggaaacatcgcttcatagccataagctaaagcgaatggagtttgcccggtggttgtcttctcgatggtcatgtgcgaccaaaggacctctgggagaaattctggccaatttccttttgcctctttaaggcacttttttaaagtgtccttgagggtcttgttcaaagcttctacctgctcatttgcttgaggatgagacacaatagagaaggctttgatgatgtcgtgtttgttaaaaaaatcaatgaacatgtcactgtcaaaatgctttttgttgtctgacataatcttctatgggagttcgaaccaacatatgatgttcttgacaaaaaagtcaaggactttcttggaagttgttgttgccaggggtttagcttcaacccacttggtaaagtagtctacaacaactacagcatactgcacccttctttttccctttgggagttgaccaatcagatttatttcccatacagtgaagggccatggagactgcatcatcgtgagctcaatgggtggagcttaaggtatcttcgagaatctttggcacttgtcacattttttgacctagtccatcgaatcttcaatcattgttggccaaaagtacccatgttgaagtatcttcttatataggctttacccaccagcatgactaccacaaaaatcttcatgcacttctatcatcaaatgctcaacttctgtcttagtgacacaccttaagaacgacattgagacgctctgtctttacattactctgtcttggattagatacctagcagcttatcttctcatatttttttgcctcatttttgttttcagacaaggcttcaatttggaggtaagctgcaataggtgtcatccaagttggactgtcatccaacatgtcaacttctttagggatggtaatgctattatgttctttcaagaactgtattggcaccaagttttccttatcagcaatggtgctgcttgccagatgggaaagtgcatctattgtggctaatggttctctagggatctgccttattgtatagcctttgagccgacctagcaagtcttggatcttgctcaaataggccatcattctttcacctcgagttgtgtattcacctagaattgatttacgactagctgagaatcgttatatatgtccaagtggtcagcccgtacttcgtgcacagcttgaggctagtgatcagggcttcatatttaaccttgttgttagaggctttgaagccaaatttgattgctctatacagttgttgcccctaggtgttatgagggaaatgcctgcaccagacatttggttagtgcagttcccatcaacatgtagtttccatgttgattctttaggtttttgctgctactcttgctctggcttcttctttggctcttacttttctcctaaatcttaagagattttaggaggtatgcttgtacatttagccacaaagtctataagggcttggccatttatggccattcttggttgatatgtgatatcaaattggccgagttcaatgacccacttgagtagtcggccagatgcttcaggtttttgcaaaacttgttacaatggttggtcggtgtacacccttgttgggtgagcttgaaagtacgaccttatctttttggatgttaggagtaagttgtatgtcggcttctccataaatgggtatcaactttcagtgtcgatcagtct

SEQ ID NO: 312274 - DNA, 652 bp, Cannabis indica
tcgccaaggtggtttctagtaacaactgctatgcgcatgtactctaaacccactttgacatcacaattcattttgagtcagtcttggggggatggcaccaaacaagggagtggctcagaggggtaggatggatgaaggaagatctgtaatctgcaaaagagtgaataattgaatcaatatagtgcttcacattatccattttatggttatgaaccatattattccgaagtctccaaattgtctccactacaacacaagcataaaagaacacctcatctgcgtttacacctttgtattgaaggtttcaaatgaatttaacccaaacccatacccataacctaatattggtgtcagaaataggaaagattccccacagaaaagagcaccgtaggtgataggcaaggttgcaatgaagaaagagatgcccagtcgattcctcttctactccacaaattgggcatcgagtgtcctcaatatgaaaacgtttatttagagccaacctggttgagagagcttcatatagaatgctccaccacaaaatcgtatgacgctcaaggatcttgctattccaaaagcttgttcgagagaaatggagccacctcatagtggaggttgttggatttgatgccctaaataaagctctttacaatct

SEQ ID NO: 312275 - DNA, 1007 bp, Cannabis indica
agagttccagtttccaattactaccgctttgctatggaaattatacatatactagttagtacttattatgtagggcatatatatagtgtttcattacatataaaatatttcaataatatataatgatggataggccttattaattgaatcaattactcatcactaagcctgtgtgtggttgtgtggatctgatctttatcttatcaagcattatatgaaatgaaataatttaatgactattatatcttccttttcctttcgctatataagggacaacgcttgccgtttccaaaaaagaaaaacaatgcttgtttatttctgagtggactgtgggacttccatctacttaaatttacatacataatacatatgtatgtgacattgacatatgaattattgatcattttctgtcctttttctctctcccccaaaaaccatatacattctatcttaattactttttattttctctctgcttgtttgtaagttgtaacatttcaaaatgttaagccaattcccctaaattattattattattattattattattattattattattattattattaaagattcttcttctcttgtgaacttctaatatatgttcaccaggattactttttattttttgtaaggggcatcaattaatattaacttattaatttccacgtgatccacgaaagtacccttacgtagtgtatgtgtatcatcttatatttttagctattataaacaaaataagattagttgtatgtgcttatcaatattagatgatgtgcgctagcttcaataatatatttatggtaataattgagaataatattgtacatataattgtaaacaaataggacaggagtggaatatgcattattttcaaaaggtaggatatttcatagttgctagggccttgcctaataatcattttaagaatatataattactaattttagtttttgaattttcgacattactaatcttaccttttaatttagtttttaaatttt

SEQ ID NO: 312276 - DNA, 3956 bp, Cannabis indica
gatttatgtgagcgcttaaatcagaatgcaccatttacgccaacaactcaatgcaatgaaaagcaagaagatccgatccaattgcaaatcagtgagttgaaaaataaattcaagagataccaagatggggaatatgggaaactgcctagttatgactcggatgaagaactcgagcctttccatccagacattatgaactttgaatttccccaaggattcaaaaaccctcacgtctcaccgtacgatgggacttcagacccaatcgctcacctcaataattgccatactataatgcgagccaacaatgtctcgaataagttacgttgttattttattccccacctcgctgactggagcagcgagtaactagttcaataaatttactcatcatacaagtacttcttgagaacaactatctttaagaaacaatttcaggtagcaagagacactcgacctaaaacgtcctcccttactaacgtaaagaagcaatcggggagagtcacttaaggctacttaagtcatttcagtacagctgatgctaaagttagaaacttgaatgacaatatccaacttactactcttcaagcagggatcacgactgacctctcaacagctgggggcgagctgtgggatgatttacagggtcgctcggtgaagtacatcaatgagttcaatgaaagagctcaggtgtacaaaaaaattaccttaatagacataatttgtaattaattatataggtgcaataactttatttcataaggattttattagtaaaattttcatctttagtttttactttggtgtctggtaaaccctataattttaaatgattagggagtaaccgcaacatctttaattatataaaattatatatattaagtggattaggatcacataatggacatgaattgtaattgattatgtggatacaatactttttctccacatagatttaattatgttggtataattaattaggaaatatgttaaattaaattctcttaatttatcccacatgatagatttaatttaataattttatcataaaatataaaattttgaaacatttataaaataattaaatgtttcaaatatattattgagatagaaaaattaaaccttaagttttttgataaactatttaaatatatcataatctacatctaaatctaatcttattaatttaaaaatttagcccacaatcaatttttgtttaataaaattttatatttaagcatgtttatagattggtaaaaacatgaatcatttaatcctcaaaactatatattaataacgtaattttactacatcattgttcataaatttctacattatttgtaaaaattctaaaatttactcttataatttcatctggaatgtatagatttttactgtacagttaagaaaaataaatcacacttcattatcactaataaattttcaatttattttgtatgacttcattgtattatagtcaatgtaactattaacacaatggattttttttagattaatccacattcatattttcttgcaaggtttacaataaacctaagaccatctccaacgggagatgtaaaaattgtgctacatttattacaaaaagtagttttgtggtaaatttataccaaattttaactttgtactccaatgcacaattgcaaaattttgatgtaaaatttaatatctaattaatattttattaaaaaaattaaaatctaataactttataatcaattttattattattttaatatgtaagacaataataaaataatataattatttcataatttaatgtgatagttaaatatactaataaaataatagaaatgacataaatgtaaataaaaaagtagtgcatttattgtggtgtaaattttacatcataacaaatgttgtgccaaatttacatcacttttttgcacattattggagcacactttttgttaaatgagctatattttagcttttcaccacttacttacaccaccattggagatgctctaagaaagttagttattgtgagcaaatctgatccatagacaagatgaattttcacatttagaaatttaaggaacaagtaatattgtagtgactttgttttaaaattatcaaagacctttatgatccaagtttctttggaaacatgatttagacacatatttaaaggtctttagttactacattaaattataaaaaatgatgtcactcataaagatacatatgttcaatctggcaatattatgaaatatatatccataaattgaataaatgttagtaaatagtgggatactcattacaagtgattttactaactttatttaaagcttgtgtgaatttatataagaaaaagtataccaacaaacttaaatagtgcacattaaaatgttgtcatagtagaaatcatacaagtcaattaacacttgtaaatatagactcgtatattacaaaaaaatttatctcatttattaatgactactcacataaattatatctctacaaaagtaaagattatatgtttcaaagacaatcacaatagataatcatatgacattttaatcttatgattatccgatctaaaaaacacgataaagaaaaaagtagagccaaaaagtgagccaccaaatcaaaaaagtagtgccaaagtcaaaaaaatatcacttgtgattcgggaaaaatgagcgaaaaagagcaacaaaaagtctaaaaaaaatgatctaaaaagtagagccaaaagagtcacttgtgattcgggtatagtgagctaaaaagagccactaaaagtccaaaaaatcgatccaaaaagtagacccaaaagttaaacttgtaattcgagaatagtgagtcaaaaaaagagtcgcttgtaattgaactgtccaagataatgagaaaaaaagaagctaccatcttgagagagatattagagagtcccacattgctaatatgtagaaagaaaataagtagaggcaaaagagtcacttgcaatccgggcatagtaataaaaaaaaagccgcttgtgatcgagctatctaagataatgagaaaaaatagatgccattttgagggaatcttaaagagccttacattgctaatgtgtagaacaaaataatatataagattcataaactacttttatcataatcaattaaatttgaaataaaataccgttcttcttacaattctgacaagattacctcattgattaaattgtgttactgtcttctaacaatgttagatttttatttatttatttttaaagaaatgtttgatcttcctagtcatatatttttcacaaaatattattaaaaagtaaaaagagtaaacagtctcaataaacttcggaacaaatgattgaaaatatttctcttacaaagtaaactatagattcagaaataaatgcaacataataaattagatccttttttttagttggtggcattcaaacgaggtttgaagatagcaatgatttcttctttagagggcgatacttctttgatcacaggatgagtagcaaaatcgcagctccattgatagaggtttggaaattttgcctctgtcaatatatctactccaacaagctcctttgttgttgggatccattgggctatgaagtttcctgctaagtccaccatcccaatgccttctcctccaaaatacttgtctttcaactctttctctaacatctccagatactcactcaattcttctaatctatttttccgctcctccttcgccttaactactttaagtgttgttggcacaatctgggaaaaatcatattcaatgtcaaaaaattgctactttacaataaacacataaggtgttcgatgaaagtataaagattgttttggaagatttgttaccttgtcatcaatgaaattactccagaaacgggcttgagctctttcataagggtgttgaggcaagatggggtgagtcttccatgtctcatc

SEQ ID NO: 312277 - DNA, 474 bp, Cannabis indica
agggcacaaaacccaacaggtggggacatgcttccggccgtctcctcgccatttcgaaaattttgaatactagcatattcaatactaacctcaatgcagttgttgagtaattcattgatattgttacttccactattatcccctaccgcagtgcccctccttcttccacttctagttttcactcccgaattgcgattcactgtacgattggtagttttgccttttagcttccttccacgagtgatactccttcctgaattcgaagaatcatccccagagccaatacagaatttttcttttgaagatgtccatttggtttggtccgattcctctgaaacaagattcgaaggggtggctatcgtctcaataggataaggctcataccatgtatgtgcctttctctttctggtatgttgtcgagcaattttcgacaacaccagttttgtgcgagtattcaagggctacttggatacc

SEQ ID NO: 312278 - DNA, 819 bp, Cannabis indica
attagcaacgagctgcacaatatgtttaaaaatcacgtaatacgcctatgttagttagggtgttacaggatccccttcttacaatgctcttcgcaagcttcaggaaacacgataacttcattggtcacgtaaccttgtttgcaagaggggaaccatatagttactcattccatgattgcattcacattgcatcactgttattttagtctgtgttatttaatacttgttgggctactattttctattttttttttattattaggttgtttgtgtgttttgatctttcaaaaacactcgagtccaagatgttgaccgacttgatgagtgccattcataaggtcgatgctgtggtcgatggtaaaaagaggcagaagaaggctagcgccaagaaggccaatacttctggtgcctctaaaacttttggcactcaagaggacaaccctaaagttgacccttcagttgttcaactcataattacgaacacctcaaagacacatctagacattggaggtggaagcagtggaacaacttaattgcccatttcgattaatgttgtgacccagtagaggaaacccatgcttccctcggacgttgagggttttagggaaggcttggcatttttaaaggcaggagaagcattaaaactatccagtaccgacccccaacccataagggaagataagagggctaggcatttctcccccagaggcactggagacctttgggcatatggatctatcatggcagatgccttctgtaatacccggaattatgaaatggattagcaaaaccctaactagataattatgtataattgag

SEQ ID NO: 312279 - DNA, 709 bp, Cannabis indica
aaatatcctcattgatgcgcaatactgacgaaaacagggtttttaccaacgaaatttgtcctcagtaatgctcatttttcttgtagtgcataatggtcaacaaaagagactatacgattagtttgcttgcgctatttaatactatcatgaaagtaagttatatttttatccccaaactgcaaccagttaatcttacttttttgtcttaagtagctttctatcattttagaacaagaagttacagtcaccttaatctctttttcttcatcaaatagctccacagaataaatgttacatttaattcaaagttgaagctcatgaaaacgagctttagctgaaatataaacttgttgaacatcccctatcaacattttattaaactttctaagcacctttcgtactctatttaacttgaccatagtatgaaatagcctagtaaaacgagtaggctactgctaatttttcaacactgtctgtctaaaatttcggtgctctatccacatattgaaaattttaaatggccaaaactctaaattctttacgtacatacaaatttcattcttaaaaactcgatcaattttataattaattccttcattatcgtgaatattattctaaataaaaataaaatcagaactcttcaattcataaaaaaaaaggcaaaaagattaaaaaaaaagttaataaataaatacacaaaaagtcaatt

SEQ ID NO: 312280 - DNA, 787 bp, Cannabis indica
ctaaatccaacaataattactaaataatttacataccattgttttttttttccaagaattatgttggttttgggttgctcttacgcacttagttatcaagctaagttgatggactccggaaaaggatatgtgtgtgtaactttctagagagagagagacgagaatgagaaaggaaaagagagagtaaggtttagttttattatttgaaggtatacttggaactgaaaattgttagtatcatatttagtgtagtgcttaaaggctggaatattataagaccatgcaatagcattgattcttaaattttcctatacatatcacaatataatgaaaacacacaaacatggagactactaagtgtatcttgccctatcatcctactccaccttactcgattatatacttatatttatatgtatgtttgaatagtatgcattccattcacatttaaaaatacataaatataaaatccgaaaataattaatttaatactttattattttaattattactaattatactttttcattaattttacagattatagaattaatacttattatttaaataattacatatatattggtaatattttatgtcactgaacataattttattatctttttaaattgtttttttaaaatttactagggtaggatttactcatgggtaccctatactcgttagggtaatacttgtacctacccgtaaaaaataatagtttacccgggtagggtatgggtagaactttttgttgagttttgtgccataaataaaactcattaca

SEQ ID NO: 312281 - DNA, 667 bp, Cannabis indica
tggtgatgttggtaacttagagagaaggggagatgagggttatgatgttggcaacttggcgacttggggagatgaggggtggtgatgttgatgacttggggatatgagggtgatgatgttggcaacttggggagatggggatatgaaggcggtgatgttggcaacttggggagatggggagatgagggtgttgatgttggcgacttgggtagatgagagtggtgaagtaggcgacttagagagagaaagctgagagggaaatgagcaagaaagaggttatatgtgaatgaggaagtggttatgattcttcactcagtatgcatcaagcatgcttgttcaatgatcaacaatcactgaatttttccctaagtgttaaacatagagtcgttaggccaacgatcaagaacgcaaggcaagaacgcaggcgggtacatgtcagggtacacccatgatgcttgcatgacctgagtacgagtagtggatgcgccactactacaagccctgacatcctgaccaagggtgcacaatagccaccacctctactacccgggaccacttgacatcaaacaaaggtacaaggcgtaagactactgttgggttttatgccctaaataaaactctttacaatctgattagtaatcaatataagaaatttgaagtgatttat

SEQ ID NO: 312282 - DNA, 3235 bp, Cannabis indica
ctcctagtccacgaagtcacgcccagagaatgaaatcaattaataaagtatcaaaattacaaagacaattgacttaaacaagtttagactcgctctaaattattaaatatgtaatttagtgggtatcagagtaggattacaatcttactcaagctaattacgagttaattagtgaaatgtgaggaaaggaataaataaagtgtaatttattaattacaaagatttttatcggattatgggggtattgtagatactattttcaaaataaaatattttcgtgttcggcggccatggaaactcgacaaggtggtcagaaatatcacgacaattaagatgatttgtattggatttataccggactagtttaaaattctaagttgttagttttgtggaatatttagaaaatgaccaaaatactcttaagttttaatttatttaagtgattaattaagaagggtgtaaaatagtcttttacttagtttgttctttatggattaattacctatgctgaataatactttaggttagattagatatatgtgggttaattctttttctagaaaattagagcattaaaaaaaaaaaaaaacaagaaaagagacgcactaaagctcttctccctcttcctccttcgacagcccaaaaacccagcaagaaactaggttcttccttgcaattccagccagcatttagcatgataaaactaaggatgtgagtctcctaagctgtaaggtaaatcccctacttatcctttctaatttttttaggtttaggttgaatttggttaggttttgttgggattttagatctctatgagttgttggagattaggtatgattttaattttgaattaaatgttattcaagtttgtttgagttgtttttttggctgctaggtttataattaggagaaattgagtttaggagttcaattttactctttaatggtgaattgtttaatttgatgaattgttgtgaattagtgatttgaatactttttatttatggtattgaattgctctgggaagtttggacatgtttggagctaatttgtgtggtttttgggtgaaaaccagtttttcccgtttctgctagctgagaaaccggttaaccggttttactggtgcagtaaaatcggtccaccgattttgctagcaggggaaaattatggttttagcctcgaaattggtttttactcggggtgtttttcaaacttaagttagggtattttaatgatgtttgagttattccgaaccaatggagagttagatatgtctggttacgaagttagggttattccaaaatttggaataagttgtttattgagctttgttgtcgtgacatatgaccgggatgatcgagggtagtttcactcaggttggcctgcacacctgactattggactgaggtaagaaaagtattatgtaccgtttgtggataacgattataattatgatagtctcgattatgatcaagatctcgatatgtgtatgttgtgactcgattatgattgagaaaaaaatgatatgaaatgattattatcgttgtgactcaattatgatcgaggaaaatgatatgaaacgattattatcgtcgtgactcgattatgattgagggaaatgatatgaaacgattattatcgttgtgtctcgattatgatcgagggaaatgatatggaacgagtattatcgctgtgactcgattatgatcgagtaagagatacggtcattaccgttatgagtaattactcgttgaaaccatagataggtttcttacttattgttcgcgttatcgggcaacgatagtgacatatatagcttgttgataacgagtggtaagggtgatttataaagcactgagtttaggtgattatggtattgtgtaagtagagtgcttaatgaagtactaaaattatgtaattataatgatgtatgactagagtgctttacaaagcactgagattatatggctatggattgaatggatacctacttagtgaaaaggtgaaattattaattatgagtttatatgattattcttatattgtgttatgaaggtgttcgcgtagatgtactgatatgtttatgcatgttgaatatgtattgatccactgatatgtatattatgttgtaatgctagtacttactatactattatctagtagcttttcttactgagtcattgtgactcacaggtgcttcatggtgcaggtaagaagaatagtatatgtgttcagccatgagtcagaggtctcccaacagtttacatataagccgtggtgtcttggcttctgggaagcaggattgacccctttttctgtatttggaaatgtaaccttgattttgtaaaggttaaattagttgtaaaagaactttattagcaggggatccccatattacaaccatatttataacaaaaattttagtttaaaatttaaccaaagattttaagtttaaccaaactttttcctaaactaatagattagtgataataagtttgttttttttttttgaataaaatgataataagtttgtaagagcacacacacgtggcgtccatgagagtcagggcattacattaattgtacagctcgttgataatcgacgagtttattgaaaattgtgattaattagaattttacttaattaattataaacattaaaataccatatttacaataaactgacatcctgtttacaaaattatttacaaaagtttcactatgcatatactttattgcctagcgactatacaaaataagccctgatgtctcaaagatcgtacgctccaagcctaaccgtcccgacatgtacaatctccatctgctcgctcttacggctactcagccttagccttgcccttacctacacatggaaataacaactgtgagtcaacagactcaataagaaaagcataagcaataacataataataacccagattataatcaggcgcccatacaccaaaccataaccctatccccgtgtcgcacacgggactgagtctagaatgttcataggacaatactatcgaccttaatatcagtctatactcaatatgccagtcatactctagccatattgatgtgatatcattgatcagtattttagccaaacatacatttatcagtatccagtacaactctatgtatactgatacagctatcaatgtactctaacaagcataaataatgtaacgccctaatctataaggacgccacgtgtgtgattttataa

SEQ ID NO: 312283 - DNA, 1180 bp, Cannabis indica
aggtcaagtgggatgattacgagactgtgtaggtattggactacatagttgaagagaacttaaatggattgattgatactacctatatcaacacggtgcatcttgcttttcggtaatcattgaacgaatgtgttgaagtagataatatttttttttccaagaaggtattatttccaaatttattctctaatgtacactcaaaaataatttgtgttatttaaattgttataaccgacatagaatatgaatgagaactctccaatacaacacatgaatgaggaatcaacagataaagaaatttgcgaatgggaaagcatagcaacagagctaaacatcacaaaaccagttaatgatattgaaatatctaacgtgttaggcaacagtcttgacaaactggaaaaataaagccttttcacgagatgtacgcaaaaaggatatgtttttgcacaagaaaagatgatatttgatgtgctcatggggtcattgtaatgcacaggtgggtttgttgttctgaaggttaaaaaaatcacatcaccagacagagaagaaaaaaaaatgacctcgtgatctaactagaactagatgtcaagcagcattgcgtattttactctcaagatcatataacacttggaaatgcaaagagttcaacataatacacaatcacgagctggcttcaccaagtgaggtacaattcttgagatcatattgagatgtgtttgatgacttgctcgcccaagttaagtctatgaactcggtaggaattaaaaccgccaacatgtctcatgttgctttgcaaagtggtggttatgagagagtgccatgtcaactccgagatgtgtacaataggattgacgatgccaagcgagaagaaaaggtagagacagactcaaaaggggcatttggatttcttgattgtctctcgaagaaggatccgaatttcttcgttgtctatcaggtggacgaggacaactgattggctaacttatttttggcagatggaaactcacgtatggactatgtggcttttggggatgtactagggtttgatacaacctacatgacaaatgaatacaataaagcctctggtgtcaaccaccatttcaacacatgcattttgggtttgctctcctcctacacgagaagttggtgtcctattcctagctacttaaaaaaatttctt

SEQ ID NO: 312284 - DNA, 500 bp, Cannabis indica
acaagacccccatttttttaaggcccatttttttttttctaaaaaaagacctatttttttttttgattatatgtacataaataaaaaaaaattataattaaaaatttatgaacaaatcttaaaaaaaaagctagtaatagaattgtagtttttatgtacacggttttttttttcttaaaaaaaaagtccaattttaaaattttgcacaaaacccccaaaatacttaggctgaccctgtatatatgtataacataagatactattaataataattgtaataattatctaagaatttcatcattaaacatatttatgatacaaattattcatattcataatttactttcaactaactttatgattgttgtgatagatcatcagcccttaacaatcgagattaggtgttcaaagagcagaacacatgaacaacaatagcagcaagaatgctatttcaataaactaccaaaaacaatgaccaaaaccagcaagaacaagttgaa

SEQ ID NO: 312285 - DNA, 1043 bp, Cannabis indica
aaaaacaaaaacaaaaaaaaaacggcaacgacgaaaacaaagaccggaatttcctcctagttcaactctaccggaaccgatgaagtccgggaacggccatggaagcagcaattaagggtttgagggttgtttgatcgagttaataatggagcttttgatcccaaaataagacgatttacaaaacgaaggaggaatccttcaaaacgacacaggaatgggaataaaacgacacaactcaataccaaaaactctttctttcttttaacgatgggaagacgaagttgcagattcctgaaagggttggatcccaaagtccttattgaaactttttactccaatttttattttttatttttaaaaatgaaattattaaaaatccaaataaatacgataaaattaaatgaatttgttttatttttttttctttgttttgtttttggtttcccacctcccgttttggttttcctctgtattttttattttttttttaattaattaaattttggcatatgtggtttttcaatattgcacatgttcaactttcacctactcgccccgtcttttttttttttaattattatgatttatttatttatatttgctttaagtgtattttatttttatgaaacagatttcttatatataataattaatttattttggtgatgtaaaaaaatatatattaaaataactaatttagttgtattttgtataaatggaatacataaaatagtacgaattattaaataaataccaacttatataattttgggtaaagtcttgcaaaacactcctacaaaattttcaactgtattatcaaaacttttatttatttatttattattcaacatctaacttctatattacacattttttttaaatcaaaatccattcaacaaaagagatataaaggtaaatcgaactataaagtgaaatctacacaaaaaagaatcggtcctaaagtgagacgaatgatgcaaccgccttaaaccttccactgctcaaagctcctattttgaaaaaaaaaatataattagtaataa

SEQ ID NO: 312286 - DNA, 860 bp, Cannabis indica
tttttactaagtccacatagctcaaattttgtgtgccaaaacataattagctaactcacttaacttccctataaataaaggaaacactaacaacattatcaaataacaataaatggtaaatatgatctaatgtcatccatgtctctcgacaattctcctcctttctttgaatttattggacaattttaagacagtcagattcaacactaaatttgagtagtcgccactatattcctgcttgtaaactagcttgtatagctagtaattcagcttggataggttaaaaagtatgatgcagtacaattgcagaaagcataaaccacttgcacttcattgtttcaaaccacaccctaaccccgacccttccatgttctgtttgacagtcgcatcaacgttcatatttagcgtccccagctgaggaggaggaacccatctcccctttgcctatgaccttgtaacacgcccaccccattctcacaaccaattaaaaatacattaaaaattatattttatgtaaataaaattttaaaaattgtaatttttttaaaattatgtataatcgtaattttgtaatttttttttttttgtcatttttgggtgttttttaaaattattccttatttaaattgtaagaatttaatttatgaaaattaatgatttttattaaaaaaattaaatttttgtgtactgtaatcttctaagtaatagaagagaataaaacaagtcgtaaaatttaaaagaaattaaaattcaaaaacatgaaagaaaaaagaaaaaaaaaaaaagccgtataaaataggaataagaaaaacattttatgagaaattcctttgggaaatttgattttctatacttagaaa

SEQ ID NO: 312287 - DNA, 851 bp, Cannabis indica
aagtacctattttcccatttttgatgaagacacaagtaacttttaaaggttggattgctaatctaatacttggaagacacccagattgataaattgtcaacttgggtgctgggtgcccgggtactgagtgctaaaaaatgatctttctctgaacctaattctgatgcctcaaatatgtctgtggtatgtctagttcatgtccgaactcaatgtttgactcatttgtacaaagacagtctcagaaactaaaatcctattaaggatgtcaacctcagcgctgggtgaaaccctagattcctatgttgacttttggggtgcaagttcatgtaatttcacctcacaaggcctggatttgattgctgcattgtcctcgcgatacaaaatactgcaagatagtgagttggagacaagttatagaagtctaaacttccatcttggagttcccgaagtcaacttggacgcagggcttgggacccctcccaggtcgactactatgacttaggtctacttaactccatgacatcacatttcttgctacttgtcaaatatttatgtctgcgtctccagaaaaagtttttgggttaacattttcccccaagtcaactttacacttgtgtggagttgacttgatgacgtgaaccgagtctgtttctcttgaaactaccagatggtcatcaattttgacaatcttggataattgtttctattcttcaagcattcccaatagaattaggaccttgaaattaagtaacaaagaaaaagagaaaagacttatcatttttttactatcttttatttttttctttgaaaatttgaaatttttatgtatttcttatggcattaggattaat

SEQ ID NO: 312288 - DNA, 1732 bp, Cannabis indica
tcgacgtacacccctactaatttagacaccaaacatgtctaaattacactttattttgagacgcatttactaagtcaaagttttaccagcgtacatttacaatggttaaaatctaacttttaccaacacatttacgcgctgggaaaagtgcatttttgctagcgcttttcattttatgctggcaaaagttctaataccaatattgatttgccaatccccttttgccaacacatcacaagtaaattctattttaccagcgcaataccaacttttgccagcacaaaaatgtgctggcaaaagtgacatttcttgtataaattaagatgtgtaacatctttttacactcttaatgttggtgataatggtggaggttactcatagtaacaagtaactccccaaatattacaaaaaaatgacaaccaatatacattgtcatatgttacatattatttatttattacacatatttaatctatatattatattattataaataatataacatggtgtttgtcaaataattttcctttctcctactaaggaaatgagatatttttttaatgaataatgatcattttattgccctactaacgaattacaactcaagaacaaaagcttaactatagctcatatatgctcaaactaattacaactattatgactagttttctcattcttgaaaagagaaaacctattacaaatgcttcttttaattttttgtacaatactatcaatactattcacattctcattctacaaagatttatttctagcttcccaaatattataaacaaaactattaacaattgcaagataaacctctcttttaaacgtagaatgcttagtcctctttatcttcttaatgcaagcttgaagctctatttttttcagattaaaactttcccaagaaaaaaattatcatagctactatagagttgtagtggcagctgaagaaaagatgagtccaaatggtctccacaaagagacaatttgcttcagcaatgaagccaattttaaggaccttctatctactttgtaacatgatcaaacaagcaagctaagtaataaacttgtgtttaggaaaactttaccgattccagttggaagagaactaactcttcctaccatcaggcttcagccagagataagaacaaaatttagtaacgctaaagtttatttgagtgaagacatcttcttctacttttagctctaatcatgttcttggccatgataatattgagatttatgccctcaaaacaagttataaatggataatatattagaagaatatatcaaatacaattataagataactgatatattaattataagagtataattattaaatatcaaaaaattccttattcatatggtgaaagtatactattaagattatacaatatgaataaaacaagtcgatagtatattaaatttctgggaatctttaatatgaaactgctaagtacggtttactatacactatacttctagtgtgtgtgtgtgtatgattttgattcgatcacatatgaagatggacatgtagtaaaggtattgtgtataatattatgcatgattggaccgatatgtaataataaacatctttcattaaacttgtcctttaccaagaaaagagtttatcatatcacaatgatgatcattagtagatcagcctaagttctgagtatacatgaacatctatttgtgttcattgagttctttgagtcactcgtta

SEQ ID NO: 312289 - DNA, 3076 bp, Cannabis indica
atttatttatgtaaaattattatagtgtgaataaacaaaaataaatattatacttaaataaattttaaaaaaatgctaaaatgaaatcaaaatttctttttatttatgtacgtataaaaatataatctaaaatatgaataataaattttttattaaaaaagtaaaggtaaaatcaaactctaacaattttagaaggaaatcaattttaaattcttcttctaaagtgaagaagtaatcgatgtggggttgatttgaaactagaagtttttcaattttaagtcgttgggaatttatgagtccatcaatttttttgatctcatcatatagtttcatcctcctagcaacaccatcaacttcatgttaaaaataatcagcaagttttctaatagaattactcgcagaagcttgcatagcactaaattcttgctctgacttagaaagtagttcaaccaatagatcccacttatttgactttctcttagcatttcgagctatttgacttgattgtatattgctctgcatgcttgcattagcattcatctcatcaagtggatcaaaaggatcataatcattattctaactattatttatctcttatgcaatttcatcaagtttttctgataatcccattgcatcatctccagtagcatgatcttttccatatataattggcaattcattataataaggaaatgtcttgtttaataatcattttacagttgggtgactcggcaaaattatataacattaaagttaaaaaatttaataaacaattaataaagtaaattcttttatagtaactaaccttaatccattcatcaaacacaaattatcaactaccacacacttgagttcaaacatctagcaaaaggtcccaacatatatatatatatatatatcagaaattgttgtatattgtctcatgaatatcttgagatgagagtcaatgtgtggttgtgctttaattctataatttagaattttatcattcattattttttcaagttgttatagatatccaggttggaatgtatctttagcagctcttcattttccactgttacacatttctaccaaatatttcctcaactttaaatcctctatggaagtccattgatgtttttttccatcaactggtgtcgaatgagaagtagctttcatgatgtcttttacaagttaattaattataaacatgaattaaagataaaaataatatttaacaaatattaacatatatattgatcaattaaaaatatttcaccataaataataacttatcaattacaactctttaaaaaaaaattagaagcatttgaaaaaaatttaattaaaataataaaacttatcaaaataggattgatcaacgctgattttcttgtcattgctcaaacatttctctagctagattatctctcaaagcagtccaagcatctaatggtttaatatatgtgtaacaatcattatctttataatcaccatcttcgtcactatcattgtcattatcatgatttgtgctctaatgggtccatatgtatttcttctaatcaagttgttaagaagacaacaagctagaatgatgtgatgctgaattttgacagaatagtatgatcgacctcaaataatttctcatcttcccttcaacaatcgaaatgctctttcaactacattcctagcagatgaatgccttatgttaaaaaattctcgagcctatttggcaagtatgtctaatcatttaaatgatagtgatgtcctccataagatgtcaagaaaccttcaccattaggataacctacatcccacaggtaataatatcctacaatttatcaaatagaattttgagaaatcttgtttaagaataagtatcattaaataataatattaattaaagaaaaaaattgcaccgtgtggaactttaattccgttcctgtgtatagcatctcgtaaaatcaacaacacaaccctcacattcaggcaaaaacataaataaattgcatatcttgttaaaccactccaaatacattgtactaattttgttcttcctggttcgatatctaggcctatttgaagctaagacatttactttaatatatgttccatctaatgctcttaagcaattcttaaaccatttttacttttattggtacaatcatcacgaattatcataggtctttttagctataagtcatgaagacgtaacaaagcatttaatattatattgaaatatctactaatagtgcaatacctaattttttaaaattaaagatattattatttgtctaatcttatcattgaaataaataaaataataaatctaaaagttaaatatattatataattgttatttgaagaaaaatatctagattagttattatattttattattaattaaatttcaatgaagataattagatatttgttacatttcaattttaattaaaatataactaatatctaatttctgatcttataataaagtaataattaatcaaactataatatcaatttatgtggaaaaaataattttaaaatttttaaacctttttaatatctaaaacaaacttttataaataataaaataaaataaaaattaattttaatatgatatttctagatgttagatttgaaaaatatattctacataaaaattcataaaaattttccttttattttgccaaaaaattaatttttgaaccataaatatcaagatttgaaattttgggatcataggctgcaagcagtctccccggcccgcacgcacaaacctcggtcttaattgagaaaaatgactcttgcatacaccctgaccttgaaaacttggtcctttgtagggtctcgtgcatgcgtgcctcatctgaacgaggtgtggacgaggaattcaaacaaaaaatatctgatgcgcgtgcaaatgtaagggttttggctgagtatctcagccaaaccctaatttgtatgcaacaaccatcctccaattttcaaaacttgatatttttctcaattttagtccaaattgagatccttaaaatcttaaattacttaatttttcaccaacttttcaaataaaataatttcaaaacga

SEQ ID NO: 312290 - DNA, 755 bp, Cannabis indica
acaaaggaagaaaagaaaaaaaaaacatacatttcaaatcctctcttttgaaaattgtctcaatccacgaatctagaattctgagcatctctaattatagttttttaaataaattttttaagtaaaatagagaattaattttaaaaaataaacttctaaccataaaaaaaataagaatgaataaaaaaatttctacttttttattaaattgttttaataatatttttgatattatttttttcattattttattaaattagtttatatttaacaaatttaaattataaaatattattaaataattagacactaattgaaataaagagcattgaagcaaaaaataaaaaaaaattattttatttaaattttagctaaaaataaaaatataattgtagatgctcttatttattatttatgctttatattataatcactgtaaattttttagaattttaatttataattattaaatcaaaatataaatttgtttttttgtaattgtaatatattgtttactaatgaatgttctgtccctatcaatccatgtctaagaattaagaaaataaaacatcattaatacttaaacgatttacttagcactgacgaagaagaattccgccatttaagcattaattataacactaatatgtgactgtaactattctctctcatatgaccaaaagtttaatcattaagtatttgaatcaaattaataaaagaatctgatgctttcaaaaaataaaaaataaaagaat

SEQ ID NO: 312291 - DNA, 1817 bp, Cannabis indica
gggcataaaacccaacatttaaagcgagcgtcagtttacttatggccttgcccctcaaccactgcttctacagatagttctacatgcctcccaaccaaccatcaaacttgctatgaagttgctccattgtttctttcatctgagcagtaagcctttgttcctctttgagggctgcctgtgttgcttccaactgctcagttactcgcaccacactaggatcatgccgatagtagcgaccatctttataatatatgtctctatattagtaatcatcatcgtccgcttcataatcctctgtatttttgccaacaccgtggccctctacgaccttcttagtgttcctctcttggttctcagtagcagctatgccttctccaccatttccacctgtgtgtcgattgcataagaggtgacttcctcaataactgtatccaatggagtttctttaccggtattctttcgtgtttttaccatggtcgaaggacaatgaacgttaccagaatttcttcagctctcaatgaaagcacaaaaatgtttatcaagtttttcagaaaccaaatatatttagagcttaaagaaataagaaataataaacaataaatagacagatttttacgtggttcaggcgttaatgatccttagtccacgagtccattgtattggcctctttgggaaattattttttagatttcaaggtggttacagtaaagattactctacttcttctgctccacttgagagagagctttcttggaatttttgcagagtgtctttaagtaaaattgttctctcttttcttaaagaaaaataagaccatttataggcgcacatggggtggcataccctttaccaacctagggtttcgtgtcccatatgctaaaggacgatctgaccattagttggtacgaaccttcttcatcatgtggcgtatagctgttgtgaggacttttgtaagattcaggacacacgtcacgtaaaggtttctcctttgcaaaatactctctaaccaggccgttgggaaaaaagcatatttgaggtgcgtacgcgcactaccatgatctgacacgagggtcaaaatctggtcttgtgttagaaaaaggtgtaaccgtctatggagcgactttgcatgatgctgacatggccaacgtctacgagacttttatttcgctctgggtcctttactaaaggaagttacttccggaggtcatctgctcttgttacttcccaagtgcgggagacattctttttctcagtatcctcaaataattgttatcatggttgtattcttccctctgatcgtgccacgtgtcttatttgtgaagacttagataacaattatcctaggaagttgatatagatagttagacagaagagtggagattatccaagcttgaagatgaagctcgtctttattattattgaattaattattttatttatcaaacaatttagtttcaattattagtttatgaattttattccctatttcatatcattgcagacaattcatgagagtattaatttaatttttttctctttcaaagaattatattatgagttgctattatgaaattgagctttatatcctataataattatgctaatatcgcattatatttatatgtttatcatgttttttacatgtttaaagtttattattgatacataatctatggtataataatctttgcgaagatataataccacatatgtgacagtcagtagtcccgtgatccgtaaggggaaatactgggtaagctttgcaatcccacaccgcctgagaaagatcaagtgggatgattctgagactgtgtagg

SEQ ID NO: 312292 - DNA, 806 bp, Cannabis indica
ttttctatttttttctaacttgtaatttttttgataaaaatgaaataaaatccacataacatatattaaattcatttaagccaaataatacacatttaacatctatttttcaattaataaaaattactaaaagacaaaatactaatggggcaaaaagaccattttgcccctccacactaaaaccacataataatcactaaaggggtatttttgggaaattctaaattcccggccattcccgacattcccaatgtctaataaactgccccaaactactaacatactaagttgtgatttctactgagccaaacaccgagttccaaaataccgggcaccggaaatgcaaaatatgaaaactactgaatgacatagcaatgcatttatgaatttaataaataacagtataataaattatttaaatggctataaataatttccaaattaaactaagcggtctttacactttgcctctttggtcttgaagatgaagcatccatggtggtagagggttgaagagaataggaaagttaggtttagagaatgaaaatttgagagaaaagggttggaggcctctatttagggttaaaaattctgaatggggaatgggaaactcggtagtaggatttttctagggaaaaattgagtttgaaaagactaaaaaagccttggaattgccacctgctgcgaactggttaaccagttcgtcatgtatgcagaactggttatcctgttcctgcagcaagcagattctccaaaaaacggctccaaaatacgttttatccaaccattttgttggaattatttta

SEQ ID NO: 312293 - DNA, 973 bp, Cannabis indica
ttatttattgaataacattaaaaaactaattataaaactaaaaatatacataacctaaataaaaactaaaatataacttagtatatgtgcatattgtacgtaatattaacctagttttataatatgtgttttatattatttttttgtatattagtgtcatttttattattttgtaagttgtattttgtataataagtagtagattcaataataaataatttgtaatattataatttatatataacttaatattttcgtacatttaaaattaaaataaacttaatttttatattaagggattctctgctccatccctccccgtccccgatgaaaaataagcggggatggagattaaaatccttaacatggatggagataggggagcacttccagcctctccgccccgtgtgcatccctatttgttactacacaaggatcttttagtaatttttttgtacttaaattatcaaaatatttgtagcgaaactctttataatttgatattataacacatataaccttataatttaaaattatttcacgtgtaaccttataatttgaaattattacatataaaaccttaatttaaaattaatacacttaaatatttaaatttatttaaaatttcatttaaaatttaaaatttaaatacaaactagattaaaatctaataataattaagaaatcaattataaaactaatttaaaatctgataaaaattaagaaaacaattataaaacaatttgttatcctattttttgtaccatgacgtggcaataggagtggatgacacatgttccatatttttgttggaattattttaccaggatctagatttactaacaagtatgttattaacatcctaaacatgaacttctaaaataatatgaaataaacacatgtaaagtttcaggaaccttacagtggttgcagtggaatataatgtctcattccactaagatctctaaccctt

SEQ ID NO: 312294 - DNA, 1918 bp, Cannabis indica
aaaaaaaaaaaattaatctaaaagtggttgatgaagttattgaatcaaatttaattttaagggaataaaccatgacacattttgcatcattgacctatccccgtgtgtgaacaaattagaataagggccatatatcaatgccatataagaaactatagatgtatgtaggaaagaatgatgataatcatgctttgttgttcgaggaatttagacaacaccaaatatctactaaaaatataattatttaataaaaaggcacgagtactcaacttagaaggcgagtattcaaaggatttggcacacagacaaacaggaaaagtaatatagataatgaacacaaggaaattatagtggttcagtcagatcacggtctgtttagtctactgttgcaacgattttttgtccatccttattcatattggatcactcctttatatacaaagcaagtgtcttttttattacacaaaacttaattactgaacagttttgcattgaatatcaacattaaattaagaaaaaacgttaatggaataaatgaagaacagtttcgatctgatttactaaatatagcaacatacatgacctctatggtgcgagttgtctgttcacattcttgcacaagctcacaggcctagggtgcgtgtaggactaatgaacctttgtgttaagatatctgcgtcctagccgagtcgcatatacggataccctgttagtgttgataactcaggacgtgagagtccttaccgggtcatcaagcacgtcaggtcattcggactggctcactaagtgaagaatcgatctttactaattcacaggagaagcctttacggacatcgtatatatcttagtatacgcgagtcttgaacacggtcttcttgataatatgcgccttggttttgttaaggatcacatcatctcgctgagtttagttcaggcaaggttttatccccgagtggtctccttttgacagctcagcaatcctcgaggagagtgagtccacgtgtcatcctttcaggagcctgatctcaagtttctaggtgagatttttcaccctataacacactttgagttggctctgttttcttttgaatataaccacatgaaacatagctgctttgcgcactactagtgaacactgaaaaagaaactgttattattgtaacgtttttgaaataaagagagagcaagattgccctattgctgctatcattattcgtagtgggtaatgatatcacaactttgttaacgctatttgtttgttgaatgaagaaaccacttcattaggcacctgccaaaatagtcaaaaaaaatttacatcagatcaccacactcacgcaacatttaaaagaaaaactaacttagcgagtttatgagtaatgtcattagtactatgattatacaatataaacttaaacaaagaagaaccaccacaaagcttaagaatatcatgcagcacgaaatcgaattccgctaaatagctctcttctttagaaaaatgcaagaccacgcgctggcaatccatcccaatatccacctcgacataccccaatcgaagacacaactgaataccatgcaacacagcaatagtttttgctacagccggagagaaaagaccacttgctgaagttgacgtcgaagccattacatgtccatcatggtctcggatcactgctccaaacccccacccgcctctccaattgcctcaaacctgcatcagtattcaatttaaacctccctacaaaagtaggagaccacgggggaacaccagtagcagtagggagaggatgactcggcttcgaaatcatcaccttctttttgttagcatcctaaaagtcacatgtgaaagtcgaggcccatccaacaacacctttgttgacttcgcttttagccaacgacaatgagtctttttgataagcga

SEQ ID NO: 312295 - DNA, 1803 bp, Cannabis indica
ttaaatgataatttgttacaccaactatttgattttttttttcttacttgaattttggtatcaaaaaattgaaatgcatgatcagaccattatcagtttttgttaatgatacatttacatataggcttggagctggaccacttttgtgtttttattatccgtttgactgagctaaataatacattatccactttcattctttaaatgatgttatttatttcattactcttcaatttttgatctcttaattctttcactgaggtgaattatacattatccactttcattatttaaatggtgttttttatttcattactcttcaatttttcatgtcttgattctttgcaatcgaaacatataaaattaaaaattgttaatcaaaatatatataaataaaatatattgctcattatctatttgaagaacatgttttttcaaatatgggctattgaatatttatcgctagccacatgagacaagattgttcctcaaaatttagataataaaattatgacgccctcaaacaacaaacctaacttattaaaatacacatttttattattaatagcattcacttgaactagcgaatatgaaaaaaaaaaatacataaatttggataccacatgtatgagcctaattgaatccaaccaagagagctagagttccagcccttaacactaaaacattacatgaaacatcacaaaacaaaaataaaaaataaattgtattagaatggcaatagttgaaccaaataaattaatatacgaaactcaaattttaacacacaactcaattaactaccgaaccagacctgactttaggcgaggtcaatttgtttgtgaatgatgggcttcgtgataaagaatgcgaaatgggaatggggttgttacgtccaatcctaatggtcatgtcctcttctctagtgcgtttttgagtgtgggaacggttgagcctcatgtccctaaggccaaagcattgcttcatggactctctctttgcatgcagttggggtataagactgtcactgctttttttttattgcttgcaattggttcttgcagtaaatagtaaagatacttgtttcaatgagttttgtaataagcttaatgacattttttatgtctataaattttttaatagtatatccttgtctcattgtaaaaaggtttaagaatattgttcattgtttagcaaaacgagctcttgtttcagatgagtcaagtgcttggtggaaatttttcatattttgtgccttagaattgtatagttttcttttaaaaaagataatattaaaatattttatgaaataatttatttgatttatcaaatcaaataaaatcaatcaattgattaattaattactaaatataaaatattataacactctaaccataaccataagtatattttgatagataatattgtcccattcatgcttggaggcttttctaatagtctccctttatgataagcttggggatcgactttagactaagacgagcaaagctctaagatccactcattttaggggcttaataaaaaaaattactatttattcttataataaaagctcaatttttattttttctatgacctattttaactcaggatcctaccggtaaactcatataacaattgacaatatataatagggttatttgcggcaaaaccccctaaagtagggaagtttttgtaactaacccccaattctaaaatttttgcggtaaaaatccctaaactcaagttctgttagcagttagccattttcgtccatttttggctgttaactgccatggtggaatg

SEQ ID NO: 312296 - DNA, 1998 bp, Cannabis indica
cacatcatgagcaaataaccatcttttccactttttttttttaatttctacccggtgaatcatttactccttaatacaacggagatcaacctaatggtataaaatcaaaaaaggcaccaccttttctcatctttgccatttcaaaaatttcttgagatttttctacaaaaaaccccacccaaattttttgaacctttgcatgtcatctctgtctttgtcctacttcttgcaaatttcattagacctgtttttcgacctccagcatccagagagatcaccacgtcgtttgctgcattgtcgattacagaactgttcatcgcaccaaaacccgacttcaaacagtaagtgattcatctttctctatttcttatgtgctcttctattttacttttctaggtttgatcactactttcttaatttgcacctttgtcattatatttggttttggcgagtttaggttaaacttttctgggtaatttttagggtttaggcataatgtagacttttgggtttctcaaatttataagcttctggtttgataaatttcattcaggaatttggattgctttctttttgtaataatgtcccaatctggttcagaagtttatcgtccagaaattttagaaccagagtgccccagcgaacttgccatcccgtttaaacccagaattttgaaactccagtccaaatagagataaatgatgcaaatattagggaccacttactaaaaccccaccaagatgatattgctagttgccataggtacttcttgcaagaaataatagaaggcacacatcgtttcttgcgagatgctgcttggcctgaacctcccagtttatcatctattccttttgctaggcctttacttttacccagagtcaggattgctttttaaccaggtgacatggattttgaactcataacttcccagccacgtaaatcaaagactcccagatcctaacgttaccttcgaggcagaatttatcgagttgagggtacaagccatcagagattacgtaggtagcatcttaatgacttgttgcattaaccaaaaatgacaatgacgggttagatctgtggctcttggcgagtttagttgttacccactagaatttcttactcgcgaagcacccgaggggaccagtggcgaggggagtacgagtggctcgatagggataggcgcttggagccttaaccacatcagggctggagcaattctccccctacgagattactataaggacttcctcaaccatcttggaaatgccccattccagttggttcctatttcatatagaatccttgcaagtttaaaggttttgtacaaaattttaggatgggagtgccccactcccctagaaatagtatatctctactcggtgaaggcagtccctgcgaggaagaatgcacacatgcgatcaatcattgttgggttgccaaacaagacccctttcaaagaggacttcttttggacgaccgacctttccccaatcaacacaaccaccttcagtataataagtaagtgactatctgccttagacattgttttaaattactccatgtcttcaattttagcctcactagcttgcaatcttattattttgacagccatgtcaaaaagaccaactcctactctcgagatggctgagcgacgcaggctcctgctgggtcttccatatggtcttcggtcggctaagttccttttgaacgaggtcaacctgaggtctgtgggcctcctcgctaagaacgactatactagtgactatatatatcccaagtaagcatcgtggcagcacgttccaatcccaaccgatgaggaaattaacgattatgcggctcgggcgcacagccaccagaatgaagtccctcgaaaagctgaagaaggagcatctcgaggtaatcaatgtggttggtcaccctgtaggaaatattttaccaggatctagatttacaatcatgtatgtttcattaacatccttatatgaattctaaaacaat

SEQ ID NO: 312297 - DNA, 1179 bp, Cannabis indica
atctatctatttggtgattacataaatgtggggatattatttttcttttatattgatgagtgatcttgattttgttactaatattttcttattaatatagtagttaatccattatttttaagttagtattttgtgatataaattaaaggatcatttataagttttatctttctacaagggtcaaagggtgacctttgactacccaagttatggatattacatatctgccacgacctagggctcaggtcgtgacaataatactatctttttattttatgagattaaaaagggttttaaatattatagtatatatgatatttataattttaaaacaatacatacatatatagtgatataaagaaaatagtacacattgtaactgagaaatataacaaaattgaaattgaaattcaatatctctctcacgacacacatacacactctttctctctctctttatctatctatctatctatctatctatctatctatctctctctctcacgcctctctctctacaaggagaattggtgttttctcaatctccatcacagtgtcttatgagttgagaacacattttgtgatcagaaaatttattcatcctattaaatcaataagccttctcttatcatgagtattgatgatggtttataagacatggtgtgattcttcttcaagtccattactagattggatgaacgaaatattacacgaaaagatttaaggaaatcctaataggaaataagaggtaatttcctaattgaactagttaaatttagtttatgcgatattgtgttgagatccgagatttaatgttcatatcggattcaaaaaaatatttttttaaaaacccgaatccgttcacactttccctgcgactctgatatgaaccctaaaaaaccaacaacagtacctataaatgatatacatgtttgaaaaatatgtaatttaagagacctctataagttacgtcaatatggaaaaaaattatcatatattgaaattattatcaacaataaatgttaaatatttatatatgtgatagactaatatgagaaagaaaggatcatattattaaatttatcgagaattatcgacgtatattttgtttttggccaaaataatatgacgttgtccagacaagtttactcacataaaaagtgaagtaagacctgtagg

SEQ ID NO: 312298 - DNA, 1301 bp, Cannabis indica
ctctctctctctctctctcaacggttcactatccccgacccatcccaaaaatctgaccaccctctctctcctctcgcaggcttatactgtcgcccaggagacgcaccaccgttctgaacgccacgcaactcgcacgaagctcagttcgcgacgacaagctatgacagctaacccccacaaaccactgcgacataccacgacaacccacaagacctctctctctctatctttctctttcttcaaaacacaaaagacaaaccccataaccaccacctgtggagcaccgacgacccacatctggtcaccttacgatcacacgtgccgtagctacacgaccaccgatcaatggtgatcttacacctcaagtttagtggcaatcagagcaaggatgcaaccatacgaaaccttcgaagtttcatcgtcaaaacttttaggcgacattacgatcaactccggccaccatttgaaaaatggttggtaccgttgaaatcaccgtcgcgagaggaacatccctcactaagtcattttgcttaactctttacttttcctgatgagatttgggtatctccgaccctttgaaagcatttttcggcaattccgatgtttgtttaggctaacgggtagtacatctgtgatctactcgtcaaggggtcgttttgatatatactacccttattttcggcgatatttacggtacaccgatttctaccaccatcgatagttaatgtgcactgcttaggtgaggttttagaactccaaaatttaaatatagtcatattatatgtcgttggactcagttttgaatgtaaaatacaatgatgataattatttagtcatttgatggtacatgtgagagtgatatctaagattggactaaacaattggagctttagacttgagagcttaggataattttttggacaaagctcaacgacttgtgagaggtagggactcaacttgattattggacttgattttatatgtgttgaataatattagatatattccaatttttatgatttgcaaattgtttaaagaattgaaaacttaatctacatattaatctggactgttctggggcactgagtgccaaatataatttttgtacaaatatttatgcaggttataatttttaggtttattacaaaatacaaccgttatgctgctggaattttctagaaataaaagggaatatgttcttttgttattcttattattttcttgcttttggttatacgtatgatagatgttgagcatgatttgtgcatattgttatttcacgacctaatctatgtgtcatc

SEQ ID NO: 312299 - DNA, 836 bp, Cannabis indica
aaatttaaataaaagtaacaaaaaggacaaaatagatatttttaaacaatgtaatcaacattacaaagttttaaaaataaaagcaaacaatgtaatggtaataatgattccattacaatttccattacactaaactaaacatgctcttagttgtttattgtttaatttgatacaaaattacaactaggcaccactaaatggaactcaattcttatgatcttctccctcgcgatccgattttgttcaagtgtctggcgcgcccatggtcagtgcctcaaatataagaacactcatcccacgatggccttgtggaccatgagaagccgagccttagctggatggtaggtgtcaacgtgttggaagtagttcctacttacccattcaaagccattaacaaaatttatttaaattaaaacagttagtacatacctgaaatttttattaaataaaaactaataatagatcattcaactaaaaagatataaagagaagagttaatacctaaaatgtttatgagatgatttattaggttgttaaaattacatgatgcagctacaaaaaaattatgtagtacataccaatccttctttttagacctttttacttcactaagtgtgcaacaacaatacacattttattattttatattttttcttgtatatacatctatagatagcgacttacttttgtgggtaagaaaaaatactcaatttaggtgtgacggaggaaggagaggtagagtgatatatatagtacttgggaatgtgattgtgatttgtggtcttgtcctaatataaaatgaaattccgtattttaatattcccagtttgattatt

SEQ ID NO: 312300 - DNA, 1727 bp, Cannabis indica
ttgacagattgcagagatgctggggagtgaaggagaatgaggtgattgaaaaaatgccaaggttcacccgagattactctgtatttgtcacctgcacaagccatagttagcaaaaaaagatccatatgcatctcagaaaccacaacatcaaatcgacatttgttactccagaattctcccatcttcttaataaaagtttggggattaacagaagataagcatctggccactaagaaaaatttcggtggggcatcagaatcttggagatcagtttcagaaagggtatgaacatctctctccttctcagacaaagatagagtggtattcatcacgctaattattgagtccatataagagtgagtgattgagaatgaaaataagaagtgtaggtacaaatcatagattgtgagatgatgaatatatatagatgaaacatatttcaaattcgtccgtagactggtaagagcagcatatcgtgtatacttggagagtgggaagttaagagagttcatgggcaaggtggagaagatggacgagatggggaagaagatgcagaaaaatcaaaacccagaaaaccagagtaaccgcctcagagaaccccactcgggcactaaaaaaactttttctgatcatatattactttgaacaatagttaataatactatgtacagaaaatcattttaaaaggtagaaaataaaaccaaagtttaaagtgatgtgctatcatatagaaactaagatgtgcatggatttgcaatttttttgttgatgcatttttttttctacatttttatttttttattttttctaatgaatttaaattatagcctgcagagaagttcccaaaactattttccaaaaagtctctgtttgggaggtaagaatatgacatctaagttacatgtctatttattactcatgatctatattcacttttttatttgatgaatcttattaaataacaggttcccatactttttaccttgcttgttgatatcaatatttgctttgggtgtaactattgtatgtcgttggatgccggtatgataaattgctcattctactttagttctttatttttctgtctatttaatctaaagagcaaatgtaacttctcaaaaatagtaataagaaaataactaacttttcttgttaatgtaattgcattgagattattgatctttcacatattgataaatataaatggtctaatataattgagattattgatctttcaaatattgataaatataaatggtctaatatatatagtgtttcacacttatcacaaatattaccttaaggccataacctactagatagcaatattatgtcttatgtgtttagagtagtggtgaaaattagggttgagcataaaattcaaaaaatcgaaaaaatcgttcaaactaacctatcgaacatcatcggaaccgaaaccggtagaactgaaaatcaaaaaaatcgctaactgttaaaactgctattatgtgcaaagtaataatatttattatagaaagtatcttcaatgtcttatgagcgtggttacaggaaacacttcactttcatactaaaaaagatgaagagaataaacaatcatgtagtctaaaagacatgagctctaatcatgaatctgatcaaaacgaaaatttggatcaagatgaggaaaagtgccctactcctccaaaacagagtctttacaagaattggcctctaatgtcatctattat

SEQ ID NO: 312301 - DNA, 811 bp, Cannabis indica
ttttttttttcctgtttcacttttacgtatcaattgccaaagaattttttcaaaactctttttctaactgttcagcccctctctctttataaccaatttttttaattattttaattatttttttttgctgataaaatccacttaacgtaaaagtggtgaaagtggagaaaatatttccttaatttgctctcctttttgactgacccattcctatgctcatctaaccaccccaacaaataatgcacaggtagaaaacattatggatgatgggtcaagtcatattgaagatgtctccttcccacttactcagagtgtagagatgccaccatctaatactcgctttgacgcttcaagctctagggatgaagaacttgttgtctttgatgggtctgatgattatgccgataatagatttgacagtgaggcattacctgaagaggcaattgattcaccagaacccgttattacatcattagttgttgtttcctctagtctacctattcctttaccagatccaatgttggcaatgtcagcttcagcaatcatcaactccgacttgaatgagcacacaaaaaggtttgtgattgaatgcatgaaagacattcttcatttgttatcttctccattaacaacaacaaaaatttcaaaacatcgtgctgacgtgggtatgcaacttggcgtgttgagtaccctttgcgggcattataaatgtggcttagcagaggttgcatggttcatcgactctgtcaatgatttgctcaaagctcaagaaaagtctctcgcttctgctcaagttgttgagaatgccctt

SEQ ID NO: 312302 - DNA, 1021 bp, Cannabis indica
tatagaagtttaattggtaaactcatatacttgactataacaagaccaacatttcgttttcagtcagcaaattgagtcaatatcttcaagcccccagagaaccccatctccacgcagctcatcgcatattgcagtacttaaaaggaactcctggtgaaggcctttttcttttatgcctcagccaatgaaccaattcaccttcaagcatttgcagatgctgattggggtgcatgtttagataccagacgctcaatatcaggttattgtgtcttcttaggcaaatccctcatatcctggaaatccaaaaagcaacatactgtttctcgctcttctgttgaagcagagtatagagccatggcaaatgctgcttgaactaacctaactccactcaatccttcatgaatttggcatccaaaacaaactcccatcaacattattttgtgacaataatgcagcaatccacatttcataaaatcctatctaccacgagcacaccaaacatatggagatcgactgtcacctcatccgagaaaagataaacaatgccaccatcaaaatgaatcacattacttccaaatccaacctggccaacatcctaacgaagcctctcttccccagtcatttccacgacatagtttccaagatgaacctaaaaaatctctatagttatcttgaggggcctcttagaggcttagttagttcatgttagttatacggttattagtgttagttatatttggttggttagttatatccaccgactttcccctgcaatatataagcagtcattttgccattgtaaacacattgtattacttttccaattaatgaaaaaccaatttaagctcttcaaagctaataaggataacaaaataaagcatgaaatcaaatatctcttgattcacaaagttgattgtgcttgaaaggcttttggaagctttttgctttcgaggacatgtataatgagcctagctggatggcaatgtcatatgtgaacagtgacatgagaatagctactttt

SEQ ID NO: 312303 - DNA, 973 bp, Cannabis indica
taattaattacttatttgtgaccttttttcgttgttggatggagaaaatgggtacccaatcccaaattcaagtgcttcagcttcttcaaccattgccactctcacagaaaagaactctcattttcaatggagttcgactcaactcgattcctttcaagccaagtagcaatctttctcttcaaaacccaaagaagagactttcaatcgttctggcaagtggggaagacacagcttcgacttcaacttcagtttcagctgaggaagccactgaagctgaccctgaagacctcgaatacgttggccaaatcaaaagggtatgtttcagtttcattattgatgattagcctttacttctgtgcttactctcttactctcaattctcaggtattagagcttcttcgaaagaacagagatatgctgtttagtgaggtaatgaaatgataaagaaaagcttctttttttttttatctttctgaattagcccatttggtaactaaattgtactcttttttgtttgaatttgttttgtaggttaagcttaccatcatgattgaagacccaagagatgcagagagaaggagattgcttggcattgaagaatcagatggcccatcaagagaagacttagctgctgctttggaagaagtaacttccttccttccttacttcatttcatatttttcatattattcttgcttaaacataacatgtgtgtgcagagctttttttgtttagtttatttcgtttcctcctatgaaggagagtgttatcatgaaaaccagcattgatccagctggttgtacttttaggttcagtttttggtttcttcactaacatattaagtattatcttggaggggtgtctggtttagtctaaacatatataataagaatgatacacacttgtgtacatttcagttcttgaaagaactatgaaaagattgtttattgataagagcaagaacaaatacaaa

SEQ ID NO: 312304 - DNA, 582 bp, Cannabis indica
taaattcttttaaatcttacataataatatttaggcacatgcaagccttattcatgggtccaacacacttaaattaaataatagatagatgacaataacatatttctatataattactcatttttctccttcaaaataaatactgccaattattttgtgataggtctaagattatgttgcacatatataattgaactgtacattattattagtattttagccatttttgcaaattattttgtattaaatttgatagcaatttttgattcatctttgtaaaacagtatttatgcaaatttgatttaattaaggagatgacttactcaaattttgggtctgtccaattcatttctaacaactgcatttcatttatttttgaccaattgaaagtttccccatttcacacgttccaaattatattattacattacacaactatctactgattaatcattattatgtcaaaacgttgaactataacacctcatattagtaatatatatttatatatacatatatattatttatgaagataagtaagataagtaaaacactcacacatatagttatttatgaagttga

SEQ ID NO: 312305 - DNA, 2759 bp, Cannabis indica
aaagataaaaaagagatctaaaactttatgttttgactttttccaaaatatgatcagaacatagtcgaatttaggcttaaagtttcagctttattttctttcaaaaatttctctattttatagatcactattttccgaaatttgtccaatttctacattccaagtgtagaaacctgaaaccaaagaaaacaagcgtaattctattccaaaaataataataaagaagaaaaacaactataaaatgtgacccaaaacttaggctaaaaatagcctaacaggacattagttggagggaagtcttctccaaccgttctccttgtcttccttccttttggagtcattttcttaggtctgagaaccaaatgctaattagttagtgaggattggatgctaatagtataaatatgtcttatacatataaatatcaagatacttattactattattatttaaaataaatctaaaatatttggtgacacactccaaggtaattaaaccaggtgctctaataccatttttttgtcacaactcgagccctaggtcgtggtagatatgtaatatccataacttgggtggtcaaaggtcacaccttgatcacctttgtaggaaaacacttataaatgatcctttaatttatatcacaatatatttatttaaaaataatggattaactcctatatcaataagaaaatattactaacaaaattaggactactcattaatataaaagaacaataatatccccatagttacgtagtcactgaattgatagtttaataagtcaacaaaatactaaaataataactagcattcatcattcctcatttctaactagtacatagctaatttaagtcatctagaccatccattcaagcttaaatacaaaatcagtttcattggcagtttaataagtaaaataagacttaactaataacgatttcttcttcaacagtaccattctcatccactagcatcaaagtgagttcttataatgggaaaaaatagggggtgagcttataaagcccagtctgaaaataacttatatcaaaagacccttggtttaataaaaattcatgcatggtagcttttaaaataaaatatgtcgtcaccattatcaaaatatataaacaaagtagatagaccacaaataatcacaaaactaagcatcaaattcatatcacaccatccattagacccctagctctcaataccaatcatagaaaatgacatctaaaatcgggtagtcgcacctaataaccactgtaataccgaggctccgattcaattcactccctatacagattttcgggtggatgtacaaccaaacccaatttttgggtggtcaggtccagcagatttcgggtcgggtatggtgggtttgctgtggtcgggttcggattaagacccgcattaatatttgaataaaaaatccatacagtgaacagtttaaatgcctcaagcactctaaacgaaaataaaataaaaagtttgactcttatttcactgtggatggaaagtacaaataaaaaaataaaaaataaaacaaacccacaaactcatttctcaagtaaagtgacttgaatagacatattgaataaaatataactatgtggagactatggcctactcttgtaggtgacagaggtatagactctcacactttttaattttataataaatataaaactgtctcttcaacttttgtagtacaaaaatttgtgcctaattttcaggtttcggattaacacccaaattaatatttgcctttctttaaaatccgaacccgacacccgcgtggagaattttcgggttggacccgacccgaccacacgggtttttaatttttcggctttttttggcagcaggtcagggtaggtgggcgggttttcaggtttgcgagtctaaatgttcagccctactcctcacgtttgggcctaaaaagtgtgggtataatgaatgactcacaaggccaaatattgggaaatttgtagattttgaaataagtcaaagatcctaacattgaaaacaggcacacatagaccgaaaggtcccaaatggaggttaaggctcgtctttttggatcgacaacacttttggctcacaacaaaacacaagaggctcttttggaaattagatactcattagagtttagtttggctcagataccatgttagaatttgagataagatgcttgagatttcatctcaaaactaaatggtaatgggaggagtagcctatatatcttatatatggtattttatttctacacattagcaatgtaagattaactctaatactctttgctagagaggtatggataggggatgttgttatcttctctggttgtcttcagttttgtaatactttggagaccgatatctctcctggttacagaagttttgtaaggtttactaatgttgttagaatagctattagtttaaatattcttgtggattcattgtaatatgaataaaagggctcaccatattgcaggttgggcttccatggtagtattatttaaagaaattataatataattctctatatgatagtgtttataattataagacataaattatacaattttcaaaactccaaataaattacagtgatgaaaagaaagtttaaaataattaattgcatggtaagaaaaaaaaaatgagcgaagtttaaagtttttaaaaaaggtaatttagggtcaatgtaaagcccgcttagttaatttggaaattagctgatgtttatgattaattatgaaa

SEQ ID NO: 312306 - DNA, 545 bp, Cannabis indica
ttttttttattctaatttttttttatattttttaaattttattcttccgttcctattctaattctcattcctaatcctattcttatattttcattcctaccaaccaaatgtcaccttaattcttgtatctatctatctataaatttttataagagagtaccgcatcaacttttattataattttttagttaattttttatttaaaaatacattttgaatttatgtgaatatttgttttagctacaatatctgtaaatttgaaatttttttaaataattaatatacaatgctacaaataagtttggaattttttgaatatgtataataaagttgaatatcaaaaactttatttttggtactatataaatacaaattaaaaatgggaaatttgacaatatatgcttaaaaatagcatatattgttttaatatactatgtaaaaaaaaattaaaaaatactctccaattaattataatcccaactttaccctccccatttcaaactttcactctccctctaactctcagttttctctctctctctctc

SEQ ID NO: 312307 - DNA, 1061 bp, Cannabis indica
aaatttgaaaaaaaaaaaagttaaaaaatagtatatgagataatacccctatattatttaataatataatatataaacgtttatgtagtgaattgataaataattcaacctgataagtaaaacttttaaccgtgtaattaattttatattttctaaccgcaaaccagaccatacctatgtggggtgcaaaatattgtgattaccaatgattgaattactaattttatctatctgaaaaaaagtttttaattttatatattaaagaaaaatagattttcttttcaataaacatactcataaaagttttttgctatagttatttatggttacaagttttgtcattcgggatagaaattgttaatgcggaaagaagataccaaaagtttagtgtaaatcctaaaagccttgtgaggaaggccttgtagaatccagaaggtagataatcttgtaccgtttgtgttggaactttttatgaaattatgtaaaaatagaaaagtgaagtgtgtgagtaggagtcccacatgggatagaaataatttatttgaagtgtataactagcgcaagtttaagatatgggtttgggccccaaggggtacccagttttgtgcgcatgggtgaggactcacacactggaccaccatacgtgcgcgcaccgccgccgccgctgctgaccgaccaatccgagcaggattgggttgggtcagaagtagtaaaacgcgatcagtcaataatccgctttttactcccacaatccaactcctccacgaacgataaacaatgtaagaatacatcttttccaacattaaaaaaatcgtttctttcttccttctcagagcaaagtttagggtgtaacagagcgatatagttcggtgcagaacatatcgtaagtatacagagactgttttatcatggggacgccgtggttgctagactgtcgtgcacacttcgggcagagccacgaaacgtcttaaagagagcgacattatccgcgactcagccagattattctatcggtaattcgttttagtttcattattttttaatttcggtttaacaatttt

SEQ ID NO: 312308 - DNA, 1212 bp, Cannabis indica
acttattttaacccttcaagttcaatcatcttctttataacttagctataaatttagagatgcatttgtacaaactccaataaaatgtatctctacatgtaggtatggagagagtgagcaaaaatttttttattagttttattactttattaactttttacaattatatataatgtaggctaattaggattttcgcccctgaactttgacatgtatcaaagcatgccccctgaatttttaaggtcgttaaaaatgccccttggactattgagattgttggatttaaggacttttgtctaatttcattcaattttactattttcgtgattgtttatgtactaaaccatgctcctcagactttgatatctaccaaaccatgcccttcgaactttgacatgtactaaattatggctcctgaactttcgtccatgttagatttttttactaaaattggaaaaaagtccttaaattcaacaatctcaatagttcagagggcatttttaacgaccttaaagttcagggggcattatttggtacatgtcaaagtttaaggggcaaaattcctaattaagccatataatgtataatataatattttgattaatttatatattattaatgtattaaaaatatataaaaatagaaaaatatattttaacgatgtagataaaaatatagagaaattaatatatggtgtaatgtaaatgtgtgatgtaaaataaaaaagtaaaatataatgaattattttaaaaaataaaatagaaaagctgatatggatgctaatgcttatcaatatcattatgagataagatagggtaaatgctagttacatactctataggcaatgggtttgagaaaattgcattgtatacccattttattttatttgttttgatttttacttttattttcttattttttaagatatacccgcttttatagatgatattctcgttataccccttaagttaaagtaaattatgtgctagatttaagtgaaaggtgagagtattttgattaatggatataaaaaagaaatatttctcaacttatccctaaagcttttagttaggaaattagtttattttagcggtgtaaatccttcaatagtgaggttaatggtgattaaccttttattgggcttggtaagtcttgtaaatgtattttaatttaatttaatatcgaatctcatatattttaatttgataatta

SEQ ID NO: 312309 - DNA, 1400 bp, Cannabis indica
cttctagctatgaaggtatttgtctcgaagatgagaactgagtatagaattcttgagagaattcttagtcattcgagggttcgccttgtctttgttttatttcgacaaggtcttctagctatgaaggtatttgtctcgaagatgagaactgagtatagattcttgagaaaatttctcctaagagttaaaacttcttaaggcctgattgaaatatcactttgggctgtttcaaacaaggttgccaaaaagatccggcatcacacatctctagttacttttgggagatctatttggatctcaaagtattttatgtgtgccaagggattttcttttccagagtacatcttccaagcttgcattttgaacttaggtaggggcaatgcattggtatattctgagaaaggtgatccccttgatctgtccagttctaggtctgacaactttgggctggacagacctttaatcatgtctttgagctgatccaactgtgtttgcatagatggatctgttatggcagcctcttttccaaacagccctccttggctggccaacgctccttggtcggccagaattccttgaccgaagaggccttattgactggctaggccaaccaaacctctacggccggccaggctggctggtggataggtcaggggaagatcataccaatcactcagatcaggtggatctaccagcctaaggtcattatttaggggcagaatatattcatttcggttctcccttcttaaattatttccttgtgtgttttcattcagcctaggacttatcctgttgaaaatagaatccctaggcctcgattccacctgttattggacatttggacattccaggggagggaattgtcgtactgcccgaccagaccctaggcgatcatcacaatcctttgtctgggattttccttcctcttaccatcattccttggtgttaggaattggtcattcttactgtatggtctgtaaggcaagacttgtctgtcctcaagcaagacagagtttggccccttattcaagggacttggacgggttatttgtccattgtctacctgttggtagaccttgttcgtcccgtttgtcgatctctttagtaagggatctcttatcaaggcctcacctctgaagcatgttctctcattgaactatctcatcagttcaatggcctcttgattgcggtggttcagttcctcttgatgggcccgcagggtggcttccttggtcagccaggcctccttggttggacaaacctccttggccagccagctagggtctaaagacttgtcttgtttctgacttggaagctactcaaagtgtacctatctagtttttgacacactgtattccacatgtatttcgttttgactatgtggacatgctacatcaggt

SEQ ID NO: 312310 - DNA, 529 bp, Cannabis indica
aagcatctgggatcggtgccaatggcccagactccaaatcacgttgtgagatagatatttttttaaattattattatacaaagtaataacaaaaaaatacaaatatgataattatattataaattaatcatactcttttataatgcaaagcaggtatatattgagatcttccatggctcagctccttcaatttttccctatttgatgcattaattgatcttcgaacgtttctatcaaaaattaatatggagatactaatatgtaaaattaaaatagttcagtaaaaattcaattgtgatagaataaaactaaaacaccttcactttaggtagttcaaaaatacgatggcctttttccattggtctatagtgcatccaatatatagatttgtaggaccattattttccaagtgttctttgggttcatgtttcaatttgtaatattttttagtacaaaagttatcaatgcctgttaacaaactaaagagatgatctgattcatatctttctcgaccgatatcgaaaagatt

SEQ ID NO: 312311 - DNA, 676 bp, Cannabis indica
aagatataccttggttatattttacctcttcaacaagttaagtaatgatcagcataacaactctattgttctgatagagagtgatgaggaagtggaggggacccccctcggggtcccgtggttgcggcgcgaggaggtagaggggacccccattggggtcctgtagttgcggcgtgaggagctaggtggaggggacccctcttagggtcctgtggttgcggcgcgaggaggtggaggggaccccctcagggtccagttcgtggcgcgagggagtgggcggcacaaaggggcagtgacccccattttgttggggcccttgtggcgtggcagagagggcacaagaactcctctcctttgctcccccttttccatcttcagtatttcattgtgatcttatattctcactttattttcgatcatagatggagagtgttgagcatctaaaatttagaatttattacccactgtatcttacaactgtaaaattcatgctaaatctataaaattcatattatttagcattttttctcattttaatccacatgatgtaattgaccattagcctaaaacaaaaagaaaacaaacgtaaacctgaacaaaaacaaataaaaacaactaaattacatactaaaatagactctaaaaatgcataaaaataaacctaacaattgtaaca

SEQ ID NO: 312312 - DNA, 3099 bp, Cannabis indica
aaaataaatttgccaaataaatataaattgatacaattattgtatgataattagttaaatccaaattccaaaatatgtaattaattaagcatttataaacatataatatcttaaatatttatactcataatatatttgtataaataaggtaaatatacaaattagtacaatttaattaattgaaaatgaattaattgcaaaatccaagaaaacgcatacttaatgatagattatcaattaattcaatcaataaattacttaattgataaataaatataataattacccacttaattgtagaatattcaaatatatttttttgtataaatcagaatttccattgctccaaaacaaataaatacatcctaagagcaccaaagaggcctccatatatactactgtacaatatatttagccgtgtatgtctaaaattgttacacaaaccttctttttacaattttctatccaacgtttatcttttgctgtagctttttttggacaaactctacacactctattctttaccattaatttgatctgttgcatcagattagagatcgtttgctgatttccattccacaatctttcatttcgagtaatccatagagtatataccaacgctgctactgctgaacaaagcacctgttttatggttttcgagtgtctccctttctcgattttctttgatatttccaccagagttattgatgttccagcagagccatgccttcacgtgatctagtagatcctgtgacaaagaacacgaaaagaacagatgtttgactgtttcatcagcttgcaaacagagtagacaagctgcattatcaataatattgtgcctgtacaaaatttctttggtttttaatctgtcctggaatgctaaccacagaataaagctgtgtttaggaacatttgttctgcaccacactagtttactccacttcttcgtctctgaaaccggttgcagcaatttgtatccacctgaaattgaatatttctcagctgtgaagttggttaggctcatgatgcttttcactctatcccttgcttgtacaatctttttccaataccagctgctggttgggggagctttgtactcccaccaatccccttgcttgatgtaaacactgtgtacccatttaatcgatagattgtctttttttttttgtagcaattgaccatacatgcttgataagggctgcttcattccatatgggtgtgtttttgaagcctagtccaccaactaatttggacttgcataaagaatcccaagctacattgccagctctatccgccactccttggttccatagaaaattcctgcaaattttttcaagttcagcaatgattcttttaggaagaatgagaagttgacaccaatatgtgtgaattgtgagcaacatatgatagatgagaatcgctctacccgcaaaagaaatattcctggaactccatactttgatctttactatcattttctgcactaagtcattacattcttctgctgagattctcttggcacgtatgggtaccccaaggtatctgaaaggtacatttcgtctactgaacccaaacatatttagcaccctgtgaatttcttcttcctgcataccacaacaatacacaacagttttatgaatgtttgggaatagccctgaagtaagtgagaaggtcttcagtccttgcaacatgagatatatacttttaaaatcgctattgcagaacattagacatcatctgcaaaactgagatgatttagtttaatgtctctacacctgtcatgatagccaaattccttttttcctcccactttttgcataatcctgcttaaatacgccattcccaagacaaataatagaggggacattggatccccttgcctaagcccccttttgggttcaaagaatccatggaaagagccgttaaagagcaaggagaacctaggtgtggttacacatttcattatgagtttaatgaatttaacaggaaagttcagggccagcaacatttcctccaaaaaaccccactccattgtgtcataagccttttgtaagtctagcttaatcatgcaacaaggtttagaacttttccttccataatgcctgattaaatcttgacatatcattatattgtgagcaatatatcgaccttttatgaatcccccttaattatgtgagacaatctcagggaggattcctttcaatcttgtgcatatcatcttagttgcaatcttataaataacattgcaacaagctatgggtcgataatcacttacattgtttgggcatttcacttttggtataagggtgagcacagtagaattgatctccttcaggattgctccagagtgtaggaaagataaaactgcttcagctatatcatcaccaaacaactcccaaatctcttgataaaaagtgcttccataaccatccggtttaggggcttttatactcggaatactaaacgatgttgctttgacttcctcttttgtatagtctttttcgagtagctgaatgtgttcactggtaagcattggaccttgctgcactatcttctgattcaccagcttccggttttctagtttagagcccagcaattgttcatagaaggagatgaaggctttagttacttcctcagggttatcaactctttcaccctctttattcacaatggagaagacacgattttggcttctcctttgcttcaaagactggtgaaacaagctagtgtttgcatctccttcatttaaccaagtcactttagctttctgttgtaagaatgagcagtaggctttgttcacatctgtaaatttctttcttgcttccaattcaagagcttgtaactcagaattaagagggtcttggtgtagctttgtttgactatcatctagctgctgcctagctaaatgattagcattttggatatccgagaaaccttccttattaatctccttaaaaacactcttgagattcttcaattttttcaccacttgatacatccttgtgccattcacctgctgtctccatgcactttccaccattattcaaatattcacattcttaaaatatcgaaattattataattacatgtaaaaataaa

SEQ ID NO: 312313 - DNA, 1524 bp, Cannabis indica
ctttaaaagcaaagtttaaagcctaccatgcaacattaaacaaatgaagattaacttaagagtactcaattttctattgaaggaaaaaaaaatcaagtacaatcatcggtctttttactgtttacagttccacaatattatatagatcaagatacaaatagacttgagttaagaacccctttttaatcgctatgttgtaaattattcactaagatcaagcaatgacacttgcacgtgaaccaagattgatgagaagagcaaaaacatgtgagtgaatatttacctgggtaggaaaatatctgataacattagcagtatttcctctccagagagcaatgataccttcatccttgatggttctggcaaagcagtcactgattcctttgtatggctcagaaagccgaccagccctgatcatctcatcctgattttgaattaagagtttaatacgctcaattggagcagcagcagttttagaaactgctgcagaaacacctcccatgaggaaatctacagcaaaaccagctacacctttttcagcaggagcttccacaaagacaggagacacgtacgagacatgcgccagaccagtgccctggcatgttggcatggaaccttgcccatctactttgtaatttctagcataaatgttaggggaaagcctagagatcaggtgagatttcccatgtattttctgaaatacagattgatgctgatacggatcagccatttttccagcggagtcggtgacctgcaaatgaagaaagaggttagtttcatttacacttaaggaatgaacaaaggtaattttatcttcaagagcatcaatcgtggcccataagaaattcacatgaaaagtgaactaaataaaacaagatacaaagaaaacctctcccccaatgaaaattttaagactgcaagcatggtttctatagtttacaatgccacaagcctatcagctcacacaaaatgaaaaggcaaggcaaacgaagtaaatttattttatttatttattattttgtttttcaaaggcaggggattaaacaattacagtccaaaaagacaaaaaatatgctacatttatacaattcataaaaacacctcactaaaaaacaagcacaaagttctatttaaatattaacccagaaatgatcaattttcaatattaaaacgaaaatgctccattaaaattataaaatattatgtgatgctaaggtgatagtctccagcccagctcgcatataactgtatgcgttttggtttctactttctgcttcacaaagaagcttggctcagagaagcagtaacacagattgaaaatacgtcattactcacaacttaaacccgaataacatcagaacagagcataacgcatcacaccattaatcactcaaaaaattcccaacctattatgagttttcgaggtggtcatcacataaaaggtctatcaaggtacatgtctgagaatttaaggaaatcccatctcaaatcaagtaccagcgttggcttttttttttttttttt

SEQ ID NO: 312314 - DNA, 602 bp, Cannabis indica
tttcatgcaagaaacacaaagagggggagactagggaaaattaccttgagccaaagcactcaattacaactgaaaatccttgattcagaccaagctactccaaccctagttgttgcccaaaaaaatcgagagagaaagaaagagttgcagagagagagaaacatgtgtttttttttctagattctcatgtttttcttttaacttaagtataaaacccttctttttttttatttaattaaaccaataatctgaactaaattcccaaataagacaaaataaactcttgtgaaaagacctttttgcccctcttaacttaattcaaaagttaataattctcaagggtaaattggtcatttcaaaccccaaaaattccccaaacctccaatacataacaatgatactccaccactaaaaacattctaaaccatcaaaaaaggtgactctctaatggcctaacatcgctttccacttctaccgagcacaatcataaaaatgagaaattcacatatatagcataattaatacatgttaaaatgaaataattctccacaaatgtgtacatcataattaataattaaatctcataaattaaccctaattat

SEQ ID NO: 312315 - DNA, 652 bp, Cannabis indica
ctaaatgatcaaacttaacctctctccaactggaagaactagtccctagagtgtgcaccatagcttttacatcaccaaaaatcttaactaacttgtaaatgttagatttggcatcatacccaaatccagaccccctcacatccacattggaattgggaggagggtcaggtccccggacgaacttatagccgcggattgttggattaaagaggagagatgataaatggtttttactaaacatgtgaatgattccattacaatgagaaatttgtaagcgttgccttatttctaagaagacattcactttttcaatgtgacaatgaaaatcatcagagacagtaactagtgagagaaatgtttcagagtgattgtaacgatcccccaaaccatgtaagcaaagaaaagaaaccatcttctttttcttggcatttttatggtattggtggtgtttgattgagaataaaggatcattaataagattaaaccaagatttacaaacgaacctacaatcatctgttagagaatcaatgtcatccactctcaacaaaatattctccacaatctcgtttggaatcagccaaaatctattcatttttcttcctgtatgtatcaaattcagtcatatattataatatgctatatatatatatat

SEQ ID NO: 312316 - DNA, 1405 bp, Cannabis indica
tgaatttaggatccatgagatcatgatattgttgttacggatccaggcattatacagagtataatcggaagaagaaggttttggaatagatccattgaggaaacccaatttatttttgacagagatagagagctgcatagctctactccaagaaacataattttcttgtccaataagaagttgagagacaaaaacattacctggattatcttcgtgatgtatgtagtacgggtttgttggatcttcaataggatttcttgagttgatgaactgcaaatcttgattaccatgcccaattgaagctgaaggactttgaaccattcttggtgtttgatcttcaccttccctctgggtttcagcttgatgttcgcttgacatgatagaagaacagaagaatagagagagaatacgcagcaaataaggtatcggagaagaacaagaatcgcgataccgtcaccgaagaagaggactaggatcgatcagggaaagtatatctttcccgctctgataccataatgcggaaagaaaaaaagaaagaaattcattttattaatctgaaaatgacttaacacaatacaaggaagaacagagtatatatacagatgcaaaaggaataaaactaacacctaattaacaggagccgacaattaactaccttctgacacaaataactgaaaagggaaacttgactttaacaataaaccagctaagtcaagaaggagtagaacagtatataacagtatagaaaagaagcaggagacttaatatacttaatagttttttttccctttaaacttttgacactaccaaattatgtcttttaaaatatacagcttattaaaaatttctcaaaaatataacaattatataatcatgtatcttctgttagattctgtttattttgtcgtaagtaattaatatttttaccgcttgaactttgactaacatcaaaatttactccattctattgaaaaattaattttaaaattataatattttattaattcataaaaaataaagaaaattattaaatgcctgataaaattcttagataataaaaaagaaattggagttaaaaaaaatattaagtttacttaataaaaaaatctaaataattcttaagaaaaatatatccaagcttaattttattgacaaacacatatcttaaaaaataataaaatatattataaaactaaatattttaagcaaacaaagattttgtcaaaaaagaaaaaaaataaacttatctatatttacaaacttgcattttataagattattaaaaatccaacaaaaaaaaatgaaaatttaaactaaaaaaatattatgtttactttaacaaacctagattttgtgaaaataaaataaattcaagcttgttccaacaaaattgaatattaatttc

SEQ ID NO: 312317 - DNA, 2491 bp, Cannabis indica
aactgtcttgagggtggtgtttgaccaaggtaccaagaagcatggcctccacttgctacacattgggaagtggatgaagtttatcaatgtatattgtgatgtaaatggaggattctggcgttgttcatttacaccttcaacaaagtttagatatactcatgacaaggaccgtctcgtattagagcgccaaaggttacatgcttttactaagactgttacttatgacatgtcttatttgattgttccacacagtttcattaattaagttttgtataataattattttaggttatacaatgagaggaaagtttgaaattcgggcaaaatccatactggagctttccatggacttctcctataaattacaagtttgttaatttgtatgtatagttaatttataccgttcatcatttgaaaattatcttcaagtgaagtgatggtgtgtttatgtgttttatcgtcgtgcagaggtgaagtacaaagatttaccgattgttactttaatggatgttcttacatatccagaggtatcatattttgttattctattcgattactcatatgtatacttcttcttgtaccgtctttctattccgaatttattctcattaaccatccaaataaatctaattctaggatattctagagttatcaacataattctaggacattttaagaataatatggtttcacacgtcaaacataggtccactgatcggaggttttatcatcaactaaactaaaaatttgttaaggatcaaatttacgtatcaatcttagtcgttttcttttgttcaaatgaaacttcattggctttgtcaaatgcatttttgttgtatcaaattatcaatcttaactaatttatgcttgtttaatctcataattaacaggttacagctaggttcttatgtgttgtacgggtcgtggcaatgtatccatggcaggctaaagatttctcctttagtggaatttacagtgttcgcctaaccttaaaaaaatgcaactgatcgaattcatgcttatttgtatgggaaagactatgtaagtttttgttcatgtttatttgatttgatatgttatggttttgttgtgcttgtgtctaaaatcctgatagtcatacctgtggttttgttgggcaaggccggggcaaagacctagatagcaacccagatattctaggtcacggtcccgacccgacccgcaaaaaacccattttgccacccctaacaattgaaccattactgttgtcgcctttatactttctttggctctttttatttttgcaaaaatattattctagttgaaaaataaaacttagcgaaatgattttgatttttccaattactattttgcataaatgtcatttgcattaccattgttatcttcaattgactgtattgtattatttttaacttatgatagaataaactttttggcgatcaacccgccatccatgtactgacaaggaagcaaaatgcattgctcgaagtggcaacgaatgatgatgaaaagcaagtgaaagatggtattgctagaaatctaccatggttgcaatgttgcctgaaatcttattattcagataaatcatatatttgagaaagtcaacgttatcgattttttggcactagattagtggttgattaggattaggataaggattaagattagatagtcatggtcttgtatgttggtttgaaagaaattgtataatattagtttttagtgacaattggtttaaaatagtcatctacaaaatcaaccattagtagttggtgtagtttgaatatctattgctagatagtactaatcatattttgacactaatcaatacatatatgtattaggtgttttggaaaaattaatggtatgtatgttatgtatatgcttgtttgttgttgtagaatcctatcaatgattttcgctacttgatagaagatatacttattttgttgtaaggtattgagcatttgtaattttgtatggggtattatggtacctaatattacttcatattacttattttattctaaaaggtaattggtgataaaattctattatgttttagttttttatatttaaatttttttattggcaaaattttcttaagtttattttttattttttgtaaattttaagtgttagtttagtatcatcgttaaatattaattagataattattatgtatatttgtgtatacatgacagtatactttcgaaatcaatacagtattaatttaatcgatatttaatagttatatataattagtgtctcaaatttataaagaaaaacaaatgggagttttgttgcaaataacttgtgaagaaataagaattcaaagtcaaccttgtgaacatatcttgaaaaatcgggtttttcaaatgtcaataatatatgcgaaaatataaaactgtatacgtctgtagaagcagaatctaattttgttatcgcagaaaccagttttgcaacgaaaaaacagaacagacagaatata

SEQ ID NO: 312318 - DNA, 1000 bp, Cannabis indica
ttgatgttgaataaaatagattacattaaaatggagttttatttagggcataaaacccaacaaatatgtggtatttttgaaaactacttgaaattcagttttttttaagattatcaagtaaaatcaactaacaatttaattaatgaggagctgttataaaattgtttgaacataatcagaatctattctatcagaaatcgaacctaatagattagaaagtgaatttgcaaaaattaaaatgacacacgatattttatacgttgtattaacaatccttgcagattgctactagtccacaggaccacacctagagataagattcattattcaaattttaacaagtacaaagtaattgacttaaacaaaacatagaaccttctaatgattttttcgcaagcttgatgtactcctttttgcttaatgaatctccttaagacaccaaggtttcaactcccttcaaagtacttgatgaatacttgcttcctcccaatgcaagacttgtagaaatcttctcccaaagatagtggtgctcttgcttcctcccaatgcaagacgtgtagaaattttctccccaagatactggtactcacgttcctctcgatgcaagacttggatgaaccttctcccaaaaattgctctttatgttcttcagtttggaatttacttcacataaaagtaatcacaaagacacacaaactcaccaagaaatagcagaacaactatcctttacaaaagaaacactctcttcaaaaaatattcgaaattaagaagtggaatatttcaaccttttgaaattggtttaggtgatattttataacaccctgactagcataggcgtgttaaggtgattttaaacatactgtgcagctcgttgctaatcaacgaggttaatgaaaatcgtgattaattaaaatttgcttatttatttaaaaacttatagtattacgtacataatattttgggatcccgtttacaaaatactttacaaaagtttgctatt

SEQ ID NO: 312319 - DNA, 2873 bp, Cannabis indica
actaatcaatccatttaagccctctttaacaatgtagtcccatacttacacagtctcagaatcatcacactttaccttccccaaaaggtgcgggattgcacagcttaccaggtatttccccttacagatcgcgagactactatctatcacaatcatggtatcaaagcttgtgatcccatagtaactgaagtaccgatctgaggatgtagctcatgtttttcttctaattctgaacatactaaaatgtcatcaatgaaagctatcacatgcttgtccaggaaatccttgaatacttagttcataagatccatgaatgcatctgaggcattagtgagtccaaaagaaatcactagaaactcataatgtcaataccaagtatgaaatgccactttccagatatcctcttctcaaattctaaactgatggtaaccagaacgaaggtcaatcttggaaaagattgtcttacccttcaactggtcaaacagatcatcaattctaggtaaaggtatattttttcttgatagtgagcttatttagttctcggtaatcgatacacatgcgaagcaacccatctttctttttcacaaataacactgaagcaccctaaggagaaaaactcaatctggtaaatcccaagttaagtaattcctaaacttgaatctttaattcccttaactccactagagccattcgataaggtgcttttaatattaattcttctcctgcaactaattctataacaaatttatctctcaggaaggtggtaatctaagtaaatcctcaaaaaatacatctagaattcacacactaatctcgtatttttaggtctagctgaaataggctgactagtatccactgttgtaactacgaatcctatgcaacatatgcgcattaggtctctaactttcaggattgtgattctggctatgtgtgaccttgtaccttacccacaaacactgtttggttaacactatcaagttcaaacactactatcttccacgtgccatcaatcattgccccgtgcttggacaagaaatccattcccaatattatatcaaaatcagatggatgtaattcaattaggttagcgattaataactgtcaatccaaaaagataaagacctaatccatcaagtagatacaattaggtttactgaaggaagcagagtcctaaacccttttagcatacacatcaaaaggtttatgaaaattttccattactctacttttttttttgaaagaaccattactctacttgatacataagaatgagtagtcccgaatcatataatactgaataagaacaatcgttaatagacaactgacttgtcaccactgatggactagcatcaacgtcagcctgagtcatagtgaacaaacgccatagattctaattgttgttcttctttggttcttgtttcttagattatggacagtctctgataaaatggcccaccataccgcattggaaacacgttttggctcggcgctcaccttgatggtgctttttacatttgggacactccgggtaagttttaaacaaagagaaattcattttctaggttttgaaaccccaaaccgcctatctctcttctttctctttagttgataatttcaaactcaatttgtggaggaaaagcttgaatttggtgtggaattttggtggattctcttacttggaacttggagagcattaggtaactattttaatctcttttgcttgtgtgaatttctggatttaagagttattaatggtattttttgagttcttgattattttgattgcgtgttgatgagattaggagaattatgatgattattgtatggttgtgttataatttagatgctagattcacccttgtggttttggtaacctttggattgagattttgatgtttgaattctaggttttaccttgaattttctaggtttttactttaaatatcctggatttcaaagcttgttgattgtgtgcattcttgatttcttataacatgtgcaatttgtgttttatgggttggtctttgagctttttgttaggctcattttaattccaactttagattgattatgtgtagaataaattttgagctatgtatgctaatttgttaaattttggtatgagtttgggtaaaagtcgaagacatgaaaaattgtgttttggggggttttagggctgtcttcgtgaccacaggatagctcactgcggcgagctccaccaggttgtggccgccgtggcgagggcccctattttcccagtttttgcatttttcttgtttttgccataagttttgattccaaactccattttgcacgttcttggtatcgttcaaaatcttgttttgagctctatgtgttcatctataattggatttcaaatcatgtatatatgtgaaaatgaatttaagattaatcctatttgtgaaatcgtgagaatatgtgactaggattaccgatgcttgctcaggacacctggggatttagaatctccacatacttgaattactaggtaagacagtaaactatcacatacaaattagtgcagtggcgctcatgtatgttattttgtatatgctacaaaaatgtctcttttgagttcagaagtttatcctttcagactcataatacccagatgcaccaaccgatttccattcgttcctatagacttaaagcctcaaccggagccggaaacgatggattccagggctgaggagcttccaaccaatcgaaaccaggggaaccccatgtcctaccatggccgattttcacaagtgatcctagagggtatagatcttgtgagcgatctcaaagatcctcctcaggctggtgaagaattctagaggaagatttgcatggttttaggtggatctagg

SEQ ID NO: 312320 - DNA, 966 bp, Cannabis indica
aacataaaatgttatttctgatctttattaataagtaaatctgattataggaaatgagttttatttagggcataaaacccaacaggtagctcctgaaaggttctcggattgagaaggccccctaaattagtaggttccattggggccaggcccctagaagttccctcggcgtcaccggcgcctgacgcaatctcagggagggcattgagcagtgtcccaatggcgtcatctgtggccgaatcgtgctgggatgacacgccaaaatccgactgattggcctcctcaagcctcgcgctctgctcttctttgctttgcttttacgtttgggagactttgccataagccactttcgccgggcagcagtctgagcctcgatctcctcgacggtcatttcagactacctcattttgggaagatgaccggggtaggtttctgcaaggcgggaatgatcctcagaaaaatctatcaaaattggttctggtgtttgattcaagtgtttcagaacgcattttaagaaatcaggccaaataaaataagaaggataaggagtggggatacctagggggatcctgagttcacgaggccaggtggaggattcgattaaggcttcactggaaagaagaaacttgattgaccgaagcttaggatctagggatgcgaccttacggaccttctcgtaaaaaatatctccaataacagtctccgcgttttcggtggaagctgcaaaagaataccagtattaaaatcaacatcaaaacatagcagtaaaaagaaagggcgaaacagaaatagagaaggaaagacaacaaaatggaaggacatcctaacagcaggggtaaaagaaataccaggagctccccagctttggctgataaatggggccgtagggtcatcggaaacaaattcaatggggcctttagcaaagaagaacctatccttccaccctttatgagaagtctctaagtc

SEQ ID NO: 312321 - DNA, 1249 bp, Cannabis indica
acaaaaaaaaaaaaaaatcgacagcataatggctatattttgaataaatccaaaaatcataacctacataaatatttgtacaaaaatatatttggcacacagtgccccagaacagtccaaaaatatatgcagattaagttttcaattttttaacaaatttgcaaatcataaaaatttagaatatgtctaatgttatacatcacatataaaaatcaagtccaataatcaagttgagtccctacctctcccaagtcgttaaccttggtccaaaagacgatcttaagctctcaagttccgatctccaattgtttactccaatcttaaatattactcttacttatactatcaaatggctaaataattattatcattgcattctacattcaaaatcgagtccaacgacatataatatgactatatttaaagtttagaattccaaaacctcaccaagcggtgcatattagctatcggtggcaataaaaattggtgtcttgaatatgccgccaaaaatatgggtagcatatatcaaaacgaccatctcgatgagtagatcacaccaatgccaaccgtttgtctaaacggtacacgatatcgccgaaaaggggcggagctacaaaaataccactggcaaaagtagtgagttgggtgaaatagtttagtgtagggtgttctcctcgacgagctgagtctagtggttaagacagcttgtcaaacgaataccggaagtgaccgaaaaatccgttcaaagtttgttctgccaaactttaacttgcgtgttggatttatcacaatatttggtgctctctttccgtcccgaagcacccattcattgtttggcaaaccttatatggccacaagggatagtcatattcaatataagagatacatgattttttaaaatttagtattgcaacatttataattaaaacaaataatatataaataataatgtgtgaaataataattatagtattttttgaagggtgctataccattgaagtatttttagaagagtgtcaaaaataatgtgaaaaaaagataaaataaaatatttcatttttggatgatgtgaaaatttttagcacctttaaaaatgctcttagtaaccaatatggataattgtacgatgtggtccgtccactcacgagcattgctattggacactaaagtacctagcacatctataacatgatgtcttataattagttagcggttttctataattattaatatacaaattggtttttta

SEQ ID NO: 312322 - DNA, 3405 bp, Cannabis indica
tttttaattgaaaaaatatcttcatataataattattcaaaataagacaaaacttatacttttctaactataaacaaaagtaaaaatttaaccaaacatgactaatatttggaagtttaaattatatcaattatctttgagattatccaactactatagttttgtcaagaatgttggaagttttaagttttcaaagaggtgtaatagtaattaattcatgaaataataaatgtgacaaaagaaaaattataaatatatatagaagaggaaaatattatatgtatatataaatataaatataaatatatatacatttgaatgtagtgtaatgatatcatctatccaataataaattagaaatctttgagttttaacccatgctttctctttttcccatcccttatatatttattaaggatatttatagtaaaattaattattacactgatctgttgggttctagtatgcaaaacaggaagaatgtgattgcttatgttatggatatggaacctactgttactgcacaacaggttgaatttctttcagctcgttttacttgtgaggaagtaaagcaagctgttttagatattcctaggaataaagccccaggtcctgatggatttttttagttttttttttcaagataactgggagattgtgggacttgtggtgtgtgatgcagtactatctttcttagagacaggccagattttgaaagagattaattctacagtactcactttggtgcctaaggtcaagtgtccaaacacagtaaaagacttcaggcccattgcttgttgcaatgtcatctataaggtagccactaaactcatctgttctagacttaaacatattctccctgagcttgttgcacaaaatcaaggaggatttgttaaaggaaggtatataggtcacaacattatgatttgccaggatctactcaaacattatggaaggaaggccaacaagcctagttgtatgatcaagttggatcttcaaaaggcttatgatacaattgagtggggattcattgaggaaatcttagtagcctttaaatgtcctcctcatttcactcaacttgtaatgaattgtattaaaacccccaaattctccttaatgtttaatggagcgttacatggtttctttgcatcaaaaatgggattaaggcaaggagatcccatgtctcctttgccttttgttttgggaatggaatatatgtctagaattatgaaaaatattggaaagaaagctcgcttcaagtatcatgacaggtgtgagaaaatgaaattgaatcatcttagttttactgatgatgtgcttttattctgttatgtagactgtagcagcgtgatgtatctttttcagggacttaagcttttctcaatgacatctggcttgttccccagtgcaaccaaaactattatatattgcagtaatatgcctgatggggatttaaaaagaattattatagcttctggcttttccaaacaggtactgcaatttacatacttaggagttcctattggggctcaaaagatctcgagtaaagactgtgcaatactagctgaaaagatgacagggagaatcagaacatggagtactagacatctttcttttgcgggaagagtagtgttgatcaactcagttttaatgtctatccattcttattggagtcaagtgatgctgctacctagcaaagtgatcggggaaatagaagctatatgcagggcctttctatggaaagggcaacacatgtttcaaggggctggtgccattgcttgggacacagtgtgtcaaagcaaggcagctggaggtattggctttaaaagagtgaaagagtggaacatggctgccatggtgaagtacatttgggctgtagctaaaaaggaagagagcttatgggttaaatgggtgcacacagtctacatcaaagaaacaaattggtggtgctactcaattcccatacaagggagctggtactggaggaaattagtggcactgaagaaccaacttaactccttggtggatactcaccaattcgaggcaggtacttataacatagcaactggttatgctttattttgccctgttcaggagagattgaggtggagtgagctggtttggggtaggtttaatctacctaaacatagtgtcatactaaggattgctatgcatggaaaattgagaacaaaagaacgattgcataggtttggcattattgataatgctgattgtattttctgctgcaatcaagtggaatcaaaagagtatttatttttcaattgtagctagacattatagtgttttacaggtgtggcacactggctgcaatggaggagttcggcccttcacttagcaggtataattgggtggattcagagggtgcgaatgagtagatttaaaaggagagtgatggcagctgcccttgctagcctagtttacaatgtttggagaagcaggaatgaattaatatggcaaaacaaaatccccaatgttgaacaggtggtgattcagattaaaagaaatgtcaaacaaaggctacttcttatttggccaaggaaagtaagcaaggaagatgtaatgtggtttaataatttgtaaatttatatagatacacatcgaggcctcccttattgtgcaatgaatggctgatttccccaaaaaaaaaaatcatctaaatttagtttataacacttaactctataacttaatttttaacggttaaatccactgaacctccattccattgtggtttttacacttctatttaaaaaaaaaaaattagttacatatcatggtggactgctcacatgtacataaatatacatgtgacaaatttttaataaatccacttaatattaattcttaaaatattataaaaaaataatttaaaaattataaaataagataataaaaagaatatttttttcttttctcttctttctaaaatacccaattgtccatctccttcctctctctcccccgatatcactctgtctctcaccctcttttgcgtaacggtgctgtccaggccgtgctccgaccactattttcccctagcctaaaaaacccaacccagtttctctcacttagactccctctcggtgacactctctcctctctacgaaggacagagacagagagcacgaggccccaattgtggtcctttggcctaatgacccaaatggacctcaccacagtggtccttgacctgtgaaagcttcgatttggatattgaggtcagcgaggtcgtatggggttccgacaagagggagagcattgctaggtcaaaggagttcttcaaaacaaagataaaaaagagttgtgggattttgattttgatttttttcaaatctagatctatgttttttgtttgtttgattttagagaaatgttggtggtggt

SEQ ID NO: 312323 - DNA, 1341 bp, Cannabis indica
ccagaaatcagcaagcccaactcgaattttcagcaaccaaactcaaccaaatcaccaccaaatccatccaaactctcaaaacaagatcacaattcatcaagctccaagatagggccttaaaatacaaataacatgcatcaaaaccaacactttaccctgaaaattcagattgtaaaaaatatctcaaaatcatgcttaaactcacaaacttcaagctctcaaacttgagcttaattccaacctacccaaataatttcagcaacaattattctcaatcaacttgaatttaaggtaaagaagaaatcctagaattccatctatagctcaatcaaacaccacatcaaagattcaagcataagcatactcaaattcaagaaaattagctacaactctttcatacatgcataaacaagattatttcacttaattcatgctttttcacaatattttcagcaagcaattcaactaaaattcagtaaggaaactaccttacttccaattcaaagccaaactcaaacaatttccaagtatcaagctccaaaatcacccaaactcccaagcacttcttcaatttccaagattgcaaatcaagagggtaagagagggagagagggtcgggtttgagagagagaaaggccagaattttctttgtttttctcttgaaattcaatcaaaattaaggtatatcattaaaagttaaaaggctaaaatgcccttaggaccaattcccacataattaaacataagggcaaaaatggcattcatgcatatttaaatcccaattaaatatcacattatcaaatattaaataaaataccaattaattcaatccaattacatttcaggcctgaacccagtttgacccgaaatatccagttgtgactataccgcgccaacctatcagaacacgcctaaaaagacgacacaagcatactatataataatatagttccattaagcacataataaaagggtacgttacgatttttaaccctaattacccctagattaaccccatccctcagatcaaataactcccccatctaatggttgtcgtacatcacggaatacattcagtgaaagtacatcacaggacaaaatcgtatccctatatatattattaaaattatatataaatataaaatacatatacattaacctaaaagagatctgtgtgggttttgatttggaatttggtctgatttggatgggatatgaatatggttgatttgaggatttgatatatattagaggttagtgggtttggatttagggataatgtttacaatttgagagatgatgaaaaataaatttaatctttatatatatatatcaatatat

SEQ ID NO: 312324 - DNA, 869 bp, Cannabis indica
taatatcttgccatttccattctagaagactcaatggttgtaataatcccaaaggcctctaatgctcttctttcacttattgacaagtcaaacaccatgaaacataatccactatatcattcctcatacatggccaccaatacatagattttaaccttggtacatcttagccgtacatggatgtacagaataaggggagtggtatgggattaatccagaatatatttccttatatcagtgtctataagaacacatacacaattcataaactgtagcacatcacttccatccacggtaaagtccttaccaactaaaacttatcacgatagtactcaattaaactaggatctctatactgagtttctctaatcatttctcatagcgtggatttcaagataatattggctaactgtcccacaacaaattccatgatagcctttgtcatttatttgcgaattgttttgaaatctgttttatattactcaattgcccttgccatttcctgcttagggcatcacctactacgtttgccattatccaggataataaaagatttcacactcgtaatcctttaccaactctagctaatgtctctatctcatattctaatccttctcagtgaagaaatactaaagcttttaagatcggttatattttacatttctcgccatataggtaatgccaccaactttttagcgcaaataccgttgctgtaatttgttggaatatattttactaggggtgaaaatcggtcagttatggtcagtttttacaattttataaccgacctgtcggttaccgtttttattttacgaaaaccgtaaccgaccgtttagaaattataactgtataaaaccgaccgtacagtt

SEQ ID NO: 312325 - DNA, 977 bp, Cannabis indica
acatccaatctaatccgatctcacaattggatatccaatagttggcggtcagttgtaactggatcggtcagttgtcattatagatttgatcaatttattcacacccctaactgaaactgggattaaggtcccatttggcttagcttttataagttttttttttagtttttagaattaaaaaaatccttctaaaagtgtttggataaaaaatgaaaagtaataaaactaaacagaatttgaaataaaagaagtaaacttaagtgattgggaaacaagatcagtgtgatcttgagcttaatacatggggaattatcagccttcaatggttatagtatgaactttattaatgccagaatagagttaaaatctaaggatcgaaatcctcttctcaatggagtcttgctgcttacactagaccttaccaactgagatttcaatcaaacacatgaaagagtctttttctcatcttaacacactacgcattgacttgtatatatagtgtttggtaggtacacttaatggctgagaaactaacttaactgtcaaaaacagttaattgattaagtacgtaataacatttagaactggttccatagctcaaacctcaacacctaagaatcccattctccatagccaacagaagggccttataaatcaccaaaggctctccatataggaccccattaacatgaactgagtccactgcaactaagtggaatctttagactaattccttctagtacaattaactagtattataaatatatattataacctagatctaggtcacttataatgtagtagaatactttagtgaaggtacgtacctttttactacgacaaaaaagactttgttttgggattttagtaacatgtaaagaatttgtttcggtttgtgtaaccgtcgttatggccgtaaatgcaaatactaattttcttttactttggttatgaacagcaagaaaaaaaaaaaaaaa

SEQ ID NO: 312326 - DNA, 1531 bp, Cannabis indica
agttatggtgtgtgcatgagttaaatttgagtctataatatcccatgagatgttatgagtttgaatttaaaatagtgatattctaaacactatacttaagttgcaaagttttgttgtcaacaagttccctaataaaatgatgtcttaagtcattgtgtattgtacgagaattttaaatagaattttggaaataaatatagcactaattttatcacaaaaaaaattattaaaatacctaattcaaaatcataatcaatcgacatttatttcaattgtagtaattgagtgcaacaactactagtggctatgtacttagcctcagcagtggacaaggagatataattttgtttcttactatgccaagaaactaagttgtttccaagaaagaaacaaccaccactagtactcttgcgatcatctgcattacctgtccaatcaacatcactaaagaaagccaagctagaactagtatctttatgacatacaagattccaaaattaaagagtactattgacatatcgaataatcatttcaatagcaaaaacatgagatttcataggattactttgaaaaagagtacaaacacctacactataacatatatcatgataactagcagttaaataaaataaaataccgatcatactatgataaagtgtacagtctacttttactccatgttcatcttttgtcaatgtcaaatttgtgctcatgggagtaatcacttatttagtcgattcaaggccaaacttcttcataagattcttggcataattgatttgagaaacaaagttcctcgttccatttttctaacttaaagaacgaaaacaaatgagagctcaacagccatactcatttcaaactcatttttcacttgatcaacaaaaatctacacttcatggtaagatgtagaaccaaatattatatcatcaacatatatttgagcaatgattaaatcaactttaatttgtttgatgaaattagtttatctatactactttgataatatgagagattagaaatggagttattctctcctacaaggcacgaggagcatatttcaaacaatacaagctttttctaatttgtactcatggtttggaaaatgaggatcttcaaaacccttgggttgttcaacaaaaacttcctcactcaaaatgtcattcaaaaacaaagatttcacatctatttgatacaatttgatatcaatgacacgagccatacacaaaagtaaacaaatagaattctaatcttactattggagcaaaagtttcatcaaatttaataccttctatttacacaaaaagtagtcctgatggcatggacatttatatttgatacgaggcaagaaagaaaacatcttggtattgagtagtcccaaatcatagcaagttgacctgggaggggtccctagccttgcacccaggttgactttgggaactcaggattgggtgtttggatcattccaagttgtttctgttgagttttttgccctaaataaaactcatttaaatataatcagatttactta

SEQ ID NO: 312327 - DNA, 712 bp, Cannabis indica
actcaacctaggacaagtgggatactaccgagagacccccgacgtccttctcgatccaagagggaaggtgtatatacgtacctaaataggggacgtgtatctaacctcttccaaaggagaaggtcagtacaagacgaggcaagttctagctcgagacgctcgaggtctcgagggcacaattgatcaggaaggcaaacacgagatggaagcagaccttgatgttatgctgatgaagaaatcatgagcaatacgagaagctatcaatctcagagttacttcgatacgagatcggtgagctattatgagcgaagacaacctaatcttagtgagcatttgaattgaaaacaacccgatcttcgcgagggactaaatcagaatgcacctgacttacaccatcaacttaatgctaaccaacaataaatggaccccatccagttacgaatcattaagttagaggataagtttagaaaataccaggatggggagcatggcaaattaccttgctgtgactcggatgaggaaaccaagccatttcatcttgatattataaattctaaattccctcagagattcaaaaatccacacgtctcatagtatgatgggactatgaacccagtcgctcacctgaataacttcaataccataatgcgagccagcaacgtctcgaataatctacgatgcattttattcccaacatcattgactggggcag

SEQ ID NO: 312328 - DNA, 1393 bp, Cannabis indica
ttagggtgttaatgaacatacttgtgagtagatctaagatcctggtaaaataatttccaacaatagaggtgcagcttcaaatttggatatgattgggaaaagccatacaaatctggtaaaattatctacaaaactaatataatatttgtatccatcattagaggggtaaaaggaggggctccatacatcagagaagatcaattgaaaaggcattgtaattttatttaatgtttgcttgaaagaaaactagtgaagcttgtctatttgacaggcagtatgaaaatcaaaattattacattttgtattaggaaaaactctagacaggactttggttaggaaattcttcgagggatgtcctaaccgacaatgccaaattggaacagttttaaatctgtcaaaaataggattacaagttgttgtgtaattgaaaacatgaggattggaatcgacttcatttgatgaagttgtgtagacattcttggatttaggggagggcacttggtgttgataaaggccatcataacaattccccgaagaagaacttgcttggttgtcttgtccttaataagacatgaaacatactcaaattcaatagtaatatttttatgtgaagtgaactgggaaatactgagcaggtttttagtgaaagtagggacatgtaaaatgtcttttaatactaaagatttggtactagactgtgtaggaatgacagtgttaccaatttgatgaatagggaggatagaacaattaccaaccactactttggctttgcctttgtagtctgcagaattggccatgttttcaggggtgttggttatgtgatttgttgctcctgtgtcaagataccaggttcccgatagattaggtacattgggaatttctgagagattggcttgtggattagtattgggaggaatcgaggaagatgatgaagcttcttgattaggaggggatctagtaaggtgatatcaaatctatggtagcatttaagcccagtgtgacctgctctgccacacagttgacatataggtcgattttctcttccacctctatttccttagccacctctaaatccacgatagccacggcctggattgctttgatagccacttctggtgttggttgtattggtgagatttgcttggacattcgtaagagattcagttgttagttgtttgattctcatttcttgactgtggagcataaacttaacctcttgcaaagttagattattagttcgagaggttaaatttacaatcgctgcttcatatttggagccaagaccaccaagaatataaagaatcaagtcatcactggaaataggttgtccagttgcatcaagagcatcaacatactatttcatcttcaagaaatattcatcaatggagagtaa

SEQ ID NO: 312329 - DNA, 1686 bp, Cannabis indica
gatttgctatcacgaatctcgattgtccccagttcagtgagctcctgaaccatcctttctacgtcctcggaggacagtggacccatagtcgccgctctagcgactagagtttcttcctcagagatagaggttggaataaagttatcttcttggtctctgtcaccagcaaaaacatcacctctagagccaagcaattggctgtctgataagtcgctcatgtgaaagatataagatcttttcagtgtggtgaaagtgggagaataatagaagtgacctcacctgcacacaaaatataagatttccttggaaatttggtttggcttctcaaaaaatggctgggtgtatccccgtaacccaaggggcatgcgtccttaagcatgaccatggagttactaggaaacacccaccatttcgagaaatccagccaaccctcccaaggtgtaaattgcacgtgtgcaattagcagaacttcttaaaaaatggctgagtgtatcccaatgacccaaggggcatgcgctcttaattatgaccatggagttactgggaaacacccaccatctcaagaaatccagctaatcacaacctgtgaacacatcacgcatatccaactagtgccgtacctcaagaaactgctgaggagtctcttgtatcccaaggcatgtgcccttctcgcgcagacattgagctaacagaaactcctcactattttgagaaaacctactagttgaaatccgtggtgatgcagaaagggggaacactgactttatgttgcaaatggcggggtgtatcgtagtaactcaccggacatgcgatcgcactcatgaacattgggctacggcgacacacccaccatttgaaagacctaaccattattcccacacaaaatacacagagagtataaagaaaaccctaagttctaaataatgggtcagaatgaccaaatctccagaattcctaaggaagtatacatgcgagtattcaagatgttcatctcaatactcgcaagtattcaaaatggcaagtaaaaagacacgaatattcaaagtgttcttcctagaattcacggttatacaaatttcaggtctattttctgagaattacccagttctaatagaagaataaggccctatgtgtattccctacgaataagcatgcattttctattcctcaaaatttcgaaaatacagagtgtttctcaaaatcagaaactaaattcgaaagtagtttcaaaaactaaccttgagatttgacgattccccctgtgaatagttccagttgtttcagaagccttgaagattcaagaggggaaagtagaaatctatctaagagagggcttttatctttgaagtttcgaagaggaggaaaaggagaaaatgaaaatgagagggaaaataagggaatcatttagtatcagaaggcttaaataccaataaccctcaaaaattgggatcgtgacacgtggcaacaggaatgcctaaggtcatcccatccaacggttaaccatgggcacgactacacgaaaactgaagagtttcgtgacgtggcaccataagcagcataaaatgcaataattacagctgtcatttttttttaaacccttgatgggacaaccaaaggtcaccaccttgtgacatctcttcgcctccctctagattatagtttccctcatgaccgcatctgtcaatc

SEQ ID NO: 312330 - DNA, 681 bp, Cannabis indica
catgcacgaagtcaaccagccaccgccttgcgttttcgtgccctctccaacgatcttgatcgtatacggaaattgacggtcagtctcgaaatttaaattcattacctgtcatctccattgtcgtcgtgaacaatcgaatgaaacctggaccctttgggtccaactggtttcaccatacaatggaagtaagcatgagatgaaaaggacctcacggtccctaccctatctgacgtcgaagacgatggaaccatggacttcacaatcccatttcgttctatattcacaaggaccattcatggtccaatcaccatcaattttaggaccttcgacatccgatcctcacattgcatgcaaagcatgctaaggacgttagacgtccattcaattgatgccctggtcgtgcacacgtattggacctgatcgggtctagagtctttgacctgttttgcgtgagaagaagactcaaacaggttttgacttgcatgatccgcattcggctgctttattagtggccttccaggaccaccgtggtcgtggtgactccgtagaacccctggcccgatggtggccatggtggccgaccctaagtatataatatatctttatatattaaaagtgcctatctaatgacgtttcttggtttaacagaatataccttaaaaataaaagaatattctgtta

SEQ ID NO: 312331 - DNA, 542 bp, Cannabis indica
cttggacttgatcaatctcagaaattagtaaacggagatttttggaacactaactatgatagatgcgttctttcttcatcgctgtcaatattttttaatttgaattaactaggtggggtttgtggtgtagttcctctaaataaaaaatctccataagactgtcccagtaatggaatgttagttgtttctcagaagtatgttcccggataactaacttgtccattcaaaagaagtctcgtagaataatagttgccattcaaatgaatgttcatggataactatcgtgtccactacgagtgtagtcttctagagagccaaccttcctctgaaaaggagtttcagttggctagttgttcctcctagaagggtgttctagatagtcatctccagctgcgtctttcatatctagaagccccttcagcattcaattctgtccgttgtccagaaagtgtgtctcttccgaaagcacctcttcttgtgttggcgtggagattttgttacgaagcgtttgttaagtttgttaagtcgtaactaacttaaca

SEQ ID NO: 312332 - DNA, 861 bp, Cannabis indica
gtattttccttcttgttacaattgatataagcagaaagattgcatagtaaatatagaatacactgatcgtgggatttggacagctttccatatctctgcaatatgatccccaagttatagggatttccgtgatgactcacgatgcgaaagctgaattcgttgagtgttggcgttctattcggattgcccactgctcagtttaaaggacattgtccgagcaaatgcacgaattgtcctgttcgggtcgtgccttacgagtagatacctagagtcgattccacgtatcaccatcaagatgccacgtaaaagtgtagaaattgggataacatttgccccccaagtctgtacgggacttctgaatttgcgtgtagactttattagagctatctttgcatttgatgggtgacacgtgtcaagcgtgtctgttcgtgactcaatgtgaggctgactgggcgtcccttcgatttttggctaataaatgctctgacgcaattagtgctttgaaatccgattttctctcaccacgtttgatgattgcgcttgattgcttttgatcccatattagcttttggggagaaccgaggcgtctgaggtttttcgaaatgattacccttttttgttgtttgcctataaataccattgagcatttcttcacaaactcattttcacgaaccttctttgctaagtaagttcagagcgtaaagataggtttcgagcttcgtgtttgctgaagtgttttcacaagaattgctcgtccagcttggcgtaacctgaatccatacgatcgatccttgagtaattttccaatttcttttacgtttactttgcacatttatttttctgaatgcaactttaactttg

SEQ ID NO: 312333 - DNA, 1470 bp, Cannabis indica
tataatctaatttaataacagaaatatgtaaaaaatttattttatataatattatattttctatatatttttaattttgtttttaaatataaatttgtatgtatttaataaaaatattttgtagtattttaatgttatatttatcaaatctaaaagaaaaaattagaaacaagtatataagaaattttttaagttgatgttatttattaatatcaaataaaatataaattatttttttaaaaaaaaacataagagatttaataattatttattttattataattaatttaatttgaatactttatttttttttaatatataataaataagtaaatatgattttagtataaaaaaatttattatagttttttaatcaaaatagctttttataaaagttggttggaccaactttagattttagctgtaacttttctaaaaattcttcaaatttttttttgattgtttaccaaatacatttttatgacaggctttttaaataaaacttttccaaaaattgtacctaacagaccctaagtatatacccaacagtttgtaactgttgggaaaagatgcagttttatgtagagctaatatcggtcctcaatcacaacattcaaactcttgtgcaaacgtttcatggttttaccaatcgtgttgagttatgggaggccaactggatcccgagaagattcaattgtgcagccgactttgtggctcgctgggcaattcaatctgcccagtttgggacgattgaattggccaattttgacagttccctgtcaccttgggaggcagatggctgaattcggttttttttttttttcgtttttttagttactaggtctgatttagtttgtttcgaagcttagttctgcttttttttctggtttttagttttcgtgtagttcttgtgttgttctgctgttgtgttgctccttcgaaagtaacagttatcaaaaaaaaaaaatcttggctccaaaatgatttttttactttttagtgtctaaatattaaaaacaatatatataatacccttcaaacattgtcgtttacaaaagaaaaacaagaagccattaatacctaaggctcaaatatttcagacgactatgagtatgagagtccaagttgaagctcctttcttctcagctcctgtcagatctctctaatccgaacccttatctctctccttcaaaaaccctatgttttgtacacaagtcgatgttctctttcgttcccacaaaaatcaagggtttttttttcttcttcttcattcctctttctatctctggtttgttgtaagagtttagtttagttctacagagagattattgattgattgtgttcatttttttttttcaaattaggagaatcgctttccttttcgatccagaaactcggactcactcgcgctgcaggacagaaactagaggttcaatctcctcttatctcactttccatttttccagtttg

SEQ ID NO: 312334 - DNA, 3695 bp, Cannabis indica
gagtcattatattccgctgcagccaatgtaaggtttactaaactttatatgtgtttatttcatcgtgttagaaagttcatatttagggtgttaatcaacatacttgtgagtagatctaagatcctggtaaaataatttccaacaagaatgaccccctagtcatggaagtacaaacaggaaacaagacagtggcccgaattatgatagacaatggagcctcctcaaacatcctcttaagacaacatatgagaagatggggctccaacttaaagatttaatcccttgtacccaacttctgtatggcttctctagccagagtgttgcacctctggggtaaatctgtctacccctaactgttggacaagctccaaggagcataactctgattgcacaatttctgataattgatgttccattagccttcaacatcatgttaggccgaccgtccctatctgacttgaaagttgtcacatcagtttttcatttgtgcatgaagttcacaacaaagaatggggtagggtgcctccaatggaatcaaagaatagcacgggcatgctataaccttgccctgactaaggtgaaaaaggaaaatgccttcggccagagttcaggcaaggggaaaagtattgcccaatagggagtcgcccaaggcggagacaagacgtggatccccgacatggggaaacaaatacaaatgtagggtcggtggaagaattggaagaggtaaaaatcaacccaaatatcccgacttggaaactcaaaattggcaaaggtttgttgcttgaagtaaaattaataaaatttctaaaagcaaacctagacattttccctggtcacaagaagatatggttgatatttatctttctgtaatatgtcacgccctaaacattgacccaaacttccgtcccgttttttttttaaaaaaagaagactattagacaaggaacgagcacaagcattaaaagaagaggtagaaaagctacgtaataacaagttcatcattgcagctttctgcccggtgtggggagctaacactgtactagtacacaagcccaataaaaagtggtaagtatgcattgactttttcgatcttaacaaggcgtgctccaaggactgttttccacttccaagaatagattagctcgtggatgcaaccgcgaggcacgagatcctaagcttcatggatgcttatttggcgtataatcgaatcataatgcatccatcagacaaagaacatacaagtttccgaatagatatgggtctatactgttataaggtcatgtcgtttggtctaaagaatgatggagcaaccaaccagagattggtgaataatatgtttaaagactagaccagatgaaatatggaagtatacgtggatgacatgctcgtcaaatccaggaatgctggggcatatagaggacatggatgaatgcttcaacatcctcagaaaatacaacatgaaacttaatcccttaaagtgctcatttgtagttagctcgagtaagtttcttggttttattatcaatgctcggggtattgaatccaatccagagaaaatacaagtcctcctcggtatgagatcgccaacaaaaacaaagaaagtccaaagcttaactagtcggatagccacactcagtagatttatttcaaagtcaacagacaagtgtgttcctatcttcaacatcttttgaggtaacaagaaatttgaatggatagaggaattcaagaacacctttcaagaattaaaaagaaaattagcaaagcctctcgtactctataaacccctggacggagaagagttaggaatatacttagctattacataatacgctataagtgtcgtgctgattaaagaagacaaaaacgtccaacatccagtctactatataagaaaaagactcattaaggctaaaggattgtatctattaataaaaaagcttatttactgcgtaatcttagcaacaaggaagttaaggccttatttccaagctcatcctattcgggtatacaccgaccaaccattacgccaagtattgcaaaaacctgatgcttttggacgattactgaaatgggcgatagaattgattcaatacaaaataatatttccaccccgaatagaagtcaagggacaggccttagcagactttgtattttagtgcacgagcaaagaagaaagtagcacaagggacaacctaaagccaatacaagaatccctaccgacaacaacgaagacagacctacctgcaaattatacgtagatggataacctacaaatcaactatttggtgtaggaattgcccttgtcacaacggggggcaacctctgcacggcgcagtcaaatttggatttaaaaattccaacaacgaagcggagtatgaagcctttattgctaggttcaaactggctcgggagctatatgctgaatacgttgaggtctatagtgattcataatttgtagtaaatcatgtgttgggagagtacgaggcccaggggggagaaaatgataacttatctatgaaaaatataggattttctcgcacaattcaagggttacaccctcaggaaaatcccaagagaaaaaaatacaactgttgatgccttagcccatcttgtgagcagcacaatagctgataaggccaatctagtcctaattaaattcttagaagagcccagcatcacttttgcagtggaaatcgaaatgatagacatagctccgcactgggtgacaccaatagcagcctacctcaatactggagaacttccaaatgatagaaacgaagtttgaaagatgatgaggaaagttgtacgttacatcatcgtggaaggtgcaatgtatagaagaggattctccatgccattacttatatgtgtaacaaaagaaaaagttgcacggcttctgtcctaagtgcatgactgattctgtggcaaccatgcagcagagcaaagcctcttgaagaaaatactaaggcaatgatatttctgggcgaccatgatggaaggttcaaagacctatttacagaaatgtgataaatgccagagattttttaaaatactccgtccaccacctaatgagctagctaagatgcagagtccttggccttttgctattttggacatagacctgatcaaacaattgcccaaaggtaagggcagggtacagtatgtagtagtcaaagttgattatttctacgaaatggacaaaagccgagcccttggcaacaattacatctaaagaagtactggtctttgtggtgaagaatataagatgtcggttcggactcccacacaaaatcgtctcagacaatggcaaacagtttgatagccaattgtttacagacttctatatgactcatgggatcataaaaagtttctccacagtagcacaccactactagaaaattgggttttagtgatacacattgagtaactctaaaactatatagtgatacttcaacgcgcgtcacttatgagagtgactggaaagacagttttcagtgacactacacacctgtcactgaacccttttacattaattttcttcgcgtcactataggcatatagagtgaggttttgtcagattgaaaagataacagccacacgcatgaagtgtcactatatctttttttttttctatttttttttaattttttttaatattttttgaaattatattgacacacaaaaagtgccactat

SEQ ID NO: 312335 - DNA, 973 bp, Cannabis indica
gacgacactataatcatgaacaaatatatacatatttatatatgttctggacttaatagaatttatatattaaacataatcatgaaataaatcatgtgaaccatgcaacataaaagcgatctctgatctttattaattagtaaatatgattatattgaaatgggttttatttaaggcacaaaacccaacagaaacaacagtggaacaagccaaaaacaatattaaaaaaattatgatagtctcagttttattatgtttaagaatttaaagtgctcaaacaacatgttaaaaaaatttcaagatctatgtttgagtatcatttttaatttcgtatttaaaagaatttgggtgtatttaagtgtctagcatgtttgattcattgatttctaatcttgatgaagcttatgggtgttcatttgacattgattttaatgttttttcttcatctcacaggaattaatggttattttcttactgttccggtgttgcaatgacgattctgtcagtgagtgtggaagataaaagcctcgtatgtgatggtctgtacaatataaaaggaaaaaataggctaagacagtatttttataaattttaccatgtggcagtaaaaatgtaaactttatcccaaaatccaataattttgtaaaactttctttaatatttaataatatactctattttttcaaactcgccacactttcaaatttataatttataacaaacaattcttttttccacctataattaatacaaactagttttcttcaaagcatagtataccaaagtggccatactattttcttttttaaattatttaatcacactaaagtaaaagtattgtttaattagcccatgctaattttattttaaaaaatgtatgactttcttttttattaggaaacttttacatttcataaaaggataattacataaaacactattttttataaaaaaaataaaattacatttttac

SEQ ID NO: 312336 - DNA, 1551 bp, Cannabis indica
gtagtttcctatttcctagtctcctagctttgtatataaatatgttctattctatgaaatatacacacaattcgaatcactattttctacataagacaacaaagattgtcaaactcaagagtaagattattatcattggtaaattgagaaatactaagcaaattctttgtgacactgggaacatgaagaatacctagaagaattaaagacttatgagtatagtttgaataaaatgcatttgaaccaatattaagaatgggaagagtattaccattgccaacaacaactttaaatttgccttgtagtctgtagtgtttgtgaggtttgttggatctagagttatgtgataacttgctcctgtgttcaaataccatgctcttatgagatcagatgaggttgtggcttcaaaaagaagagcttctggtggatttggggaggaggtggctgaagatccatcactggtatcttgttgtccattgaaagttatgtcaaacatgtgataacattttaagctactatgaccagttcttccacataattgatagattggcttattttctctgccacctcttccaccgcgataagaaccataatttcttctgccagattatccaccacgagtgcaattgctattcatgttcaaatttgcaagattagcttgcacatttatgagagattcagttgtgtgttgactaatcctcatctcttgattgtgaagcatgagttgaacttcttagagagaaagaaagttagatctagaggtgagattaatgacaacaacttcatattctggtctgagaccttcaagaatgcacaagatcagttccccatttgagataggttatcctgctgcagattgatcatctaagaaatattcattaatctacatcgataatttctttgttgattacagagaaccacaaattcaaaggagtcgtgctttggatttgatgttgaatagttgagcaagagtattccatatctcaccaaaggtttaacagttgatgacatgtccaagcatcacctcagtcattgagttcattaagaacttggttggaaattaagatagtttctcttttcttacctcaccattttggctataaatacaaagaatttgaagagtcataatttataccattcattcatagattttgcaagtaaaaactttttccaatttcttctctcatagtcgtccactatctctcttcttccctctctaaattttaaaattaagggtattgaggtagcacattattatacttggtaccttgatctttgcataagactaggaaaaaaagattgtttgtgttcttgattaaagatctaggtttagtattttataatactttgcaacagacatgaatcaagggttaaagtactaaataaaaagagattattaattctgttggtaagacttttatgagtaatcttgatctcatatatattgttttgctcgttatataaaataattattataattatttacgttaaataatgttggaaattattttaccaggatcttagatctattcacaagtatgttgtttaaac

SEQ ID NO: 312337 - DNA, 794 bp, Cannabis indica
tgtgattaaaaaattaaaaaacaaaagtgttaccaaacggcacctatatctttgttttggatggtttagagcatacatcttgcacatcatttaaaatttagatagttagtattataaacaatatctaaaacagtctagatggaaaattgtgtggtcgaaatggaattttgaattataattttgaagtcgttacgttgcgatccctacccctacccctaccccgaacccaaaccacagcctagtcagcaggcccttactctcagctctcgactcgaaccccagaccccaacctcgatctgaacctaaacctagaccccaactccaacgcaagcccgaaccacaagcccctgacccaaccctggacctgatgtcgaacctcgactcactttctctcacctcagtttctaagtcttcacttaaataaaacaaaagaaaaaaaaacgaacacatttttattttttattttaaaatcaaaacacaaaaattactttcacttttgtgaatttaaaaaaatgttacttaacgatattttcaaaatgttcaagaccattttcaaattacaatgagcattattatgttaaaaatagaattataacttccacgtgtatataaattagagcataaaaaaacacatatggcatttggtcggaggtaataaaatggaatagaatggaaagaaaataattttcattctattcctttgtttggttacattttaaagtattggaatgacattctaatagaatgttctttccactattttagtggaacgactattccattttaaaaaggaa

SEQ ID NO: 312338 - DNA, 1052 bp, Cannabis indica
atcctggtaaaataattcctaacaaaaagaagatcctttaggagccaaaacaggtcccccaacacccaggttgacatgggtgctgggccttgtgcctaggtttacatacaacttggttctcatgtgtttgctcctcaaagacaaattctgctcatcttcttatttggtcaaaaacagggtaggagatcttgtttgcaatctcgaataccatagaagtgtcaaaacgagccttcggaagtcctcgaggaacacctaatgtccaagttgacatatagcttggtgcacttgattctgcttatccaattttgattctgcctcgagcatcatgatggccacgacttgtgacaaattaaattcacacttgatatttcacatttttgacaaagtgtaatattttattattattattttaataggaccttattctctataaaaaggatagctctactagctcatttttcatattttcacaacttcccataagattagagcgtctctctctaaaaatatatagcacttgccttagtcacttctcttctaattatcttgagcaataaaaactcgaagtagacgtatgtctattgttatcgcgacacagggagtacactactataaatctctcgtgtctctcatttacactacttaacttctattttctctccccaatctagcaagcgattattggccacttttttgtgtcaacaaaacaaaataatattttgacaactaaatagtaaaaaaaaaagactttataagggtaaatataattttggaactcgtgttttgtaaaaattaccaactggacttttttattttgttaaatgacatttcagaccctatgtttttttttttgaaattgtacaaaatagaccctggacataatttatgtcaatttttttttttaataagtaacctgaaacccgttaatagcatgaatagatgtaaaaagtataactaatcttgtcataatacctaggtcaggttattattaagttttaattttaaaaaaattaagttagggttcgtttggaacgccgtattaggtcgtattg

SEQ ID NO: 312339 - DNA, 1610 bp, Cannabis indica
taacaaaaccacaaaaaatatctagtgttcatttattattattattaactctatagtaatttattacataaaatgttcatatatttagttaaagaaaatctgtgttaacacatatgtggatagacatgtggtaaaagtattgtgtataatttgattatacatgactggatctatttgtaacaatatctttcattaacatgtcatttaccatgaaagagttattcatatcacaatgatagtcattagtagatcagtgtgaattctaagtatacatgaactcctatttgtgttcattgggttccttgattcacatgttaaagtttctcagagaagatgattcttacaacttctgttattggagcttaataacatgagtggatggaaatatgttatacaataatggaatccaagctttcctaacgaatcgaatattagttcatttataatgttaattctgggagtgcaaacagttagatccaaaatctataataagttatagattaagtgttcacattgaattaatggtacattagaagggtaaaatggtaattttgactaactctaattatgaactaataattggagggtgaactacttatattgattatatcaatatactacaagtaaaaattcagtaaaaataattccatattgtcaaagagtgcaattccatatatatggtggattaataatagaattaataaactggattattccattgatgagatcgataataatcaagtgtttattggagcttcgaaatataggtccatggtccccaagtcacctctatacaacactatataagggaaggttttatttgatgagtaaattgagtaagaattaatttctgttatcccaaaatttgcacagctgatgtgacccttacacgtagcatgattcaaccatctcagtgacctggtaaagaacctccaggcagaaatatgtctggcaggttcatagaaggttggacaactataatttggccatgatgtcccctacaacatctggtcggatgctcaacctaccagctagataaaatgggaccatcctacaagagtgattgtacaagccaagcttataaagaagacaagtgtcaagggatctgaccgaatgaccaacatgctggccagatctaacactgccagggataccggacagagatacgcaatccttgatctcgtcttcagcaagcttccacaaatatctacaattaaaccctataaacttgaatttaacaaatctatccaagagagtaaaggctttatcaaatcataattgtatcctagaaaatagggatatttactattttgttttctccttttatggagccatatgtaccaactctctccctataatttaggggtgtttgcggtgcgggtggtgcggtttttgactattttttcaaaccaacctgcacatgcagtttttcaaatttcccaaaccgcacccgcaccgtaaaattaaaaacccgaaaaaaccgcaccgcaaaaaatagtgcaatggggtgcagtttttgtggtttatgcggtttcgactatcactaaataattaaactatcacaaatacaacaaactttgagcaaaacttgtcaaaataccataaggctt

SEQ ID NO: 312340 - DNA, 1987 bp, Cannabis indica
accttggaggatgaagaacacttaaaggcttgatgaagatgaaattccaaagagcttctacaaatacttgggcgtgggattcaaataagagaattgtgaaaatattgattgacaactctctttttataagtgagttcaatcttttaatcctagagcaattgggagtcttttaaatttaaagctacaaagaaagaggtaaatgttaagtaaaagatataaatatatcctttcccttcttcattaagcgaaacttcaaaattcttatagaaattagaataggattttgaatttaaaaggtaacatcaattcctgatgttactaagattaaggtaaaattagaaattcaaaagaaaaagataaatgaaaaacaaaagatcaaaaatattttctcttcttctttctctctctaatttttgaatggcatcatcaactaggattaggattcaaatctaattaatcctaatgccatgacacacatgaagaaataaatttcaatttttaaagaaaaagataaaaaaataagtaaaacaaataagtttttcctctttttctttgatgattaatatttaataattcccaaggactaagtaagggaatcaaaagttctaatttgattgaaaattcttgaagaacagaaataattgcctaagattgtcaaaattgacatctatctagtaaaatttcaagtgaaatggatacggttcacgtcatcaagtcaactccacacaagtgtaaagttgacttgggggaaaacgttcccggaaacttttcttggtgacgtggacatcaatgttcaacacatgaaaagatcgaaaactttatagagtttattagacctgagtcatagaagtcgacttgggagcggaccctagccctacgccaaggttgacttcgagagctttgagatggaagttcaaacttcaataacttaaatccaactcctatctttcagtattatgtaccatgaaaacatggagcaatcaaatttaagtcttgagaaagctaaaattacgcgagcctgcacctcagaagttaacctggacacgtagggtttcacccaatgcctaggttgacattcccaactggggtttcagtttccttgatcgtctcagggaaaatgggtccaaattttcattagaatgtaaactagacatactccggacatatttgaggcatcaaaattagattcggagcaagttcattattgagcacccaggcacccagcgcctaggttaacaatttgtcaatctgaggccattcaagtattaaattgatggtcaaacttttgcaccatcttcatcttcaccagaaacagggaaataggtacttttgaggaagaaataacacttcctgagtgccaaggccaaacgcctaggtagacattttgtactagttgtaaaaatcggtcagttatggtcagtttttacaaatttataaccgatcggtcgcttacagtttttattttacgaaaatcgcaacccataattagaaattataattgtataaaacctatcgtactatttttggcagtttttagtggtttttggtttagcaattttggacagttttttgaagtttttggcgattttagcaattttttagtttcaccatttttttatttcaaaaaccaaaaccgatcaccatgtcaaaaaattgtaaccaaaatcgaccgccaaattcggtgatgacgtggaactgaaaattcaattacggtctggtcggtttgatggttagtttcaatttttatgagcactcttattttgtacacctgggccaattcaaatgatgtttttagagaactcttctaagcatcttctccatttatagaaaagattaagattcaactatttttggggaccaaatgaaacttctgaagggtcataacagggacccagcgccaaggttgacatcttgtcaacctaggctgtttccaatcaagttccaaaagaagtgttacgagaattttttttgtcataaaaaataatga

SEQ ID NO: 312341 - DNA, 2828 bp, Cannabis indica
atttaatataaatatataagcaaaccatgctactaaacaagagtgagaatgaggagaaccacaataattccaagaaaaagcaaaacaccatttataacagactgatatgcttcttcttattcttcttcttcttcttctttaagagtttcataaaaagattgtaaaagtggacaataccattcatgaactcctacttcttcttctgaattaaacagtaaaaatgttaaaaagaaaaaatggtgagaggggagaggaaatggtgtggaatagagaggcagaactcgaagattgttgttgttgtcgtctctttacacctattctttcaaatcacaatatggagcaagccttttgtgctttgcttttctttttcttctgtttcggcggttgaaggacaactcttatggctgcatcaaagactcctttcacattctgtgtatatacaagaccgagcttattaagactacgacaatttcatcagaaagaagggaaaaagtttgatgtttttattacctgctgtgttttcgagctgcattcgatgtaagcaggtgcaccgataagctttcgaagttcctctcccttaatgcgataaactagtcaatataaagaagaagaaaatgtgcaattatgtaaaaacgttagaggattgtaaagagtaaatttttcacctgagctgtagtaattggaacagcgccaggatggtcgataaagaactgcttgtcatctcgaaggtctagctcgtaaaaaccaaaaggaaaatatatgaaaaagaggaacattgttgttcatgccattaccaaaacttccattaacataacacaatattggtactaatcaatccttactataaaatgaaaatgaaccttatcatgagaaaaggatacacatattagtatttagtagtgattaaaaaactgattaagaacgtaatgtagaccaaaatagtaagcaatagaaagataaaaaaatataccaagctttgttccaacaagaatgatcgggacaccaggtgcataatgcttcaattcaggaatccactggagaaaaaaaacatagtaaacaaatgttaatggaagacatcagcaaaacattaatggaattaccaactctccatagagatattttaataaatcataactgcccacatatgataaaagcaaagcctaaccaacctttttggaaacattttcatagctagctttgctaatgagagagaatgccagtataaacacatcggccccgcgataactcaagggtcttaacctgttataatcctcttgtcctgttctccatagaaaacgaaaacagaaaagttcagaccgagaaaagaaaatctgtttaacacaacttgcattttagtcattttcaatacttaccggctgtatcccacaatcccaagttaacagtgcttccattcacaaccacatttgcactgaaattgtcgaaaacagttggcacataatcctgttttttccaccaaaatatgatttcaattgtagaacaaaaccataaattactcatcaatataatacaattggtaaaacaaacattctaattgagaatccataatctaaatttcagcccaaacgattaacaatcccccatataatcacaacaaataaatctcaaaaatttcacctaccccataagaacacaaatgtatcagtatcttcaaaatcaagctaaaaacaaacaaagataaataaaacaaataaacaaaaatcaaccaattttagaaagaacaccaaacaaagaaaacctcaaccaaagaaattcaaacagccaaaaaaagaaagaaaacgatcaaaaggggtcaaatttgctcgagcattctttgccattacaattcaatttcatacaatttttatattttgaaaatcaaatcaaagattgaaactaaccgtagggaaagtattgctggtgtaggagataagaagacaagtctttccgacagctccatccccgacagtaacgcactttatgaacctcgaagcactcattttccaattttcaaatttctaaaacagaaaaaagaaaaagaaaccaaagcctcagatcttcgcctgagggatcgatattcttcctctaaatatacatccacacgatccagtacccccaataactcccacgaaccctaaccctaaatgggtacaaaaaaggaaagaactttagatggaaagtaaaaaaattgaaaccccaaagaaatgagaatggaaaattgacacagagaaggagaagaggaagagaaattgagagaaaattagagtttgggttagtgagattagacccaaaaaaggattagagagaattgattagagagaattttgtttgggaatgagagagaaagagaattggccgggaaataatgccgttgaagcgttcgttgagcgaaccaattttagccaacaaatcctccaaaaaaggttgtcgtttgtccttttttttattatcattattttattttattttttcaatttttggttttttaatttattatttaattacgaataatttaccatataattccttatagttaatgttaaaagaattacaagcaatattctttaaaaattatttttttaaattatataagacttgatacttaattacaccaataacaatatgattacgatagaggtgttagggactagtggtgccttttagcatttctctaaaaagcattagtagtgtctagcactctcctacgtgtgaatatcacttttggcgtaattaaatatcggggtctcatatagtttaatgaaataacttttagagattatcgataaccaattgtaaggtgatacgtctagaaggtgctaggtaacagtggt

SEQ ID NO: 312342 - DNA, 2564 bp, Cannabis indica
tagtttcttctattcctttcatgtattcgactttattgcctaattcgagtttattttgtgcagtttcaaagatttttatttcgtattttaaatgaaacattcaaaattattcttcatgtttatttaatgttattttttttctttgatgaagaacctgtatccattataaaaatcatcaattacaagatacaagatacaattaagattggaaagatgaattcatccataaagcttcctgctctaagcctaaagttgtcttagctaaacaatgggcagcattatttgcccctcttgggatgtagctaagagaaacattagggaaataagagagcagcctcttaatttcaataacaaatgggttaagatgcaagtttgagtttcatttttacaaatatagtttaccaaaaccttgcaatctgaaacaatactatccggataaaaggagtgctcatgacaccaagcaatagctgaatgaagtgctagggcttccattaacaaaggtgtagtaattccgctcttaggcttggccaaatttaagagaacttcccctgaattggaatggatggtcatgccaaactctttttgataagctgtgaatctttggcagcatccacataaagccgatgatggaaggttgaagtcgatgggcagctgtcgttgggcagtaaatgatcgtcgtgagcctgtggagatgtgatgatcttcttgttgcagctcttgtagtgctcaaagtaggctgtgacctcacaaagaacctgatctggggaagaggatagaacctcatgaagccaactattcctgctgttccagagcttccacagcaaacaaacaaagaaatgataatgtccagcaataaattcattggcagcaagatataataagtccacacagttaagtgaagagtgtttagagataaaagcattaaaatcagttaatttccataccttctgggcagcggggcatctgaagagagcgtgttctaaggtctcatcatggtagtgacatcggctgcaatgggggcagtatatagtttttctgttgaacaggttgcgactagtagggaggatatcataacaaacacgccaaaggaaatgtttcaatttaggaggcaaaggaagggtccaaagatgtttccatcaggcgtttgaggacttggattccgagggggtaggttcattttaatgaagttggctatgggcaaggtggtaacttgagttgaccgtgtatgtaccatgaggggtgaaggaccaaaagtgtgcatccggggtggaaactgtatgaaggggaatagccactatagcttgtgaatgtctgtaggaaaaatgaattggataagggcatgattccattctttgctaggtgtgagaaggtctgccactgtcatattggcatttgaatgatactgcagataatgaagtttgccataaccaggaatccaagcatcattgaagatgttgatggtagtaccatcactaattggtttcctaaggcctgattgaagaagttctttgccccaagagatactagaccaaacaagagaaggtctatgacccttgccagagtgaagaaaactagtgtgtgggaagtaacgagctttaagaagtgtggccacaagagagtgaggatattggagcagccgccaagcttatttagccagcatcgcctggttgaaagctttcatagaacgaaacccaagaccgtcatggaattttgaatagcaaagaaacgaccatgttttccaatgaattttccttttattctcagttccgccccaccaaaaacgagccatgagggattcaatctttgagtgaaaggaggcaggaagcttaaagcaagccatggcataagaaggaatggcttgaacaaccgattttaaaaggacttctttaccacctttataaaagaacttagaattccatttatttaaatgagacaaaacacgatcgttaatgtagttgaaggcatcctttttggatcttccaaatgcttgaggaaggcccaagtatttatccatagtctcacgaacagggatgccaagaagcgtagcgattgcatgctggagctcaggtgtcgtatttggagaaaaatataaagaagatttagtgaagttaaccatttgtccagacgcacagctgtagtcatgaagaatgttttggacagtggttgcagcttcaatagaagctaaactaaaaaggaggctatcatcggcgaagaaaagatgtgagatggtcggggtcgccgggcaattttagttccaagagaatggcttcgaggttggcgctgttgggttttataatgaatgagcgaagaaagacctttagatcagagaagaaataaatatggggaaaaggggtccccttggcgtatgcctcgggtaggcttgacttgtccaagaacttgttgattaatggagaaggaaaaagtggcagtggagacacaagccatgatcagatcgatgaaacgcctgggaaacaagaatctttccataactttgcgaatgaatacccattcaactgttgggttttatgccctaaataaaactctttacaatctgattagttatc

SEQ ID NO: 312343 - DNA, 1287 bp, Cannabis indica
aatttttatttttaaattttttaaataaaataaataaataagtataataatcttcaattaaggttatatgtataataaaattttaaattatgaggtcatatgtgttataattaaaattataagagattttactataagtatttcaataatttaagtgtaaaaaattaattgctaaatgataattatttagttacaaattacaaaaaattaattaataattataattaatttaattttaaaatataattaattttaattaaatgtttataaggaaataaaatataaagttattacaaggttacaagttatttattatttatttttattaaatttataaatatatcacaattattatggctaaaaataaatgtaaccatcatgattacaaatttgatgtaactattgaaactttttccatacatttatctatagaactttcttgatatttccataccattcattaaatgataagttgagttgctttatttcattaaaaaacctctaatagaatttgtaaaagttatgctatatttaacaataaaaatgtaacaattttatatctaaaattttctaattagacccaaaaagttttaacctagaaagtacatttaataaaaaatttcgtgttaattaaaactttactaaatataaacaccatttaaaaaatatttacaacctaggattcataaatccaaatacaaaatattttatactgtcattatcaaaaggtgtcatctaataacatttacaaaagtgtaccagcagtgtatcaaagattgtaaacctttaagtttagacgactagacatatacaatcttcacctaagttctgaactcactattgtacgttaaatttaccattacctaaacatagcaacatatttgtgagtcgacgaattcaataaaaaaattattaacacaaattttcgttaactaaatacatagccttttagtaatagatacactacagaaataataaataaatgataaatgatgctagatattttacgtgattttgtagttaaaatctacatactccacgagtccttattatattagtttactgaaatctatttacaaggaagtaagtgttcaagaataaaatacattgaggggtgaaatggtaattttagtccctactcattataaactgtctatagaggatcattgattaatttgatagaaatagtagataattcatagcgtacctatattatgtatatatagcattctgtaaaatcagtagtgtaattccaagtctatagtggagtcatgagaaattaataag

SEQ ID NO: 312344 - DNA, 1185 bp, Cannabis indica
accccgcgatgacgattgtcactctcctcaagttgggtttcgagagtgtcgccctcaagtatggacttcatcctcgaaggtggtcaacgaccgtgtcacacccttaggagatcctcatcgtcaatgactatttcaaatgtttaaatctcatgaaaggctcaaagacagttgtcaacccacgaaaatagctggatattatcataaaaatcagacttcaactacatccgaaaatcaaagagagggttgaggaagctccgcgttggtcgcatctcctgaagcgagaagcactgactatttcccctatataaggggttatccatgacttgagaaggggatccacaaatttgagcacttagaaaaaataaacactttttcattctttgcaatcaagagcctgttcttgacttttgcaactcagattaataaaacacaaggggagtacgctattaccgacatctaaggccgaacctctttgaattctggtgtcttttctatacatttattgcaaatttcggagtcattaattacatttattcttacgattttggtttaaatctcatttattacgactccacgtcagtagctaaaaatccaatcaacaaataccttcatattatattttattaaaatatgcccacttttataagtgagttgtccaatatactcttactctctacttaaatataccatataatttacattaacgtaagagatctaatagagacatcatctataaaagagggtatattttaaagaatataaaaatgaatgtaaaaattaaaataagtaaagtaaagtgggcatacaatgtaattttttctattttaagagtagaaaagtagtctcgtacctaggacccctaccttacgggcccgagaaaataatattctatttataaatttaatgtaataattaattatttatttctactattataaacacaaagttattctagcatagcatctgagtctcttataagaacttcgcttttcgaatttcactcctaaacagtagaactacttaccattagatcaaattaatttaatgttataaaaatacattaatatatagaagagtgttaaggaaattctctatcccactctctttttaatgtgataataaatgttatattttcagcgagagttatttttacttaataattagttatgatattctaatgttatt

SEQ ID NO: 312345 - DNA, 2056 bp, Cannabis indica
ttttatgtgttttttttatcgttttagaagttcatatttgggttgttaaatcgacatacttgtgagtagatctaagatcctggtaaaattaattccaacaatttggatcagaaattccctcatagggtggtatgttcgacaccttgaaatttggaggtagcatctttgattggatttcccttgagaaagatgattcaccatcaaactcatcctcgtcccatttacattctttggatatagcagacgctgtcatttgtgaaaggtcttcccattctttatcaagttcttgttgcttcttgctcaactttttctgaaggttcagtcgtatgtgctttggcccttcttcatggcaaggattaattggcgatggttctcacctttcagcaacggccttttggttgagtttctcctttagatcaccatcggttgtctttggcacagttttctttggccgcgacaaaggttttgggtctttgcaagaatgagattttggcaatgaagattttggcgtgttactcatgtagtattttgtcataccttctccctttagctctctctcacctttcctttgagcttctagctatccatgcctaacaagaggtgctttgacgtgaccttttaggagttcatttattttctgcatgttttcaacggtttccaccaaccttaagtttttcatccttaactcgttcatctcctcgtggtgaacatgagtttgtgatcttgaagtcatttagtaaactcgtttctcctttacgggtcaatagtgtgaggttctcggatctctcggtgtcgacagcatggggtgtcttattggcgagggtactctttgccttgactcaccttcatcctcaagtgtaatggaagcggtcgctccatcttgttgtatgtccgccgggacctcttcatgatggttttcttcttctctcacctgagtctttccaccattagtaccttcttctccagtggtaggtgttgggggattttaccttgaggcaatgagctgagtgttgtctaagtaaatctccacacagagagaaacttagcctgagcttatcattcccacaaacaatgccaaactgttgatggtgaaatctcgccaaccaaattgtagctagaaaattgaaacttggatgtaagacctaggacaaagatgaagatctagaaatataaaatcttaaagaagaaatgtagattaactatggagaaatatagaagtgtatatttctctaggtcaattattacaatgattttctaaccccctctctcatctaagaatggggtatttataggctcttatgacctgagatatacttgtggtcattaagggacaagttggctttatgtggctgcaagttgtacgtgcaggaggcgatcgtgcaccttgtaccattgtcgggtgttatgtggtcttgagttgcaggagtagtggttgtagagtacctatcatcgtccctattttcggaacgtcaaatgtaacgctataataattaggcatgctatagtgactttctaattacaatgaactcctattctaatcaaagagttttctcaaaaatgataaattaaaacttttgattaaatctaaacttttattaacattttcacataaccatacaaaaaggttaggatgtcgctttttaaactatttacataatcaaataaacttcataacttgtcgcacaacgactacaaaataagtccaagtgccctaagaccaaaatttccaggccatatcatcttgacatgtacaaccatccttgagctctggactcactgctgcttagcttaagcctttcctttacctacgcatgtaaataataattgatcgacattggtcacaccaccatacctaccataaccagagtaggaagggtggtggtcccaccaacacttggagtccctcgaggatcctgaagaaattccactgcgtcctcagctcgaagaactttttgaaccacctcaggataggttgttgtatcatttaatttaatatccagatcgtgtctaatcttggcattcaaacccactgtaatgaccgctctagtaatgtgga

SEQ ID NO: 312346 - DNA, 1493 bp, Cannabis indica
ttagagagattgggggaattgaaatgagggggtatttttggaacaaaattgaaagttaagaattattatcaaatgtatatattctgtgtataaaataacaccatgtccatttttttagcataaaatgtcaaatttcccttttttaatttacccattcatgggtattacccatgaatgggtaaaaactcaaaattttctaattttctaattttaccccttcatgtacccgtgcacccatatatatataatagataaagatattgaaccgacaaatcaagaccaagatcatacaagaaaagaataaagtatccaaacatctatcttcggtactattaatctagtacaattaaaaacgaagctacataacctgtaaaatgctcttcaggggaaaatgtttctccattatgatcaaacactaacatacttcggtataaaacaaatgacaggaatgatgctattatgagatgtattaatatcaactcaagtctttcagaaacaaaaatctgggatttaatttctataatttggaacaactttgcatgcttcaaaaactaaaatgaatgaaatattctgggtttccaaataagaatcaaccattcacaataaaactacaaccatcaagtgcaacagagaaaacgaggctcatgattcaaattaactgggatatcaggtttagcaatagtgaagcttagatgtgcaaataaaacacaaattcataagaaacctaaatcaatgaatgttatacatcaaaacttttccaaaataaaataagaaattagaaatcgacattaagaaaatctaacctttgcccacatagacagtgacctaaactcgttcaaaaatcatcgcaattgcttctgagtatcggctgaagaatgagtgtttgggagagtaagactgagacagagagagcgagagggaagaccaaatcagaccggagtgtggtgaagagattgggcaaagattcgggtcgtaggcactgcctgcgcgtgggtctctgggcacggactacgaaggttctcggtctcttgggtgccgtaggttgacgatcgaagatagggtagggactggcggtgggtttctggtgggggaggtgagatttcgtgcttcggaattctgggttgttcgaagagagaaaatttgtgttagacagagatttaggaaaaattatgtgtgccgtatttttgttacaagtatataattataatgatttttagggctgatgacgtcggacgggttgagggtttttcaataggccaacctaatacaatcggccctcagaattctaacccattcatataatattttgagaaatttgcaaaaatactagaatttaaattaatttttataaaaatactatcacacataaatttttccaaaaatattgtaattttataaaacactagcagaacacaaaacataacaattaaaaacaacattagaataactaaaaaacaacagtaaaataacagtgaaaacttaacaaagtacac

SEQ ID NO: 312347 - DNA, 774 bp, Cannabis indica
aaaataatttcatcattattttatttttttataacttttttgcaagaaatatctcctatctattactcctaaataattatgcgtatatacatagatactaaatttagccactaaatttagctgtataaatttcatgtatttgcttgtaccttttatgttttttcaactaattgatgataaataacttatcaaaagagaaaaagtaaatggaaaaatattcaagaatatcctaccgaaatctgacaccattaaaagtaaatttcactagggttgttctaagtattatgaaaaagagaaaattgtagtaaaattctctaaaaaattatgcaaataagagcaaacaacagtttctcctttattgtttaaaatactttatcaaaactctatttttattattttacctcacacatttacattacactatacatcaacttctctatgtttttctctatatctgttgtgatattttgaacacgcaagtgcacgtattgttacaagtagtactcaccaggagtgaggtcgatcccacaggaattgtagttaagtacgttaaaattaaatttttacttctatttggttaaataaaaattaagaaagaattttaaaaataagaaaactagtaagaagcaaataattaaaaaaattgacagttaataaaagctagggcttcgatttcaattatttctattgattatggcctaatatgattatcttcctattgttaatttctatgcaatagcaggtttattaaggtaatttatagtcttctcagat

SEQ ID NO: 312348 - DNA, 1746 bp, Cannabis indica
atcgactataccagatcagaccctgtacgtccagttagtaggaagataatgcctccaacctttcttcagttcccagattaaatgcccatatccctcaccacatatttggtcgggataccagtgatgttgcacctcgggctttgaggaaggtgtgtgctcacagctcacttcccagttttcaaagttagagtttgaaagatttatcactagatgaagataagttggcacagagacgggagtgatctttgtataaaatttgaagctagtcctggtcaatatgatgcttgcctccctagaaatcacatgggttcatccacaaaaggtgagagacaagagaataatagttggtcggggtaacgagtgaaaaaaggtttttatatgctagccacaccagattaagaatgaaaggataaggttcatttggagtgggaatttcaaatctttgaagttcaaaacttcgattggtacctggtatttttcaaaaatctcatgaacgagtggaaatgaataattttaagccagaactaatatgtagtcaaagaattagacgtcacagttaaacgttgggtaaagttccaaatctaagagttatctattcaataattagctaagaacaggcagggtttatggtaaaaaaattctagaaataatgcatatatttattttcaatcatttaaaagaaagggataaatgacttattgattcgaaaatttcttgatctacttgaatggtatcgtcagagattttctagcaagttcttcgaagaatcagagggaaaacttagatagaaatttttgctctagttctttgaggatgaaaatggctaaaaggattaccaaaaggtttaatatccttttataggcaaccaaaaaagaaaaataaatcacttttaaattgaaataattgggtttctccccaaaagtgaatgttagtattcattacaaggagtacaaccatcacacatgcattgtcactcagctgtcaatgtgtaatttgaggtatatcttttaagaggtatttaatgctcagagacaaaagagatccctagtcaaagtcatgtcggatcaacctcagccatcaaagacatgccacccatccggacaagaatcctgatcgagtgaagtccacgtgcgaccaagaaggtcccacacaaacttagggggtaaatgctatcctattttttacacaatgatgtgacattgagctagatgacacgtgtcttatattttcctacatgggcggaaggaagtactcctagcagctcccgaaggttgatataaagatttgtgtcgtcaacatgtagtaggattttcgagcaaactaatcaagggacatctgaccaaagtacgattgcgtgatcaactcgcatgcaccgagcaggatatgtgagttagtgaatttagaggcaagcattgttgcttccaagacatgaagataatccttatattcatgggattaggtcagagaataaaggcaatacatcttggtttcctattctttacattgtaattatgaaattaatgtagtttcctattttatttattatagattaaggaaacccattcttcatgtaataagctcctataaatagtggtataaattcactattaagggagacaaaatttagttcagaagaacactcaagagtgaaaaagagcaatctaagatagaactactcagagatcaattgtaagagctttagagagaaaaaatacttcattcatgttctcaagtcaatacaacaaa

SEQ ID NO: 312349 - DNA, 3556 bp, Cannabis indica
agaaaaatcctgtacaagtgatcaacgatttctttgaaggtattttgagaagtgtaaggccaaagaaaaaggaagctttcacggctgctataataaatttctgggcagatatcgaagagcaaatgaaagatccttggaagtcggtactacacaattcgaaagaaacagaatatgcagaaaataataaatcaggaaaagagctgaaaacatatagaagaaaaagaagatcaagaggtatggtgggaaaggaagctgttaacaagaaccacgataatttccagttggaggaattgggagatgatgctgatccaatagaggaggagattggtgaatactcttctgagagtgaagcctccgaagatgactgcgaggactgcctagaagcccctagtgaagaaaatgaagacttcttgtgtgatatcaaagagttatggtgtgagaatgaaattatagcaagcaaggagtgtggggaaccaggtggaaaagagttaagtaaagaagaatctgccacaacaccatgggtagagattatggatactatggctgagatgggaatgaatatcattcctaacgagggtgaaggatcagttggtggggcaaaaaagggtacagcaacaagaaaatgcagggagttgaagaagttggcttttaacattaactatgacaaaagttataaaaaatcggggctggataaacaaacataatgaagttactaacttggaatgttagaggaagtggagataaggagaaaagaagggctataaaggcaacaatatgcaaactcaatccggacatagcaattctacaagaagtaaaaaaggaaatggtagacagaaattttgtgggaagcatttggaggtcaagattcaaagcatggatacttatcccatccattgggagatcgggtggcacactattgatatgggacactaggcgtattacagttctggactctttggtgggagtgttctcgatttcagttttaatcaaagcagaaggaaaagaaccttggtggttctcgggtctttatggtccgtgctcctataaagcaagaaccgagttttgggatgagatggctggcctcagttccctttgtggggagaattggtgccttggaggggattttaacgtagttagaagagtttaagagaagttgaatagtagttcatgcacgaggagtatgaaggtgtttgatgaactagttaaggaattgagattgattgaccctaaactcaccaatggtagattcacgtggtcaaatttcagagaaaaaccaatctgcagcagactcgatagattccttttcactaacaaatggaacatggcttttccttatgtgcgtcaagaaatggcagtcagattggtttccgatcatagcccagtaatattagactcggaaccaccaaaatggggtccttgtccattcaaatttgacaatcaatggatggaacacaagtctttctccaagctctttggacaatggtggtcagaggcagaggtggcaggttggcctggtacacaattcatgagcaaactaaagaaggtacaagaaaagatcaagacctggagcaaatctacttttggaaacaatcgtatggcaaaaattgagttagaaagaaggctatcggctttagaggagttagaagagagaaatgagtggaatgaaaacttggctgaagaaaggagaaatataaaaagacaatggaaacaactcgcctttgaggaggaaagaagtgtatggctgaagtcaaaatgcaaatgggctaaggaaggagatgcgaactcgagatattttcataatatgctcagtgcaaggaaggcccggaacacaatatcccgaattgagagagaagatggatctgtgattgataaggaagaagagatagtgaaagaactgattggcttctatactaaactttatacctccgaaaggaggaaggggctagatgtggaaggaatcaattgggggaaaatttcgaattggtcagctacagatctagagaaaccttttgaagaagaagaaattaaaagagctgttttttattgtgaaggcaataaagcaccgggacctgatggctacagtttagccgttttccaatccaattgggatgttgtaaaagatgatttattcaaagttttcaaagcctttcaagaggaaagaagaatcccagggagcattaacgagactttcttatgcttaatcccaaaaaagattgacagttgtaagatcaaggattataggccaataagtcttatcactagtgtttataaaatagtagctaaagttttggctactagacttcgattagtgatggaagacacgatttcagagactcaatcagcttttgtacttggaagacaaatattggattcagtactagtagcaaatgaagcagtagaagagtacagaagcaggaataaaaagggattagtattcaaaattgactttgaaaaggcctatgatagagttgagtgggaattcctcgatttagtactcgaacacaaaggttttggtgagacttggcggaagtggattatgggatgtatctcgtctacttctttctccatttttgttaacggaaaacctagaggaagaatccggggtcttaggggacttaggcaaggcgatcctctttcgcctttcctatttaccttagtggcagatatacttggaagaatgatagacaaagcattagactcaaggaaggtttctggtttcctcatagggaaggagaaagtgcaagttagtcatctacagtacgcagatgacacaatactttttgcggatgatgagatgtcattgagaaatatggttgtggtggtcaatgctttttgctccatctcgggtttgaaagtcaacatgagcaagagtcaattgctaggtatctgcatggaggagtccgtggttgttagatgcgcctcgtctattgggtgtgagataggagaatggccaatgaaatatcttggtatgcctctggggggatccccgaatagaattgatttttggagaccagttttggaaaagtgtgctaaaaggatggatggatggaaatgctccttcctttcgaggggggaagactaactttaatccaatcagttctctcatcattacccatttattatctttccatatttaaagcaccaaaggtggtggtgcattcgattgagaagatgatgagggatcttttctgggaaggaggtgacctctcgggaggggaacatttggttgattggaaggaagtttgtagaccaagaaaggacgggggtttgggaattggcaacttagatatgaggaataagagcctgttgatgaaatggttgtggagattcccgttggaaacagaatcgctctggcatagagttgttaaaagccgttatggaatgtcggagaatctttgggatactagaacgggtgagagaatgacttctcgaggaccttggaaaggaattgcatcattttacggtgaatatttaaacttggtgaccttcaagttgggaaatgggaaacaaattcgtttttgggaagatgtgtggattggacagaatacattactta

SEQ ID NO: 312350 - DNA, 733 bp, Cannabis indica
agtgcatgcccacccataacaagttagtccttaataatagtccttaataatactctgctacagaaaggatacgagggttagaaatctaaccggaaggagtcatttaatttcgctgcaaccaatgtaaggtttttcataccttttatgtgtttattttatatcattttagaagttaatatttaggatgttaaaaacatactttttagttaatctaggtcatggtaaaataaaatccaacacgctgatgagagttcaagtcttgcttgatactacaacctcttcataggggcatgaatgtccgttttcggaagcttgctatcaccaaatggctcaagctcttgtatgaaggatgtcaaaattactgctaccattacggtaaacatgatcacactttcaacaagtgtaaaaaattccttcaacactgtgaaaaccatccttatcctcctgctttaagcgacaaagatgctcttagaacccctgctaaatttgtgtacaagaaatctatctttgtgttgtctacctccatccctttcgaggaacaacccacccactctaacacttcgaaccatggattcaaggacgttgtggatcagttcctggttcaatgtattgccaacaccatccttgcaaacatctcttctattgtcaaacctacgaccattgcaccctccattgcatccactcgacttactgttgggttttgtgccctaaataaaaccaatttcaatataat

SEQ ID NO: 312351 - DNA, 1885 bp, Cannabis indica
gtacaaagttggtactttagtgcatatggtacagtggtcgtacttctgttcagaacgttgttaaccacttgtgagcttgggtgttgagcccggaacggcttaagcataaagtcgatacaacattacctttatatatgttatgcatatcttactgaatctgtcgactcattagtttgctaccttgtgtaggtaagggaaaggctaagctggaggagcagtagtgagttgaagcttggcagtgcagcctggagggtttcgttctttcaaccttttgagctatattttgtagttgccttgtcgtttgtaaaaaaaaaaagataatatgaaactttatatttagtaaacgtaattttcaactgtattttttaaaaaaaacctcgggatccggacctatgatatttacgtaattttgtagttaaatctacatagtttatgagtatttattatttctgggtgtttttgtgtaacggagtacataatttaaagaatgcacgcaataaatgatgaatttcttgcagggtcctccctaaatcaatttggtcgttccttgctttgactcagaaaattgccaactgactcagagtctaataaacgatgattaattaccaataaagagttaagaataataaataaatacaaaacactaggacttatagaggtccgaccctcttatatatgggtagtgacctactcaccttttagttatattgattatgagataataccatgtagaatactaaagaagacaaagtgaattctaactacaactctcaaggctgcaaagtgctcttagaagtgagattatgattctagatcctctccccttatgaattcatttcactatttataaggaaaggttgttacaattagctccgtaaaaggagtgatcaaagagtaaatatccctatattcgtgggtgcagttacgatctgttgaagctcctacaatcttgggtagattagctagatccacatttgtaagattcagttaaagatatttgtgaaagttgtttgaaagagaaatcaagacttgtgtagctctgcccggcattcctagcatcgtttcttttggctgatatattgactacccaactaggccctccttgagacttgtctttttcgatgaagttacttacaaaatagtcctggaaggtacactgatcttctcttctctagcccacataacgatggctcggtgagatgctgccagtaaggctattcacagtccataggcaacagcctcatatgagataagcacgaattctgttcggaggtcccttgttatattaaaaatcagctagattatgccacgtgtaagttctagatgtgcaaactttgaataacacattcaaaaataaagaaattatgtatttttgtaagatatcgtatttttcacatacaatatatttttaaattagctcatttttgaaaattcgcctacaattatttgagaaatcaataccttataagtcttgacactacatacatataataaattatttatgtaataatgcattataaaaagtatagctaaacaacatacttttaaaagattatttaacatatatacaataacaattacatcctgtaatttttttgtataaaaaaatgtataattcaaataagtgactaaaattaataatctagaacagcaactgggtcaatatccacataggaaagaccttgaaaatattgtgccaagaatttggaaccaaaagtcacaaaagtcattagtcaatatcataaatacatatagggtcccataacccttttttgttgtttttttttttactaatttagtttagaatcttatgttttttttagttagtacatgaccagataaaaatataatcccaaaaaaaaaaaaaacgaaagaaaaaagaaac

SEQ ID NO: 312352 - DNA, 1573 bp, Cannabis indica
atttgtatggagctttttaaactatacaagtttttggaagttagtctctaaattttattttttacaaattaatccctaaattatatattttgggaagctagtccttaaattttatttttagtaaatttgttctcaaatttttaattcttagatacataaagtcctcactcttaaatgttgttattttatttatttatttaattttgtattaattttaaataattttatgttggtacgattattttttatagtaacaactcatcaattatattttagttagaaaagaaaatataaaatataaatgggtgaagatcaaaagcttaagagaaactcagaacattgatggagaaatttggtgtttattgaatctctaaactcatacaaatgatccctcctcttcttcaatgaaagatagaggtatttatagggagctctaatgacaccagaatacaagtggtcccaacaaataggggataaatttatttttgtaccatgaagattagcatgtcagacgggtaatgaagatgtggttatcgagtgtcagttggtacttcgagtgagacaaattatgtctccactactggacgtacaaccactacatcagaggcgtgcatgcttcaatgacttcatcttttgtcgtacattcccttggcatctccctctttacgcttatgatgtgagtgtaacacttaggaaatttaactaagtgatgggtccatgagagatgagttttgttgtttagacttagtaggaacttcctccttaatctcttttggcagtcactccattgcaacatatatactcgaagtacaattgctcctttgtatggagcaagtggtattaggtggtgactaggggagtgaataagtgaggagaaggagatagagagcgaggggagagaaattgggaatggggagagataggagtgtggagagagagatagcaggaagaaagagagagcggggagagagagggagtagggagagagggggagcggggagcttctcatgcgaggaggtccacctttgcctgggcctctcctcatgttggctctccctcttgaatggtatctcgccttggtagttgggctcttattttcttgctcatacactttgaaagtctactttgagatttttcctctcattaatttagagatctctaaaattatatttagcaatttttgtaatttttggggctcaatacttgcccctagtttataagaattcttttaagggttcttggagactaagtatggtgagcttcgtctttacaacttaattaatttttttttgtagcccttcacgagggagtgtagactttacgagttatctcaaccccttttgtggttgatatttatcacaagtggaaattacctgtagtatggatttttattaaatgtttagataaatatggataaattttaattttagataaattatggtatttttctattttaaattattatgtgggttttcttttccatatttttaacttttttttttatattttccaaaaaaccattttctctcttacctctttgtcttctccatcaccattgtttctcttcacctct

SEQ ID NO: 312353 - DNA, 2444 bp, Cannabis indica
cagtaaacataaaaatgtcattttttttaaaaaaaaaatagtgtcttatgtaattacttcgaataaattttgggtagtttgtattttttttatttttaatctactttattttcaaaaatatgttaatattaaaaactaaccacaattagattatattttgcaaaaacacgtcattaggcttttactcttagcttcctgaaccgaagaaaacgaaacagagctccggagacattactgtcgtttttcgagctgtgtcagtcgacccgtccccaaatcatcgcgtttcctgtaccaaaaaaagaaaaaaatgaaacagagctccattgcaagcatcacgaagttgtcggagtttagctctccggcccgtccccaaatcatcgcaatgtgagtttcaatcactcaaatctctcccgtcaaatccaaaataaggtaagaatttcaattacatctaactttttttcccttgatttgatatgtttatctgcaatctccataggctttataaaatataacatccattgttctttttttaaaatgaccatcatcttatctatcaaaaatctcaaatcaaaatcaccattaaataagaggtaagaattccaaattaaaaatgatctttgtttagattattgaaatattaatttgatggctaattaagatttttatctcttgaattttgacatataccaaatcatgtccttgaacttttaaggtcgttaaaaataccccctgaattatgaagattgttggattttagttacttgaagtttaattttatatcccaatgtggtctatattagagtttgcctattaataataaaactttatattttacaattaattattttgcagcagttattcacttgtctatattaattttggcagcacatcgatgtatcctttcattatttaagaaggaaggccttgtacaataccgaaagtgcttcattgaagaaatgtacaacaacaaacgtaatttttgattattacattaaatcaattcccctaaaagaggattatttaagaagcggtttggaagatttgttgtggaaaaaaaagaaagatctttccctgaaatgaaatctttactaaatttcattcaagggaaattgtcctatgggaagtcgtggattgaggtagacttagttcacatgccgatgcacatcaagggagaaagtaaaaaaaaaaatctagatctttagtgtttaggatacttagagatagataaaagaaagaaccatctatattttagattcctataacaagccccacgaagagagagtggaaaactgtattaaagtgtactgcagagtaattccttttattttggaatacttgggatttcatgaaaagaggaagaactacaaatctggcatcactgatttcaattacgagtggctgaaaactccttatcaaaaaaatacgtaagttttaattatgtacctattgcgtgtaaactttcttattattttattcctacaattttatttattataaaagtagttgtttgaatcttaattattgaaatttaagtctaattgtggtatgtacatcataaaatttacggagatgttgatgtatggcatatatctttttgacattggtcctcaaaacattctagtaatgagacataaaatagcaactgatttttttttcttcacgtgcaaatgaggttgaatgaatatgaaactccatgaaaggtatgtaaatggtatgcttttttataatatttttacaatctgctttttttttattattattatttgaatgtcaaatcaatttcaacctgcctaatgttttttgatcaagagttttggaaatctgatgcactgttactttgagttcaaaaaatactaagattgctcttagctcagatgaccttgactttgacaccatatggattgtatttgccgaaagctccgctattaactattcaatatcatgacaagatattttcatttcatgtcatttttcacaaaaaatgatagacaagagacataattgtattgattgcatctaactatcttgtttgacattgtctatgtgaaacttttttcccattaatacactacttatccttctttccctcttgctattcaaaatattgctttttttaactttgtgatggatgttttggtagggagacggtttaaattgtcatcctaaatgatatttgtctttcttaagcataatctagaactgcatgatatatctttgaatgatatcagatcataaaatgtcattcaactttctcctctctttgattgtgtaaaactatagcacttcaactactgaaaaacttattctcattaacatattgaaaaatgtagaacttgatgacaattgtttataaatcacaattaaatgccacatctagatattttctaaatttttattaatatttttctaatttattgttattaattaagtttattaattaattt

SEQ ID NO: 312354 - DNA, 951 bp, Cannabis indica
tgttctactgttgttttgagttatactgctttgtgttttactagtgttttataaaaacacagtatttttgaaaatatttccgtgtgacattatttttgtaaaatttaactcaaattccagtatttttgtaagtttcccttatgcaatggctcaagctgcccaatgcttaggtcggccttgcttcttagcggtcttggatgcatattcccaaacccaactaggtagggttcacgaggaagatcgagcagaggggagggggagccaaaatcgctgaattagtttttgggttcgagcttgcgagaatgagagagccagatctagtttgcctgggtaaggggaatttaggctttatccatcggtttataaccgactggtaaagtgtaagcgacgatgcctcacacaagcgtaaagtttactcgtcggttgatacatcggtcatcaacagacggaaattttatttacactccataaaattataagcaccccaatattataaaataattaacttaaattaatttttaaaaaacacttttaatatttatttaaaatttctttttcactttatttttatttaatatcaatagttagttttgttttatttttacatttttttaaaaaaattataattttttaaaatttgtgtctaataaaattttatatagtttttactttaattttttgccttaatatttaaaatatattttatttttagtttataagtatattttttaagaatataaaaaagaagaatttttattttaaaaaaaagtacaaattaaaaatatatattatataaaataaaaattattaaaatggaatgtacttataactttatggaatgcaaataataccttcccaaagaaaattcctaaaaggcatctactaccctcctctttatgataccgctattagtggtgtaattgagtatcaagtctcatataacttaaaaaa

SEQ ID NO: 312355 - DNA, 1028 bp, Cannabis indica
aaagtatcgataacccatcgataatcacattttggctggaaagtcataccctccaccaccatctaatgtctcaaacaaatacgaattcaatgagcttctggttggaggagggttaggtgggcggtggcgaatgacgatggtggttgagagaagtcgaggaggatgaagagagaaaaatttaggtaggtgagatttgggggttgttggattaagttttgggtaggagaggaggttcggtggtggtggttggtggtctcagtgcttgggtttgggtttgttggcaagtggtggcctggtgggccgatgtggcaagtcgatttttacacctatgagtttcaaccaatcatcttttatatattttaagtcaattttaataggtgggacctatcttaaataaattaaaataattggatgaaacatataattaaaaaattgacttgccacataaatatatattatacatgtgtgttatttgtgacatacttttaaattgcacacatttaattatatatataataaatattagtcatttatatttttaagtgggataagattgtaccacttttcttttctcattaataaataatatttgttgaggtgtggagaaaatttttatttaatatttattattaagagagaatttcgtatttattaaaaagttaaaagggtgtgaaaaagaaattttaggagttatgtttacatcaaaaagatatatctctcttatattaaatgtaactatataatagaaaatatttttattttatttttaaacattgtgatttaaatttaaatttactgtacatatctaaaaaatattttactattattttatttatttttaaattataagtatctcttatattaaatttaacaatataacaaaaaaatatatttttttttaaaacgttgtgattcaaatttaatctaactgtacatatctataaaatatcttaaaaaaacaagagtaatttgcggcaaaacctcccaactatcaatttacttgcaaaaaaccatccaacctcatattt

SEQ ID NO: 312356 - DNA, 2628 bp, Cannabis indica
aaagcaccaaatattgacctcatttctagtcaacgatgcaaagtcaaataaacgatagtataagtgtttgaataatgtaaataataaagaactataaacgacacaagacttataggggttcggcccctgaattagtaatgacatactcctctttttgttgtatttaactgagaaataataagaccaaataaacatgatcaagtgagtttcttgctatctctgaaagttgtaagcaattcggcagcataatagcactcttgagaatcccaaaaattgatctcagaatagtgaatatgatgcactatttataggaaaaaagatgtagcttttttacatttaattacagaataaagtatttaatatttaattgagtcaatcccacgaaatcatcaattctccttgattctcgcaatcccacacttataggtgtcctgattgacctatttgtaagggatgaagttattgggatgattctggacattttctctgcaagtgtgttggtcggatatttgtccgagaagtgccttctgagctactcgacatgctgatcatcatgcttcgtctagtgtacgtttggctatggtcgactctatttggcacatactctgcccaacgtcttctgggcagtcttctcgaccatattgcatatgtccagtaccttcgacacttgacacatgtcgtattattccataccacgtcactaggttgttttttggaataatacactcaatgtatttaatctttaggccctttttgttctgaaatttatcctacatttcttttactcggtctcttgaattctataataccaaatttagtttgccaacgatatgatctgtcctgattttggatttgagataaaatgtatctcagatcggctcggtacaggtcatacctcgaattgggtccatattgggtttatctcggattgacccgaaataggactcatctcggtcgtccgagataggtcttacctcgatctgacccaagataggactcatctcgatctgacccagttaagaacatatctcagtcgtccgagataggttttatctcagtttggcccaaggtgcgaacagctcaagataaatagtatctcagtttggcttgtgataagaacttatctcggtcatctgagataggtcgaccgaagagaatgaggacgtgtccagggtttgactgtagtgagtgcttcctggtgagagagatagtatttatcttggtaagattcggaatcggatttatctcaacttgatccgagatatatactacctcgaccctgccttgagatgatcctcttaattatatttcgattttcttttggtcctgatcttaacgtctcattcccttagcttccaatccttggtgggcttccatgatatttgcttagtgggcctttctcattttctgtctttgcgtgctctttattggcccaactttccctcaaacaacaatttttccatccaagaaaatggttgaagatgaagaatttggaaactgaagaacatagtaactgccgtcaaagagaaaattaagttaattaactgcccacgtctctcctttccatttggcaaacttaaaaataaattaattttacgtctctgctctattaacacgtgacccacactatgtgacccagataattaaataaacatctctaggaaaaatacgtagtaatagagcggacccatatataagtgaggtggggcagccgtctcctgaaaaaaaaaaatcaaaaaagaaatacatatgcattttaattagttacaacaaatattaataataaaatatttataaacttaatatcaattttagtgtaatggttaagctacttaagatatagattagaagacaagggttttaatctcacagaatattttttattttttttttaagtttatttttgctccctcacttactaaaaaaaattatgtctccctcactttaaattctaggtccgccagtaacaaatgacctataccactggtagacccaaaattgaagttgagggtgacaatttttttttttcccgtaaattaggtgaggtataatttaattttttacataatataatatattaaaaattaatccaaacttatatttttataatattaaataatttgaaataaaaaaaaagtaacaataaaattattagttttaataattaaggcactaaatatgcaaataagagttttttttttaaaaaaaaattatatatgcatgagataccttgaattaaaattaatattttgttaataattataaatatatgttataagtatacatcttttttgccctcatagtgtatacaacccaaagtgaacggccttaatatatatattattgcatctctctctctcggatcactatattatatgatttgaaaagaaaaagaatgatatataaggcggtgaatcaaatgtattgtctaaattcgtagacaattggtatttaaaagagaaaattacgcacagcaacttaattttaaaataattattataaatagcggtgactgtttaattgtctcaacctaccgaagattcttttaattttttaaaaaatgtgtatatacgtactacttacccagccttagtaattagtattaattactttttctctcttattttt

SEQ ID NO: 312357 - DNA, 1920 bp, Cannabis indica
gagaggtgaatgcatgatgacaacaatgacattaggagaggaatcagaggacaaggcatgcaagggaagagtgtacaaccacaccttatgaagactgagaataaggagatacaagtagtggcgagggtacgctgaagacccggccaagggtaagctgcaaccactctccaataccctatacccggggaccaccctgcgtgcagctgggggccatgcgagtgaccatcctcctacaactatcaactgaggaaaatgtgcatgtacccgaagaccatcctcttacaacctacaactggggaccatgcgcgtgtacccggagaccatcctccttcagcctgcaattggggaccatttgacaccagacaagggtacatggtgccaagcttcctccagcacatgcaacatgcaacgggaaagtgacatcttatccccatgggaccactttgtacaccaagccattaaagcctataaatatgcccatctcagatgtgaaaggggttggaaaatcatttggtgtaattcagatattgaatttaatataaagaggaatattcaaacaacttttcaccttcatctttatcttatctttatcacatttctgggtaaccttgccttttctgactactaaattagttgatgagttctcacaatcaacactcacatttaatggaaaaggctcaattgatcctccttgagttaacgtccgttaaaaggtgcacaattactgaaaggtttcttcaagttgaacgatcatccagagcttagatacgtgaaaacctgctcgtagcaggatttgcttcccaataatgggataagaaatgtctcttccaaacccaaaagggccttgtagaaatgcttgtttcggatggctccccaaatgcacactagagaaacctagggcagacaccgaccctcatgggtgttagaagatgtcgacttttaccatgagtcgggtcactaaagtgatggtgatgtttttcctaacaaaatccaatcttttctcctacattaagatatggcagtgcacgcaccaccaccatcctaataagtgattgctctatatcaggcaatgaccccatagatccatgtttttaagtttgagtccttctataggctcgaatgctgtccgcttttttatgggaaatctcagtgtctgctgcttgctgagtagtggtgtggataccaggagtggtagtgttactttgcatcttgattgttgattgattgcttgaacttatgaattccttccgacgcttatttttgtaactcttttgggggtgaattttgatgataataacttcaaaaatatgtcaagggtgtgggacatgacttgatcaagttgaatcacgttaattgaataaaaattgagtgagttatggtcattttactaaaggcagtttaggtccaagcgcctaagttgatatcccaatgcccaagttgacatctgacatcagcctggacgttgtataagtgtagaaacgtccaaggggtgtcctttgagatgcctaagtgatagtctaacatcactttgtcaatttataggttctggcaaagctagtcaccattcgcagagatgttgctgttttgcagaaacaaaaaactcaaagctttcgatttctgagtgagtcaatttctcaaaaaaattgaagttgtgatattgattgttctgacttcatggatcattgcacttgtgaaaaactagacggacagttgaaatggtattagattcaaataaacagaacccaacgaaccagccatttgttgacttgggcattgggccctttaaaccaagctttcaagattctgtttttgatacttccaagacttttgaacttgaggatagggtctcctccactatttttgaccatgttggattcaatggttgcatcaaatttggcatttgagcaattaaaagcagga

SEQ ID NO: 312358 - DNA, 797 bp, Cannabis indica
aaaatatcgctaactaattacaaagcacattaaaattacttatacttttacccaatcaacgcctagctctgggtctgtagactcaaaagcaagtgaaagcagtgagttgagtaagtcttgtcactaaacaacactttgcacatcacactattcacttttataaaaatttattggtgttatagttaagcattcttggatgaaagagtagtttgacccattcatttctacaagcatgagagatctggagctaagcccctttaagtactgctagacactactgttacttaacattaatacttaatgttcaatataatataaatacaattaatctcgtaatctcatcaaaattttcatatattaaaaccttagtagttgatagttggtattctaaaaatatttgcatgatgctctaagctctaaaatttcagagcactaactcaaagtggaccaaaagagagctccaattttttttttatgttttgtacacctatattttctatttacctatcatgacatcactgcacttaagttttatattataaatcatcaattattaaagtctttccaactctgcatatgagatgttatttatttatttaattaatattggataattttatttacatatggtatgctgtaatttgtttcaacataaaaaaataacacaaaacttaattcacttgaattagtaggtattgtcatcatcttatacaaaagaccaacgaaataataagcaactccaatctcaatcaacaccaacagagagctaactgtcacatctcatcaatacaagtagt

SEQ ID NO: 312359 - DNA, 1555 bp, Cannabis indica
gccgaaaacctcggtcaacaagagtcactagctatttcttttaaaaaaaaaaacttaaaacaacagtcattattattattattggagttgtgacctcagtgcattctattttccttgaatggaaacttcatctgcactcactatttgaaccatacatataaataaaatcattagcaattttctctcttgaacattcgacaatattgattctgtcccctaaaatatacaacttgttgagaatcccctaaacttttacatatacaaaaatttagtccttttgttagcttttgtcctattgttctgtttaaatgatgacgtgtctttgtaaattagcaacttttcccctaaactttgacaactatcaaatcataccccctcaaaataaaaataagaaagatttaaatttttttaaattttttttagtaaatcttaaaaaattaatttagatcttaagaaaaatcatttttgttgacctcaaaaagttatcaaccaacagcggggtttacagatctgatacttgccacgtgtttgcaaaaataagaatgaaaagcaatagacaataagatttgttatagaggttcggtcctttatgatagcgggtaatgacctacttcccttctagttgtattataccaagagaaacattattcatatcactataggtgggatctgctatagcacccttaggattacaaggtatgaatcagtattggcaaaactcaagtattgagatgtgctagggtagacgagtgagagagggaaagtgaggaacagatagtttattagacacttagtgtttagaagtaggtttctagcttaaaagcaacttaggtttttagcttgagattaaggcctttgtataagaggcctaaaaccctaagtttacagtttaaatcccttagtattcgtatagtttgttagatatttataaaatatcaaagtgtcattgattctagatattatttagccattttgttgggcttttagggcccaatttgcagttcatagctgttgtccacatgtagaagtgtccaggaaagcttgcagtgcactccttggctggccaggcccctatggaggctaggctggctggccatggtgatgtcccaaggttggccaacgatagggtcggccaggggtggtcagccagcttctgagagggagtttgtttcccacttgatacccgtttgagtgtcggggtcttttgtttgttcagatgttgacttggcctttcttttggtgagttgtactactactacgtggcactggttctttccacgtaagcatgccacatcatgaggacaaaaattgggataacatttgcccctgagtccctgcgtggacgtctgtacggatagagactttaccagctatattgatgttatcgggactgttgtaacctttgctgaataaaagttgatgtgcttgttgaagtactttgtcttgactgtctgatctcattacaatagagaaataactgctttagttgcctttatgatgtgtaggtgaggtaagtgagaaaaaggggcccacatgtactacataagtgactttt

SEQ ID NO: 312360 - DNA, 591 bp, Cannabis indica
ttaaataaatgttaaaaagttaaattttgaagtgaatggaatttggtgtattttataggttgaggagagtacaagaaggtgttattcttcgtgtcactgtacgtgttatcagtgggcgaaggaggacacaagccgtgtgttcagacctttgcggccgaccagtttgaggagaaaacagccgaagagaaaaaggctaagagctctttcttcaattggtggtatttggggattgttgctggtgccaccgtggcaatcatactcgttatatacatacaggttctttcttcaatatacttacatataaaaaacaaaagtattttattgattatggatcccatatctcactaaccaatatcccaaatttgtctccaatatcataaacactaattaatgactcacactcatatataatcactaattatctagtggctttttttcttcttcttctttagatacggagttattaagacatatatattataggatactttcgtcatagtccaacactcagctcctactaagcctgtcctttattttaccggagccactaatatactttacacctttggtggccatgccgtaacagtgtaa

SEQ ID NO: 312361 - DNA, 1161 bp, Cannabis indica
agtaatttaaataaaaacaaaaattactaattaaaattgtaaattttagcttgtatgacgtgcaatcaaaattgtaacatgtagcaatacaggttatcataagattatatctcatcaacacattaagattatacatagaggtattctcttaagggcgagttgtcgtctggtcgataggaagacaacaacttgatagataagcttgttggatgcttatattgaaggatcgatatatgcttaaccagtatatatattttgacaaagtaaattgttctgggacaattgtttctttagttcccacaacctcgataatgacatgctcaatccatatccactattagttcaggatcccacaagattcaatttttataatgttcttttcaattttgagattaattttaattcattagactatttaaaatttttatgatattatatattaattgaacttgttattatgggaaaactcttatacattttttttttttgaaattttgtaatacaaataatcttctcaagatactttattctgaaagcgcctaaatatactttaagtaatacttctcgtgtccttccattagtgttgggtgaagcaaatgcaggataccatcacaatatgccaatttcgagatgaatcatcctgggaatatgacccttagtctcttagcatactcgtgagtatgtgaatcaatgagttgcaagctctgtaaataattaattatctatcctttccaagcattgtcattctatgtattctgtattttttgagatgaaccttctaagttgatcgttcatcttaccaaccttatcaatcggtagttataattcatggttcacccttatccttaaaagggtgtgtttgaatatttctaccacatgtatttttcgagacaagtttattgaatgcattaattgctttataacacgagatggtttttttacacgtgtcaacatcatattgttgctcgaaatatgagtataacatagacataaaacaacaacaatttattttattttgttgttatttatgtaaaaaagaattaaaatttataagtaattaaatattaaaaagtaaccaatccaaaataactaattcaatatgcacttttgcgagttggattggatttgagttattagagagattggattgaatctaaaaaa

SEQ ID NO: 312362 - DNA, 742 bp, Cannabis indica
atatggattttcctggagttggagctacaaatgttcagcaccattcagcaaacattaccattgcagagattgtttcagatgatgcttggtacccagattctggtgctaccacacattgtactcccaatgtctccaatttcacacaaaagcagccttatcttggttcagatcaggtttaaatgggtgatggtgctggtcttcccatacagaatattggtaatactattcttcatacctctaagactcataaacctcttgttcttaatcgtatgcttcatgttcctactattaccaaaaatttaatttttgtctctaaattcacacatcataacaatgcattctttgaatttcatcctaaccattgtgctgtcaaagatcaggtttcgaaggaaactcttcttgaaggacatcttaagcacggtctttatgttcttgactcctcacagtttcatatgccctcttccagtcttggacacactcttgcatcttcatctagtccacatactgttaatgtacactctttaaataccacttcttgtaataatttttctttgtggcacaagaaattagctcatccctctgccacaattgtaaaagccataatggctaaatgtaatatttaagacagaaataaaagtgcttcagatttttgtgatgcttgttgtttaggaaaaattcataagtttccttttccaaactcacaaactacctatactatatgcctttacaactaattcacact

SEQ ID NO: 312363 - DNA, 1399 bp, Cannabis indica
tatgcttttcttactaagtctgtcgactcacagtgctatgtttatgtgtaggtaagggcaaggctaaggctgaggaaccgtgagagcgagccggtgaagattgtacatgttggggcggttaggcctggagcgtacgatcctcgggacaacagtgctttttgtaattagtcgctaggcgacaagtattttgtatagtcagtgaacttttgtaaaatgttttgtaatcgggatcccgagtatttttgtataaatattttataagtttaattaaaaaggaaaaattttaattaatcacgatttccataaacctcgttgattagcaacaagctgcacagtacgtttaaaaatcacgtaatacgcctatgctagttagggtgttacattttcttaaagggctttcggctgaactgggagatgatatttctaaagttgtcctgggattctttcaatatggttatcttccgaaggatgtgaacaagacaaccatctctcttatccccaagactgagaatccacaaaatgctagtgactatagacctattgcctgctgcaatactatatacaaatgcatctctaagatgatttgttctagactttatgaagtgcttcctgagctcatacatgaaaaccaaggagcttttgttaaacataggtagttagctcataacattctaatcttgcaggacttgttgaaagggtacactcgaatgaatttatcttcaagatgtattatgaagattgatataagcaaagcatacgatactgtggactggttatttgttgctgatcttttaaaaggtctttgttttccttccaaatttattaagtggattcagagctatctttatggagcttcttattctcttatgttaaatggaagaattcaaggctcttttaaaggagagaagggtcttcgccaaggagatcccatgtcaccactcctttttgttctcattatggagtatttgactagattgcttatccaaaagtcaaaggagaaggggtttggttttcaccctctttgtaaatctattggactagtcaatctatgttttgcggataatcaaattatcttttgcaggggtaatgagaaatctgtccaacttgttagtgaggctttccaacggttcagtgaaacaacagggcttgtggttaataaatccaaatccacagtgtactttggggggattcaagatgatggcaagcaaaagcttcttaacatccttcaaatggatgaaggaagctttcccctcaaatatcttggtgtgcatctcaggcccaccaaatggaggttctcagattgtggtatcatcatcgataaagttcataaacacttgcatacctgggctagcaggaatctctcgtttcctggtagagctcagttgatccattctgtcct

SEQ ID NO: 312364 - DNA, 1224 bp, Cannabis indica
attttaaatctaagtcttacataaacccaatttaaccacttaaggctagctcaagtggccatagataggtgtgtaagtgttggaggtcctgggttcgagtcccaggtaaaattgtaatatataaacgcttaaaaaaaaaaaatacatatacccaatttaaaatactattaaagtttgtgctaataaaatacaattttattaatacattaagtaccgctaaacgattattaaatttataaagttctaatctcaaaactatgaatacattcacaacaaaaagcgttagaagaaccacgtcaaaaaaaaagtgttagaagaaacttgggatttatgaagaaacttaaaatggtattttcataattgaagtatataaaaatggtattattgacatagttcacccgaaaattgggttgggcctaataaagcccattaagtcacctcagaacaagaatcaaacaaatattcaaacacaaactgtcgcatcggtcaatggtcattcagttttcccctttctcggattttcccccaattttcgattttgaaatttttctagggtttcggttttcgatttgaaaactaacactcagaaatccaatatcaaattgcagttgcagagttcagagaaatccaatgtcggcttcgaccgtatccattacggcgaatcccggtactcggcggaggtcggcggttgtggtgtcaacagagaagtcaaagaatatcgagttggtttccgccgagccccaaaacaaaaccggtgatgataaatccaccaccggaaatggcagagatctgagtcaccattcgattaggagtgaggctgttctcgagcgaacttcaagggaagccgtacagaccaagaaatctgctgcgacatccacggtctcgcctccgttgacaaccaacggtcggagaagtcggaaggtcgcctctccgaagccccgttgggccaccgcccttagtgtcttcggtaagaacttcgttcttctgcttttgcttgctggtcttgttcagattgttaggaagtttgctttgggatctggagatgatggggaaggtggttctcctttagcgttttctgatttcgagggtagaattgcggaaattgagaagctttttaagtctactacgaagatgatgcaggttcaagtggaggtcgttgatcggaagattgataatgaggttggagggttgagagaagaagttgggaaaatgattgaggaaaaa

SEQ ID NO: 312365 - DNA, 2194 bp, Cannabis indica
aatagatactgaacttaattttcatcaattattttcttaatataactaacttaaaaacaatttttagtacgaatagttgcaaaaactataattattcttgtcataacactttcaggtcaggttattataaattttttatttgataaaaattaaactcaaggtttattttgtaccattttaaaaatgcaggattcgaattggtatttaacaaaacagagaatccaatcggtaactttcgcaaaatataaggtccaaaatagtatttacccaaatataattatttataaataaaagaccaattttttttaaaatactatatttaattttttttttagaaaataatgtttttttaaaatactatattttagatttttactactaaatttaaaaaggcacaattaaattttagtccaaggctgacaagtagcttgagacaaggcgagggctggccttgaaatttaatgggtcataagaaaaaaattatttttgggttatatgatattttttaaaattagtaaaaaaaatagtataattttaaaaaggaaagatttttttgggtctctgaattaagtgggctctaaacacaagtctaactcgtctatgctaagaacaggactctatatataatagatacatgttaaaaaattattattgttacctgttctaccaatgaagttgcttgagattggaatatgattttggcaatggaaatagtgttcattttgtttgtataagtagctccaatggcaagaatcattggaacaaccaaaagagataggattgccacttcccaacagcatatgccagcaatcaaaattccacacaagaaagttgcaacacatgatagaaaatgacccaactgtatatttatatacatatttatatatatatatatatatatgagtaaaattgtatacaaatcatactattatataatttatctataaatagagcctaactcaataaatatatatcgaaaacaaacgcatgcaatacactatttgaattttaattttgtacattttaaattattacaaaaaaaaataattaaaaactcataatatagttgcattgcattttatgcaaatactaaaaattctaaaattatgcataaatatagtgattaaaaccaataatttttcatatatatatatatatatgtaccttctctccaattgcatcttgaatgatattgatgtggttacttattccattaatgatttttgcagttgttaaatctgtgtcaaaagctccaatctcttgattaaggactgattttagataagctaatcttattcgtcctacttgtctttcacttgcatacatccaacatccaatctctatcaaccaataaaaatatattcaactcctatatacaaatattatatatactataaaaaaaaaaaaaaaattgtgataatttttagtcataatataatttttcttgtagttaaatatgattttagtcacaagaaaaattatttataactaaaatataatattttgatacaagttaatgctaatataattttagtaataaatattgtgactaaaaatatatatatttaactaaaaattaatgcaaaagtataaatgaattttttttgttaagagaaagtagtaatatttaccaagaattccagctggaaatgtggcaatggccatgtaccatacatagggaacaacctaaattaaataaccaacacaagagtaaccaactcatcattaatacatgcatatatatacaagaatataaatatatacattattattgatatatttaatattgtgtcatacaaattataatttaataaataatatacaaaactgctatcaattataaggtgttacatcactttaaggtattaaatatcaacatgacacaatatattaagataaatgttaaaaaatatcaattgtgtctaaacttttaagaaatttgtaagaccgaccccgaattgatttggactttagaaaaaataaattttttaaaccctcattataagaataaatagtacttttagtttttttcaaagaaatatatatatttattaaatatctttttatttggacccttaaaatgagtgagccttaagcgcaagcctaattcgccttatcttaagactgaccctaaaagtatgcagggccggctctaggcataggctggctaggcccgtgcctagagcccactctt

SEQ ID NO: 312366 - DNA, 886 bp, Cannabis indica
aaaaacctgaccacttaaggaggttatgtcgcaaattactctttttatattgtaaactgctatatcaggttgtcaatgtgtacacagtgtattgtcaatatggacacagtgtgcggtgtgcataaatcaatccaatccaatgacaaccgaccgatctaattacaatcgaccaataaacattggatatttaattgtgatcatattaaattggatattatttttgaatatctaattagatcagatcaaatgttggatgggatgtccaaaaatctaatgcataaaacattcgatcgagctaattaatattgtcatttagtaaaggttgttcaaaacaaaaaactaaattgtatatacaactaaaattcagaaataatgttaactcgtgaattatgtaaatttaattacgaaaccatttaaaaatatatgatgtcatcttttcttttcttaaatttgttatttaattaagggatatttgtggtataaataccatacgtttttggttttatacacttaaataccacatgtaaacaccttggcgaaggagagcctgctggccatgattgatatccaacaagtctttttccttttttaggtcctgaaggtctctcttcagaacctcattttcatctagcaaacccttattggcagtttgtaactattgatttttagttttgacctgctcgagctctgtgataagggtgcccacttcttttacgaccttttccgccatgaaagatgcttggcacaagaatgaaatatgagaaaacaaaaacaatgcacgaaaataagaatgagaatgtgaggatttaagtttacctccaaaacttgctgattggtcgcgtgggtaagggtgaacacatcgctgctgatgtaagtagctcatgtt

SEQ ID NO: 312367 - DNA, 1635 bp, Cannabis indica
cttaaaagaaaagttcatggcaaaaaaggctacatgactctcaagcttgacatgagtaaagcttgtgatcgtgttgaatggggatacttaaaagctttaaaagctgttatgcttcaaatgggttttgatcacagatgggtcaacttgattatggcttgtgttactagtgttcggtattctatttttcataatggtcatgtcatgggaccgatcactccatctcgtggcatccgtcaaggtgatccgctttctacttacttgtttataatctgtgctgaaggtttctcagctcttatatctcggtttgaaagggagcgtttactccaaggttgtcgtgtatctcaaggtacaccaatggtctctcatatgctgttcgctgatgacagttatgttttttgccaagctaataatggtgctgctggtagtgtcttgtctcttcttcggcaatttgaaaatgcgtcgggacaacaaatcaatttggccaaatcatcagttttttttcagccccaatgtccatgaacaactacgtcacagcatttgttccattctccatatgcctaaagcctctgaaaacagtctttacttgggactccccaacatcattgggagaaataagaaggctattcttggtttccttaagaacaaagttttgaatagaattaatagctggactggaaagttgttaagcgcgggtaaggaaatccttttaaagactgtggttcaagctctccccacttatgctatgagtgtctttcttatccctctcggcacttgtgatgaaattgaaaagttaatgactcgtttctggcaaaaaactacaagtagcaagggcaatggaatcatttggatgaattgggaccgcctctctcgtccaaaagatgaaggcagcttaggctttcgccttctccatgattttaatttggctatgctagctaaacaaggttggaggttgctgtgtcatcctgactctctcgcccctaggatttataaagctcgttattttccccatgatgactttctctcggctgctttgggtcaaaatcctagttttgtttggcgcagtatctggagttctatggatttggttcgccagggggttagacgaaccattgatactggttcttctactagtattctgcaccatccttggctccttgaccatggtaatccttacataacctcttcccatgttggtcttcttggtcatgatgttagctctctcttctcgattaatgaaagaagctgggatattgagttggtccgggatatgttcaatgatagggatgccaatttaatcttaagcatccctttaagtttctcggcatcttctgatttctggtcctggtctaatgaaagctctggtcacttttctgtcaaaagtgcttatcgtcttcttcaggcgtcaaaagatcccagaactggtaacaacaattcaggcttttagcaaaatctatggcaactaaagatcccaccaaaggttcgcaatttcctctggcatgctgcttctgggactctgccgacttgtgtaaatctcagaactaagcatgttgatgtcccatctctttgccctgtctgtcgagccgctcctgaaacaacctcacactattcttcttcttgcacttttgcttcttcttg

SEQ ID NO: 312368 - DNA, 1598 bp, Cannabis indica
ttttcctagtgtacctctatatagttataccttttaattagaatataattttgttagtcccaagtgtattcttggatagaggttctactgtataactttttctttttttgactcaattttgaccaatcgagtccttacaaatattattcagtgtatatatatttcactcgtataatttggttattgtcgtaatttatttatagattattgtctatatattattcagaattttatgtcattgtaatatgtagttcaatttttagggaagtcaatggccatatatgtatttgattcagcccgattgatttctttggcgtatattaatttgtcatagttattttagtgtggtttaattttgaattcatactatttttcacaatttggcttcaataaatttaatatttatgatacatcttattgtatataatttatttaatttttatttagtttattatatatatacagtatcagtgtatttattttcttcttaacagaatgtataccgtttatttcgttaatattatagattttagttcaaaaaattaaatttaaattttggtattggtttatatctaatattttaaataaattaattgaaataatacgtcaccaaagtgacctcttttgtgtaggttaatttatttaaaatatcaagatgattgtgtgtttacaattgatacatatattgactaatccaaaggtaaatgaatattttgcaagattttatccacacctgtggcgataaatatgtgataattataaggtattttgtgtgagcaatacgttcgtccaaagtttaatctattttttagcacaatattattgtcaatgtttgattgctacaccaagtgcactgcttacagttaatattattgtctaaaaacttgatattaatgtgtgtttgttgtcttgagatgtgattaactaattttttaattatgtatagtaatgtgaacctattttatttattctatatttagctagttcatctaatactgtcacaatatcagctaataataatgctattcttatgcttaatgagaccaattccaaggattgaaaaataaacttatttatagttctgggatgtatggatttagattatgcactaagggatgaataacctgcacctctcactaagaaaagtacctgtgatgataaaacggaatttgagatgtgtgatcgttcaaattacatgagtctaatgattatgaaacacaacattttagaagctttttgggtcacaaaatctgaaggggttactatggccaagaatttcctcgaataaattaaggaacgttttgctaaaaacgataaggttgaaatgacaacacttcttggttctttaatgaacatgaagtataaaggtcaaagaaatgtaagggagtacattatgaaaatgcatcatattgtctaaagactaaggacacttaagattgaggtttctgatgatgtgcttgtattcatagttttgttaatgcttctttcatagtttaaccaattttaaattagttacaattgtcaaaaggagaaatagactcttaaggagctcatttctcattgtgtgcaagaggaagaaaggttgaaaaatgacaaaa

SEQ ID NO: 312369 - DNA, 1141 bp, Cannabis indica
cgtggaagtgattatgatgcagaaaagattcagtcagcttggaggtctgcagcttgatagagatgcaagggcgttggtaagccacttctctggcatgacccaaaggactgttagagataagtttgctcgtctcactcaaatggcgacaattctcaacttagagaaggtatcagagattcttgatttctggggtgaaaattcaggacctatgacttggagactaaccccagcggaggttagacgagtactaggccttagagttgaatttaaaccggaagcaattgcggctcttaagttgtaaatgagtctacccatagccatatattcttttgttgtttgtttacaaatctattttcttctccctaccaatagtttttcccctttgaaaagaatgaaataacccttcttacatcacctcaggcaggcatgtagcattttgttttgttgtgaatccgaaacagtgtacaattgaaaaagaaaatttactattttgtatcgacctcattattatggaagtcaaagcattgtgttttgtcttaaattttagtttaagtttgattgaattggttttcaagcgaaagctagcttatttaccaaaaaagaaaaaagagaagctagcttcgatttcctagaattagctgacgatttgaatgactgataatgtctcaggtaattacattaaactctgtatattggcacagcatttgtatctcattgacattctttcgtactggttgaatttattatgccccacttatccatatccactatctacatcgtgatggtcaaaacaaaaatactaaaagtaagtaaaataattgccctgtagattatttatagcaaccgaaaagaagttttattaactaaagttacagtccctaaaaaaagagaaaaaggttaaaaaaactaaaagttactgctgttttgaataggaactttcccttgctgttatgctgctcataggccatccttaattgtttttgttgttctcgctccttctgagccgactttggtttggaaaaaaacaaataaataatttgtttatcaaatgtcgtttattttagcaattacattgtgtttgtttaatttttcatatgtgtttttgctctgttttagatattgcaagattagtttgagaaat

SEQ ID NO: 312370 - DNA, 1825 bp, Cannabis indica
gcataaaacccaacacttgcttcctcttaagataaagcaagatttcaaaagagaccataatattatctgtgattaatctcccagggatgaaagcactttgatgtttggaaataatttcagataataaccccttcattctgttaacaagcactttagtaatgacattacaaagagaaatggaactttagcaatgactttagcactttagtaatgactttagcactttagtaatgactttagcaatgataattggtggggattcgaaggccttgccattgaatacccttgacatctgggttcaactccatgatatggaggctgggtgtatgactgaaagtacagtcgaaaaggtgggtaatattatgggaggtttcttgaatatgatcctaagaattttatcggagtatggagggactttcttcggattcgagtcactttgaatattgataaaccattacgccgacgaataaagattacgaaggatgatgggagttagttttggattaatattaaatacgaaagagcccctacattttgtttcatctgtggcataatgggcactcggagagattttttcatcgtttgtttcttctatgtccattaagattggagtacataataagtttttaatgttcattttgtgctagacataatatcaaggtatattaaaggaatatttttcatttcaaataattttggatatgaaaacatattcatgcccaacattgctgcacgtgaaaatacgacccacaagacacctttcattttcaacattgctagatgtgaagtacaataatttaatattattatatttcaaaatcttccattttttattttgaataataataatttaaataaatactttttttgaataattaaataaaagtaatgaatttcattaatatgtaataatggaaaaaagtagagctatgcttgaattttcttgaaaaagatgagatatgtaccactactaaaaaattagtttttcgtgacgattttaaacagtcaggtaacttattcccgttggtttctataatcatcctctattcgaccgttgcaaaatgagaagaatagacgatagttcaaaactgtcgccaaaaagctttcccaacagtgtaaaactgtcccttatacttttgaattttgggcacggattcaaatagtgatcacctatactataggcgatggttttaaattgttgcttatagtatatgtaaagccccaatatttttccttattttacaaaatattaagatgcatattaattgaaaagactcaaaactgcttggaaagacatagtgggccgttttacaataaatatgcaaaaaagacgaatgatcattcattttaaaaacaaaataagtagttgagtgtatattttaaaaaaataaatttgtaacatgccactgagctaaaattactttactatcaaaaaacacaaaatccatgactccaccggcggcctagaccgtttgctcgtccatagcccctcgcagtacacataccaagtgacctagcccatcaaacttatattcaatgttccctgtctattgcctgtagggggataagggggtgggctaaaagcccagtaaagtaatgctttaacacacattaatattcaataccctatgtcttaaattcacaacaacacaactatatataataccatcatattcctaatgtattaagtatttcaacatcatattttaactgataactataattaaataatttttatacatggaaaattataatacatgcctctatgctaatccaaaataataataccacacgtagagatcataactcttatatcatactcata

SEQ ID NO: 312371 - DNA, 5727 bp, Cannabis indica
gaaacatcaaagaataagaataaaaatgaacatgactaatattattttaacacataagacatgtatttcttattcatcattccctatgagaattataggaattgaattcatttaattttaaatagcgttcatattttatatattagttatgttattctattttttacactatgacatgacattgagctggatgacacgtacgtgtctcatattttcctacctaggcggaagggtatactcctaacagcccccaaagattggtagaaaggtccatgttatccgtgcatagcaggatgtccaaacagagtcaccaagggacatccgaccaaagcttgatcgtgtgatcaactcgcatgcaccggacaggatgtgtgagttggcaatttcagagatagacattattgcttccaagacacacatataatccctacatttgtagaattagatcagagaataaaggcaatgcgcctcgattttctattcgttgcattgtaattatataattaatttaatttccaattttatttattgtagattaagggacactattcttcatgtaataagctcttataaatcgcggttcaatctcactattcaggagacaaaatttgattcagaaagaacactcaaaagagaaaagagcgatctaagagagagttactcagagatccattgtaagagctttaaagagagaatacttcattctttgtctctcatatcaatacaagaaaagggaagtagggtattaccatactcatggggtcgaacctctagaaattccggtattctctttacttattgtttttgctttctattatttactttatctaatcgttttatcttgactcattgtcgttggctagaagcgagataaaaattttggtgttttcattgagagaaaaaacacaagcttttctcttaaagtctaaacaagttaacaggatggttgtaacttgtgggggaattcaaactgatccagttgatccaatggtgatagatccaagtgtacagactcttagaaacacaagagatccaccaaggacaaaccctagacaagttaatacacaaccaccgatggtgggccatagagtgacttcctctttggctggtttcacacaaggcgtacgggaaaatgggaataccagtacggcacccgaccaaccactcctggcaccgagagcctgtccaccaataacactcaaaggctagttggagatgatactaaactttaaaacctgcgagttgtgcttggacttatgcaagtccttaacaacatgttgcagcaggatcaggaggatctccaaacgactatcaaccttgcctttggttagcaaagacattaattcatataatgaagagatcgggagatggaagtcatgagggctcaacatgcagccattgacaactattctaggcaggccaccgtgctgattacaacggcctaacaagttaccagtcagcaaccagtgactaattctagcatccccttgagcaggatagaagaacatgcagttggtcatattgcataaaattataatggtcaagcatccaatccaaggccacaagccaaaactatgggccaaatgatagacaactgtatcctgccagaccaccccctggaggaggtactcagttaaataactatactcagacagaggtatcaagataacctctcaatctgacttgtcaaacccaaatacctctcggtacgttagtgttcgaacgattaggtaccgtgcatgacttgaatcgcaaaagaggactgtacaagcaaaacattccacaacccgtccagccaaataactatgcccaagatccagttcaaagagatcttaatgtgacacaggtcgatcaatagcatgaccaagttcatccacttgtgcaagcacaaatacatcagcttaagagcctcgtataagggctgactggcccgaaactcacagatctcgaagtcaaccgggcaagaggatcacccttctcacctgaaaccaatgctcttgacttacccccaaaattaaaaatgctagtatggaagatgtacacgggaaaagaagatcctctctctcacttgaaatactttgagatgcaaatggatctgtagggggtaagaggcaatgtatggtgcaaaaattttctagcaacactatcaaaggccccccagttatggtatttcaaattacctctaggaaagtttaattgattgatttccttttcattcgaattctatgcacatttatcctcctcttgtcagcttccctcacaccttgaagacttggtagaactaacaaatgcgaagagaacctctaaggacctacattagcaggttcatgactgaagcaacaaaagttaaggggctaactgaggaaggatgattgccccaatactgggggcattaagcctctaggagaactgtgaaaggatatcaacagattaactatggggtcgatggcagaatttatagatggaacagatggattcattaagctcaaagagacagtacgacgtgtagatacagtgggacagaagaaaaatcagcaactcaccactacaaccgctacatctgcccagcatcctagcagtttgaatcaaaatggaaagaggtcaaacaatggcaatagacagggtaatgggaagaaaagcaagtttaacagcaactttaaacagcatcccaaggaaaatgcttcaaaattcactactttctcagtcctaacaaatgatatagaaacaatctatgcaactacctagtctacggtgccatacaagaaaccttctcccatgaaaaaggacatgagcaaaagagacacagcgtcattttcatgtggactacagccatgacacaaatgaatgtcacaatttgaaacaggagattgagttcctgattagaaaaaataacccacgcttaccaaaatatttcaagaccaacaaaggaccgccctggaagataaaaaccaaagccaattgatgcctccactagtggacgtgcatcttcacgtgatcattgagggcccacacgttgctggagactcaagcaaaactagagaaaagtatgcccgagacttgcagtatgaagaaaaagatacaattctggtcgtggaggagagaaaacctaaagtaccacatgttggagaacaaataataacattcaccgaagcatatgctagccatgtcatttttccacataacgaccctttgctcattgaggtgtagattgcaaacaaaatggtggcacagactatggtagacaatggagcttcctcaaatattctattcaagacaacatatgaaaaagtggggttgtagcttaaagacttgattccttgcaccaaactagtctacgggttcttcggccagagtgtagcgccacttagactaattttcttaccacttacagtaggacaagcaccaaagagcttaacggtaatggcacagttcttggtgattaatgtcccttaagcctttaacgtcatgttaggctgaccaaccctatatgacttgaaagttgtcacgtcggtattccacatatgcgttaagttcaaactaaaagtggagtgggctgtctaaagggaaattaaaggatttcatgggaatgctacaaccttcctctatctaaggtcaaaaaggaaaatgattccaaccagagttcagagaaagggaaaggcattgctcaatagtaattagcccaagctggggacaaagacatggattcccaacttggggaatcaaatgcaaatgttaggccagtagaagagttagaagaagtggagatcgatctagccatcccgaccaagaagctcaaattagtaaaggtttgtttcttgaaataaattagccttaataaaatttccaagagaaaactttgacattttttcctggtcacatgaggatattgtcggcattgaccccaatgtcatgtctcatgccctaaatattgatccagacttccattccatctagtagaagagaaggttactggacaaaaaacatgtgcatgcactaaaagaagaggaagaaaggttctgcataaacaagtttattattatagctttctacccagcttgggtggctaaccccgtactagtacccaagccaaaaaaaaacatggcgagtatgtattgacttcaccgacctcaataaggagtgtcccaaagactattttccactcccaagaattgatcaacttgtggatgcaacaactggagatgtaatcttaagctttatggatgcctattcgaggtacaatcagaccagaatgcatccacttgaacaagaacaaacaagcttctgaacaaacatgggtctatacttctataaattaatgtcgtttggtcttaaaaatgcgcgagctacctaccaaaggttagtaaacaaaatgtttaaagatctaatcggacgaaacatggaagtatatgtcgatgacatgcttgttaaatctagaaaggttgggggcacatagaggatctggatgaatgcttcaatattctcaaaaactacaacatgaaactcaatcccttaaagtgttcctttgcagtcaactcaagcaagtttcttagatttaatgttgatgctcgaggaataaaagccaacctagagaaaatataatccctcctagatatgaagttgccaagaaaagtaaaggcaatgcgaagcctaactagtcggatagtcgctcttagcagattcatttataaattgacaaacaaatgtgttcctttcttcaacatcctccgaggtaataagaagtttgaatggacagaggaatgtgaaaatgctttccaagaactaaaaagcaattcacaaaacctctcatactctcaaaaactttagatggagaagaattagggatatacctggcagtcactgaatatgctgtaagcaccattcttataagagaaaagaacaatgtttagaatccaatctactatattagcaaaagactagttgaggcagaaagtcgacatcctttaattgaaaagctaacttactatctgatcttagccacaagaaagttaaggccctatttccaagctcatcctatttgggtgtataccgaccaacccttatgccaagttttgcaaaagcctgatgcttctggacggttactcaaatgggttgtagagttgggttagtatgaaataatttttcaaccctgcacaatagtaaaagggcatgctttggtagagtttgtggtagattcacgggcaaagaagcaaacaatttaaaagataatcccgagccagacaaaggaccagatcaagagtccctgccagaggaaaatttacacaaatccatctagatgttacttgtagatggatcatccaccgatcaactttctggtgcaggaatttccctcatcatacttggggggcatcctctgcacggagcaattaaatttgggttcaaagcctccaacaaaaaaaagaatatgaagcactcgtagctggactaaagcttgctcagaaggtacgtgctgaatacattgaagtctgcagtgattcacagtttgtggcaaatcaagtctcatgggagtacatggctcatggagaaaaaatgatggcttatctcagtaagatccaagacctgcttgcacaattcaagggttataccctcaagaaaattctaagggaagaaaatacaactactaatgccttggcacagcttgcgagcagcatgataacaggtaaggccaaccttgtaacaccctaactagcataggcgtattacgtgatt

SEQ ID NO: 312372 - DNA, 1746 bp, Cannabis indica
ttcatatttaggatgttaattcaacatacttgttagtaaatctagatcctggtaaaatattcctaacaccagtcccctccctcctccgcctccttgatcgtgcgacccgttcgggtctcgagtcttttgacccgtgtttgtgcgactgacgtgtgatacctcctggaccgtgactggccatgggaaccgtggccatcgtagttactgtagtcgtcagccacagtgggtcatggtggtggaccccattaaacccgaccctataatagtatatatatgtatatttttggatgtatatataactatatattacataaataatttttatatattttattatatatggtatataatatatagtgcatatacactataaattatcatattattatttaatgtaaataattaattattattttagatctttattttttaaatttagttttgaagtcaaaataaatattaaggttattaatttggaattgaaaattcaagttgataactatcttaattattttatattaaataaaaaatattattttattattttttataaatcatgaaaaaataataaaattttgggggatacttatttttagaaattcaattttgaattagataattacaagttaattttatgtttagaattcaaattcaaatctataaccatgttaagacaaaaattatcttaacaccaattaaagtaataaatataattattttaagacaaaactggcatggtaataaaactgtcttcaataaagaatttatttaagaagaaattaattaacaggttttaaaagacatcttaaataaaatgtttatttaagattaataagttaaaaacgttttaattaattttgaggcttacgaagatccataaaattacaaaaatacccttacagcgatggagattagttttgtaatttattttttatttttttcaaatattataaaattaaaaatacccaatttttaacttgttaatcattattgtttacttattgtatatttttaaataaatgttcattaacagtcgattaataacatgctcatgtattagtgaataacatggtatacgtagaaatcccacacagttttgtgatcatgcatctcattatagaaacatgatatattaggattgtcctatgtgtttatgcgtttaccgtttttgaaaatgaaagcaagtaaagtgattaagcttaatttagaattaacttagtaatttttaaaatcaacctattacttcctaataattttaaattatgaattaaagagttaattcaaatttaatgatcatgacaagaaatttatttataagttgaagcttttaatataaataaatgaatcataattattaaagtggttaatatgtattaatcttgggaattaataaaagaaacacattaacgtcaaatagtgagtgggagaaggagtaatgtcaatgtaacttatgacctccattattggtcaacatcaaaggagtatagactagcctcgagataattttatttttgtcctcctaaggaaggtatgtgtctatactattgttcaaggttgatctctttactaagataagcagaagtgatgtattttagtgggatctcgaccctaaggcagcattgctaagttaagtcatgatagcaacatttcatcatatgtttatcattgttcaatgttttatttatagaagaaaaaatggacaaaaaaaaaaaaaaaaatcaagcaaccaatacctctataatcttc

SEQ ID NO: 312373 - DNA, 1845 bp, Cannabis indica
atcgaattattattaaattttattttgacaaaaaatcagttccgaatcctacttttaccattttagaaaatacagggtccaaaatagtatttaccctagtttttacatattaaaatcagagagctttattttaaatcatccatatgtgatataccaaaataactatagatacactatacctcatagtgacacaatattcaaaattttaatatatgctcttggtatacaaataaaacttgggaataataaattgagtgttagtttgtttaggggattataaaatgtaaggaccattttcttggcaagtgaagtgaaattgcatatcatactttgaaaattaaaatggtcccaccataaaaaacttagagattctggacggtttgttttattggctttatcaacctttgaatctctcaccaatttgttactaaagttttttctttttaaaggattcattcataaacagaaagattacgaaggattataagtcaagttgtaaaacttgaccccaatttacataatactaactttgttcattaaaatttgattggttaaacaatgaactacttgattaacttttcgatacacaaatgatattctaacaacattaacatataataataatcttcaaatagtctcaagcacactattaaggtggcatttaattaggaggaatgaagacataggaatgagaataggaatataaatgaaatttaaaatacataaaaaaaattgatatgcattggaatgatctttccttccattttaaaatgaaattgtaattccaccaaaatagtagaaaggtcaatcaattggaatgacattccaatactttaatatgcaaccaaacaaatgaatggaatagaaattgtttcctttcctttctatttcatttcattacttccaaccaaacgctacctaacttccttacaactttcctcctttgtttggattaattggatagcttcaagacaatttaatctttgtggggcttaagattggtcaagattctcgaacttttgttccaaacaaacttgatatatggatccaattacatggaatgactatcagatttacactacaaaaaatattatttttaccatgacaaaaatacacttaacgcaccagcatacttttacgagcacataattgtgccagtaaaaggtgtcaacaattcttggtcagtaaaagacctttcgccggcgtaattcatatttgtgccagcaaaaatattttttaccagcgataataagtattgataaaataaaaattaaaaattaattatgtataacaacatacataaaaattattgaagtaactattagaaaacctaaatcataaatattttccaaaatataaaaaaaaaaatattatgtaaaataatttttcttaaattaattaggtacaattagacaaacattaattggtatcacattaacatttccactaagtttaaaagtctatttttattttatttattttcgaaccacttaagtttttatagttataaatttgatattaaaaaaaaaaaagaaagagaaaagttatacctccttctttagtcacaatttaaaaacacatgagtatttttttttttaataaaaaataacttgttattataaattaaacaggaatgtcatttacaataacagagtaaaaaggtagaggtaaatcctctaaccaagagcaagtctcttccacccctaaagcgaacttagctaaattgagcaaccatattagctgagcgtttagcttggacaacattcactgttattgtagtatctgttataaaataatataatataatataaagtagatgagaagaaagaagaagaagatgaagag

SEQ ID NO: 312374 - DNA, 1868 bp, Cannabis indica
tagagtgagtgtccacacacatcaagtggtatctcaattatagtgtgtaatgtttatttcattgttttaaaatgcatattaggatgttaatgaaacgtacttgttagtaaatctagatcctggtaaaatatttccaacaataaaagtagcataacaaaccttaaatattcgactaaacttagctgattataaatctaatcagacttatttcagcatttggacctcgtcaggtcattctccactttctccattcattcttctataaatgatttccctcttcattctagtcttgcttcatttctaagaactgataatgatatatatgagtttgggcgcgtagtaacaatgaaggagataagggaatgcaagtgagaatcacagagagagaaaatagagagggagactagtaagtgaggatcccagagagagaagatagtcgacgatgggtgcgctgggaagaagatgacgaacttgatttttcccttcaaagagagggaatcgtgggtgagaggggaacaacgggggttgaatatcgctagagctaacgaggattcagcgccggtttaaagaagttgaaagcatttttgtgagtgtttataactgattgttaatcatattcaacctttctaaattgacgcaatataccaattgatttttttaatattttactttttcatgccatttttgtcagtcctgtctaattagcaatagacacaaataatgttttctttgccctttctaacttaacttttctggtttaggtcttccacaaataatgtttttttagtgtcaatttgaaacacttacataaatatatggtttactattcacgtcggtcaacgaggtgaatagtagcattgaccgacgtgaatagtataatttgtagaagggacaaaatgatcttttcccaccgtttatattgcaagattatccgaactcaccactactactcccactactattcatgaaattgaggtaattattaattatatattagcgtgtgaccccacaaaacaaccctccaaatcaagtacccagtaaaagatggaataccatcaattaaaatattcaatgatccgagcttcttcttttacttgcaattgaagataaaagaaattaattttaccacatatccattatgagtccacacacataataacaacacaacaaccgctgcaatactaatgttcacatcaaaaacaacagaaaattttgagattgcttgagaacaacacgccaatgaccgaattatacacactagaacaaccagcagaggaagaagaagaaacataaacaaaagaagataacaacaaccaatttgacatagttgactatgcgaatcttgttgctgaagaaatgctagaaaaactggaaaacaatggtaaaaaaagatcaagagattgacatcagcaacgcaaagctcataacagataaattctaccctaaagttgaaaaaggacatgcatacaaagacaaagaaacactcaagatggcactgggctactatacaattacaaacaactttcaattcaacgtatagaagttttgctctcaagaatagtatctgaagtgtgttaatgaaagttgtaatttgtctctaagatcatcaaaaaataggccaacaaatacattcataatcaagaggttctcaaacatccacacctacacaataaatgttagtatgaagaccaaagacaagcaacaacaaaattcataggagaatgcatcaaacccaagtttttaaatataaagacaaaagtaacaccactaaatataactggaaaattgaaacacaggtacggaataaagatgaactacataaaagcttggagaagtaaagagcatgttgtaaatgacttaagaggaaa

SEQ ID NO: 312375 - DNA, 1622 bp, Cannabis indica
attaaaaaaaatatatattaagagtttaacattttgaaaattaaaccagataagaatacaaattaatttaaggataaataccattttggactatgtgttttgcaaaagttactaattggatacactgttttgttaaatgacaaaatagatcttatattttccaaaatgataaaaataggacactgagctcaatttttaacaatttgattttttaagataactaaatttaagacaattttctaatacgaacagatacaaaaaatataaatcgttttatcataacattgttaaatcagattattattaaattttattttgacaaaaaatcagttcaatgtcctatttgtacaaaaaaatacatggtctattttatcatttaacaaaatagaagatccaattaataacttttgcaaaacacagaatttaaaataatatttacccttaattcaattttcactaagccactaacaaaatctttcttcaatacttaccattttatattcttgacaatttaaagtacataacctaaagtatattcaagaaagcaacggatgataaggggaaaaaaactaattaaatggccatttattcaaataattaattttttagcaagttgaattcaaatattttgactatatatattttcctttttacttgtacttagtagaagcaaataattttttgtatttgaccaaacttcttatccttgtaactcattgcggctacccatgtaattggaccaaccaataggaaacacaaaccaccttttataattgatcttttataaaatgtaacctattaatcattcttgaactttcaactattttactagattgctttcaaatagacaaagtataataaaataaaagagtaatttagggcgaaataccattacgatttaattttttacacttaattcttttatttttatttttgtagtaaaacttccttaagtttatttttttattataaatttgacataccagttaaatattaccgtaaaatatcaattaactgaatgaccactgtatacactgtgtatgtaagtaacagtaaaatctcgaagtcgatacagtagtaatccagttgatatttaacggtaatatctaactgaaaccttaaatttacaaaaaagaaaaaaaacatttaagggagttttgtcaccaaaaaacaataaagaagttaagcgtataaaaattaaaacataaaagtttcgccgcaaattcctctaaaataaataatttgtaaaaaaaaaatgaattggttgttaaatttaacgaaagagcattgctctcaatacaagaaaaacacacgtacataatgcaaaattattattttggattactttgtaaaagttattaattaaacattttattttgttaaataataatttagacctaatattttttgaaataatacaaaataatatcatgaatttaattttatcaaagtagaacctaagagcactcccacactacaaaaaacaactatatttagtgacaaccttttagacacaatataaatttattgtgactaaatgtgatttttagttcacacaaaaagttaacttgtgactaaaacataagaatttccgatacatgttgtcactaatttagttttag

SEQ ID NO: 312376 - DNA, 691 bp, Cannabis indica
  modified_base (8)..(8): a, c, t, g, unknown or other
  modified_base (10)..(10): a, c, t, g, unknown or other
tatatatntntttttatatatatttattattataatattatcattatattataatcttagcatattaaaatttataattttctgaacactagcttagcttttttctacagttttgtagtagatgtttttttttacagtatagctacaacttttttttttctacagcacagttatactaaattggctcttagtagtacagaaaaatacaacgcaacacaacacaagcttttatacaacaatcttctagtttcgataaacattagatttacactcgaattctccttaattttttacggtgaattttccttagaaaatacatagtgctcttttctttcttaagtaaaaggatcttgaaacttgaattgagtatttttcaagtgacagtgatgactcaattgtttgcatggtgcaccttcttcctcccgaagtagttcacttttaaattaataaactttcttagatatactatatattcttgaagataattttatagtaaaataaaaattttaagaggggtttcatttttatttaaaaaaaattatgggagtttaattaaaaacaatgagtgagacaagggaaaaaaatgtgccaatataatacacctagctttcataattttacatttaacgcataaaaattagggaaaaaaaaaggaatattctaaaaatggtaaaatattacaacaatactg

SEQ ID NO: 312377 - DNA, 550 bp, Cannabis indica
ttgagaccaaattggaatcttcacatctcattaataccattttcaaattgtttagacattgatcgaaagataaattgaatactgaaaagtcattcatgaacacctcggtgcacttctcaattagatcagaaaatattgccatcatacacttttggaatgttgctggagcattacacaacccaaatggcattctccaaaaatcaaaatttccatatggacatgtgaatatcgtcttttgtttggtcttctgatgcaatttctatttgatgataacctaaatacccattaagaaactagtagtactatcggtctgccaaattgtcaagcatctggtaaatgaatgggagagggaagtgatcttttctagtcactttgttgagttttcggtagtctatacaaattctctacctagttacaattcatattagaattaactctttcttttcattcttcactatcatcattcctcctttcttaggtactacttggacatgactcacccatttactatctgaaatagggtatgccaccccaacatctaaccacttta

SEQ ID NO: 312378 - DNA, 1185 bp, Cannabis indica
atattgttatgttttatgttatgcttttcttattgactctattgactcacagtgccatttctatgtgtaggtaagggcaaggctaaggctgaggagccgtgagagcgagcagatgaagactgtacatgtcgagcagttaggcctggagcgtacgatctttggaacaccagggcttaccttgtatagtcgctaggcgacaaacttttgtaaatgtttttgtgaatgggatcccagaattttataagtgtattaccttatgtttctaattaaattagtaaattttaattaatcactatttttgataacctcgttgattagcaatgagctgaacagtacgttaaaaatcacgctaacatgcctaagttagttagggtgttacagatataattttttatctttattgaaattaaatgagattataatgaaattgagttttatttaaggcataaaatcccaacaatctcaaaatgagaaagcatggggaataattctttgaggatggtctcatcctgttattgtagattctgaaggtaattctatgttaaaacctgaacttgaattgtctactaaagatgataagttatctgcttacaatagtaaagctttacatgctatttttaatggaataggtaaatgttttattaagctcatatcttcttgtgaacctgctaaagatgcttggtaaattcttcaaacccaatttgaaggaacaattgatgttaactgatcttgatttataatccttcaaactaggtttgatgatcttataatgtttgataatgaatctatatctgaattttataaaagatcatctgatattactaacaaattttttgccttaggagaaaaacttgatgaatcagtggtagtcggaaaaattgtgagagtccttcctaacatattcgatactaagttattggccatggaagatgtaaaatatttcaacaagatccaggtggagaagttgatggagttcttacgtacctttgaactaaatcagcaaatcaagtaaaaagacaaacccaaggccacaattgatagaggtaaaggtattacttttaatgttgttgaaatagaaatttcagataatgaagaagatgatgagatgaatgttttaactaaaaacttttagaaatacatgataaagataagtgacaaaaagaatttttcaaaattctctaaagg

SEQ ID NO: 312379 - DNA, 1417 bp, Cannabis indica
gagggatcagctttcgagcaagggtgccctgaggcctagtcgaggagcaggctcaatcgtaggttagagagccatggaggcagctcgtatgtgtatggatagggcttatcctactgtggatagcaagctataagagcttggtgacagtgagccagagaggctctcttctgtcaatcttcaagagttggccttggtaagttgcacatttacctttgctcactttcttatgttattgcaagttggctgaccataggggttgctgtagaaagttggtcggccatgagttatgttttggataggttgattggcattaggtgcactgtacaagggctgcaggttggccagtgttgtttctggcactaatcttgacctttttttgtttttcaggcctttatgaagctgagctttttgcgtggcaacttcaaggggtctttgagtgctcttttagagcagataaatactttggaggttgatctctaagcgaaaggcgagactttagctgatatggaggcttttggcctgtaccaaaatatgattttcggtttggaggccatgctcggtgccaggaatcaagagaacaccttgcaagttgctgacatctccaagttggagactgacctcacgaggtttgaggagaagctgagggcagcccatgatggccagcaagctataagggatgaatacgtcaacttgtcttcaaactcatatatgagttcaagctgcgtaaccccaacactgatctttcatacatggcagatgcttctttgctagaaagcacattggcctaagggagataactaatctagatcaggttggaagcgaaccagaccatcttccagctaaaaggattatccttagggaaatttgatgaagagatgttcagcccacctgctaacgaggtggtcggccagggctttgactaggtggctggctagcctatagaggctatggccgacccgcaattccgcgaaccagactctgctactttcgattctgccccacctacacctacatacatgtagtttttagcttattagtatttcaactttatggtttatcaatatagacattttatttcatgttctatatggcctacgggccttttacttttgaacactacttatttttagcctcaagactttcatgttcgtactcttggcctataggactctatttttgaacattactactatttagccctatttctttttattatggattgtgttaccgaccaggcaacctttaatccttactatcttcttattgtcgacatgtaagtatccagatttacatttctttatgccaagttgaagtatgattgcactagacttagagcaagattttatagcttatactaagcattaaaatttatctgcataagttctctgtgctacttcgatgcattgtatggtgtggg

SEQ ID NO: 312380 - DNA, 669 bp, Cannabis indica
attaagaaactaagaaaaagggaaactaagaaaaagaggaatgttgattacaattaatgacaataaataaaagatttggacatccatataattaataatatttataacatattttataaatttgtgttttttattttacaaattttatactgaaaatattattttttcacttaattaatatcattataatttgtatgcacatggccttttaactttctatttacataacaaattcacttgaaaccaaatattattaatgttagaaaacacaacacatcaatggttattgtatatcaatcattattattcatactgatctaaaaaatcattattcatttccaatccccaatttaaataatttatacatgacattgaatgttctttaaaagttgatcaaaaactaggataatcaagaaagttcaagaaaacatatatttgactaattagagtataagaaaagaaatgttgtgaaatagtgaaaaaaataccaaccgtgagttaaggttcaaaaacagagctatattcgttgattattaattagcttcttctggcttattataccaaactttttgagagacttttggaactaactagaacatgctcacctaatcttaaaacaataaaatgaacaagaaaaatccagctaatagtgttttttttttgtttttt

SEQ ID NO: 312381 - DNA, 1844 bp, Cannabis indica
aaaaaaattcctctcttcaaaacttaattttttttagagcaatatttttggagtgtaatagaacgattctgtttggtagacaaaatcatgcataaattgttttatcttatgaatatcgtggttgatagacagtcgtgtatattttgggtagagccacaaaattttaaagacactgacataattcgcgactcaaccaaaattatctatcattaaatttgtttctattttcaatattttcagtgcaacaataattatataaattgattaaaaaattatataatattatatatcaataaaaaaaatcatattgctaaaagaattcatatcctctaaatgtttgaaaaaaagaaaaaaaatcatattttcaataagatttgaactttacaattgcttctcccatattattattattattattattattattattattattattattattacaaagtctatttatttttatgttcaagttgccgggagattttgttctttaatttattaaaatagattattattgttttttaattaattatttatattttagggtttgttggagagtttgttgtgtggtttcttcacacattttttttctccataaaagacaaatacattaaattaaagaagaaatagtgcagaaaaatgaaaagtagtagtaaagagagacgttcttaattctaattcaaacaacattaataagtgcctaaacaataaacaccactctttatgattgattcacttttttttttctttttataataattatgacctaccatgaatttggtgggttttttttaagttgtgatttgttttatactatgtatatgtttatgtgcttagtgtggcttgatcgatacatatggtaggagtgataatttttggtggtttgtcgtgttcgggtcgtattaagttcttaaatttattgaaaatttgttgactcgaacacgactcacgacacaaaaaatttacaaaacacagatacgaacacaactcgaataaatttcgtgtcgtgtcgaaacttacaaaatcttgtattatgttgacgggttgtaagttaaattattatttttagtgtcatcgtatcgtgtagagttcttaaatttattttaaatgattgacacaaacacgaccagtaacactaaaaatatttataaaacatgaacatgacccacatatacttgttgtgttgtatgtatcaaacccgtgaaatctcgagtcgtgtctgtgtcagactcacatgttatgacttaaattgtcatccctaaaatatggtggtttgtttaagttaagttgtggtttcttaagaattattatttgaggtagcagtgacacattccgatccagcgttattaaaaataagttttttcttcataaatataatagtttgaaatattttttcaacattgaaataaaattcctaatttaatttaatattatcatttagtagtatggtatttgaaatgtatatatatatttttttttgttcgagtgtttttacttaactcacttggttatatattcgagaattcaaaaattttcatcagataagttttaattacatttttcttttcttaaaattactttatttgagtagaattattatatatttattaaagttttgttactagctaattcatttttatttatgtaattcctatagatattctaagatgaatactttttaaaactacaaaactttaaaattttattgtctaattctcttataatatttttgcatgcttttaagatagacgataagttttattatttagaagaaatctataaatattgtttcacatgaaataaatagtagagtatttagtcatatataaaaatatgagtta

SEQ ID NO: 312382 - DNA, 771 bp, Cannabis indica
aaactttttataattagataattttttacacatgaggcatgaccaagcctatagtgccacaaagtttcattgttgatttctgaattaaaaacagatcaagctgaagaaacaggttggtcatgaaggtagtaaagattgtcaatcctttcacccatcctaatcactcgattcttggtaatgtcctgaacaacacatttgtttgacaagaaaagaaatgagtaattagatgagtcagatagagcacaaattgagaggagattgaactgaaaattaggaacatagagcacattatgcagcaggatattatgcaatttaacagttccaacaaacaagactttgacactaacaccatttggcattccaacaaaattaattttagaatttttctaaatagaaataagaatgagggattataacaaacgtgttgtgtagcacctatgtctataatccagctatttttaggtatagaattaacattactagtaatgcttgacactgttggttgctgatggttatgctcagtttggcactgatcaatttgtgtgggaggattacttggttgggatgatgaagcctgagcttgagattgggattagaacctctgtgttaacatggctattagcctttgacattgagaagccagatcatgatcatcagaaccactttctacccaatcacttcctgcagaatagtttgctgaagatcaatttggctgatttccaagcttgttaggaatttcttttgaaaaccttccatgtaaagcccgcttag

SEQ ID NO: 312383 - DNA, 766 bp, Cannabis indica
gaaaaaaaaacaaacatgacaacaaaaataaaataaaaatagtataaagactaaagataatattctttattagtaaaaataagtaaaagaaaacctacgaaagggtagagtattttattttgtttaatttttttttttaaaaaaaaacatacataaaattcagattcaaaaaatgtaatttgagatttaaaaaaaaaaaggaaacgaaaatatatattattttcctcgtatatatataattgagatttaagaaaaagataactgtaagttgaaatattcatgtttttttatcagttaactaataataattttattttaaatttaattgaactgtaacttttttataaattcattatcgattatactcttacataacaatactgttcacggaggtgagaaaagttttcttttattatattgggtgtttggaataggttaatgtaagtaagggaattataatgttaaacattatcttatttgtttggaaggtttaatcttaaaatgccattctcctagtaatgtaaatacccttgagaaggataatgtttgatacattaaaaaaaaaaggttggattagttattcccttccattatattaatttgaataacatttttaaattaataaataaatttaaataccatgaatattatgatttattataaataaaatattaggatatatatatatttagtctgtaaaatcaatttttttataactgagttatttttatgttattagcaataacatatatatgcattatacata

SEQ ID NO: 312384 - DNA, 1792 bp, Cannabis indica
agagagagagagagatgatgtttgtgagggggtattttggggttttgaaaaaaaaagtatagttttttatagtgtaaatttttggtataataataaaattttttaattatttaagcatataaattcaaatttccctattagtattatatatttcaatgaattataaggatgattttttttgttccgtagcttatgtatacctgtcaaagaaactatggttggaatgaattaaaattgctatattgagatgtgtagttcttttgacagtgccattgtctgccatgagaatggaaaagattcaatgagaggtctaaaatcaaatatgccagctagctttcaaatactatttgacaaacttttcacctttttcttcctattagcttctttacattttatttatttatttattacaatattatagcaagtaaaataagctatatgtttagaactagttgaggctagctgaagtgttcatagaacggtgcgtgtgttggaagttttgagttagattctcaaattatatattgtaatatataaacaacttaaaataaaaaaaaaaaaaataaggataactaataaatttcagcttccaacactaaatactcttttaactaaagttatatttagtagttttctcaggaagaagctaaaatcagaattagaagtgtagcgaaacagtgttatattagatttattatttgaacttacattaatttttactggttttaataaaatataggttgatttgatagttctttgttgtgttaacctatattattagtgatcaacaattaatgagcttaacatctatgtgtgtgtaaaatctaattaactaaagtctttgatgagcatatgtgttgctaagtctcttccctaactctataaatatatattattacatcataattgtatatttttaataattagattaataaaaatgcttctaagttagagatttagagaaaaaaacttagttgatattattgtatttttaaattaaaataattattatgtatcaatcaattatatatactcacttaattattattatatacaaatttactgtatctttatttaattttttaacatgtttgtgtcattattctttcccatgatttatttttatctttttttcctcatagcaaatatggaataacatttaccctgtgacagattttgttgcacctaacaatggaaaatggaattgattttggtgcagtaaataccatacatttcattttgtcaacaataattataggcttataataatagtcatcatagtagtagatacatatagtcaaaatgaacaagaaatagcttgtcacttacctatagatgtcttaataaaaacccctttactaaaagtctcatacaaaaatggatgcaaataaatttcaaacatataaagtgtaaaacagattgttcatatttaaattttccacacacatgttctattgatcttagtctatgtacccttattgcttaattatttagctagttctcattttattttgcttataataaaatgcaaaaactattgaaagtgctatatatgtatgtgtgggtgcatataccaccaacccaacaaagctgtcatgactcatgaagacaagaactacccactaatcttatataacataatataggcaatgaattttatacatctcttttattaaaaataaaaattaatcaaaaccctctttagttgtagcaatctgttaaattaggataagttgtaggtgggtctggacattcgatcttgttgaccgaggttttcggcaaccaatataat

SEQ ID NO: 312385 - DNA, 941 bp, Cannabis indica
tttttatggagagtgtgtgtcaattgtcttcccactagatttcaattgacaactaaacatgtgcatgtatacctcttggtcgatgtgttctgttgctccagaaatagcgctccatgtcttggttcgttgcaactttgctcaagactgctggagacaaaccagtgtaccggttgtggctcctgctgccatgactttcacgagctggtttgaggaaggaatggaccaatggagtgatgctaaatgtgtggaagctgccatgattctttggtctgtgtggaagctgaggaacgatgtagtttggagctcaatttctccatcaacagatgaggttattcacattgcaaaagtaaattatatggactggtgtaatgctcaacatttcgaaattgagcctcatagtgcgcaccaaacggtttggccggagcaatggtctccttccagctttcccttcatcaaagtaaatgtcaatggagctatttttgtccacggaagggcgattcggggtggggttgatggctcgttttgaaagggaatgcttctcatcaaattcctatctatttcctcaaaaagaatatataaaatatcatcatcccaattatgctcccccaatctcattaaattacaaaccaaggcattctcaagtccaatatcatctaaaataactaataagttcacctcatcaggaagccaaggctctcaagcaccaaaatattgcaaccatcacccacataccatttgattccttatcacactaagttttgaaattctaaaatacttcttcaaacaaaactagaattggaaccaagctaatcattcaaaaagttaccatttaggaagtaacgagctttgaataatgttaggtccttttttggtaatttagttgtcaaaatattttttaattaatgtgcattttattgagcattcaatttgtttttatcaac

SEQ ID NO: 312386 - DNA, 1082 bp, Cannabis indica
tttatgccatatatatcaaaacttatctttattttcccatatttttgtaaatagccctataatttaaaagttattattacttaattttttatagcaaattaatcattattctttaatagagtatagaaatttatttttaaatagaattaagcatttgagtttaaagtcaaaaaagaataaaatttgacgttttttttttttttgtcttaataacgtaacataattgcatttgtatataatatttttatattatcaatatattgaagagagattcttgaattgaattaaaagaaatgtcaatactctttgtaagaggcatgaaaaatgaagaaatctcaatctcaatctcaactcaactactaccatccaacaaggatggaccaccaaacaaattggaataatataatttaatatataaatatattataaatagactttgtcttatcttcttttgttaattcgtgtaatgcagccttttgtccaatccaaaatataatcaatgatttattttttctctaaaataatcaatctttattttgttttcacttttcaataaaaacctgatagttaatttaatttttatgataatcaatttaattattcaaattaaataattaatttttattttattataaaaatatttatacagacccagaaattgtttaaataaaaaccaatatgtttaaacaatttatcaacaaaaagataaaaacaaacatacaataaaaaacacaagaaattatacatgatatcaacaatctttataaattactactagtctatgaagtcatgcccaaataatgaaatttatttgaataatatctagggtgcgtttggaaagccacaatgtaattagatttgtgtgtaattggaggtaattacataatttggcatgtttgtctgaccatgtaattacactgtaactgtgtaattggaagtaattgagggattccaattacactctccaattctcatagctctccatgagaattgaatataattacactgtgtaattacttaaaactttccatattaaacattagctactaaaaaatattattttcccatgtaattactaacta

SEQ ID NO: 312387 - DNA, 668 bp, Cannabis indica
acctactccccttttattgtatttaactttgagataataccaaacaaattacaggctaaaaccttgtaatttctagctaagctttcttcagtattacaataagaatgtgttttgcacgtgagaagtatgagataagagagaaaacttattacttagttcttttgagtgtatttacatcgtaccttcagattgaagttatgactctttatatagtattagggtttataggctgtacatataaatattcttagagaatatggaagttataatgtaatgttgtgtaagttatattttcataaataaattattaattaatatttcacattttttttatttttttattatttttatatcttattttatattgaaaagaattcattataagcatttgtggtggggctattttatgtatgtactactttgttcattgtaattgatcatgcacaagtcacttataataatattaattattaattgtttattgttttggcacttttgctatattatcttttctagtggattagtcgattaattgaaaattacatcttcattattatatatatatatatatatatataatatatctattctatataaagtgtgactatataactaaaattcttggtttttgagaaatttatgggtaatttttaatttttatttaataa

SEQ ID NO: 312388 - DNA, 1063 bp, Cannabis indica
agggtgttaataaaacatacttggtagtaaatctagatcctggtaaaatatttccaataaaaagctccttcttatccttgccagcatatgatgggagacctaaatatttctcatggagagaacaaataggcattccaagcacactatgaaaacgatctcgaataccttgagtagcattaggtgagaacgacataacagttttctcagtattcaaaagctgtcctaacgctcgatgataatagtcaagtactcgattaactacctggtaagagtcttattatgtagcttgacagaaaagcaagctatcatctgcaaaaagaaggtggggtatagcaggggcacccctcgcaattgataaacctttcagatggcccatggtttcttcatgtttcaataaagccgatagtccttcaaagcatataagaaacaaataaggtgataatggatctccttgacgtaagactctcttgggaataacagaacccttgaccgctccattaaggttaaaagagagagttgcagatgtaacacatttcataacaagattcacccagttcgtatggaaacccatcttgatcattacctcatataaaaattgccattcaactcgatcaaaggctttactcatatctaactttagagccgcatatcccattctgcctcttttcttgattttaagactatgaaccagttcaaaggcaaggagcacattatccatagtaagacgattagggagaaatgcactttgattatgtgaaattacatggggtaatgcctctttaaatctgactgctatgacctttgaaaccaacttgtaaagtacagtgcataaactaataggtcaaaaatcactcacaagcttgggatgatcaatctttgtgatgagagtaatgagagccgagttaatggagtctatatccttgccatcattcagaatttgtagtgtgctttgggtaacagaggccacacaatgtcccaatggtgctgaaaaaacattgcagacataccgtctaatccaggagacttatcaggagccatagaatggagtgcgttttctacctct

SEQ ID NO: 312389 - DNA, 1604 bp, Cannabis indica
ttttttgtagataacaatatgatcataagtaacaatatgtttgcaatttaataaaatttatatattcaaaatataatcataaaattaacatgtgaaccaagcaacataaaataatttataatattttattaactagtaaataagattatattgcaataggttttattcagggcataaaatcccaacaaaaacccaattgcactaacataaaactaaaagtgcatttcaactaatctaaccttcttgatgtccatatctagtgtagtatgtagtattatcttagtaataggatctgacaggttgtattcagtatcaaccttctccaccattacatcttccttagtcacaaaatccttgatatcgtgagtttccttatctatatggttactcctcttagggttcatactattgtgaaataacgctagtagttaatccatgattggaataacaccaaaagcttatagaactttccttaggctgaataattgtctagtagcctttgaggccactttaatattcagtgccattagtagagttagagacttcggacaagtttttatacttctgcaaaaattattgctctactcctagagtaatcaccatcctaaattgtagattttctagtattgatgcaagtctaaaaatctgagttagtgtagtttaaaatatttaagcaccacccttatagactaacatatatgtcctctttaatcttaagttttatttgattgccttccaatgttcttatcctaaattagtcttatatctacgcataactctcactcatcagtaggtgtttggtctaatgtataccgcaacatacatgagacttctcactattgatgcgtaaagaattctttccttggctgttatcttttttagaatagttgaaactattcttaagataaatgaactctatatatggaagtctaatgtaagttgcttgtgaaggagtaagtaaatcactaggtataccacaatccataggtttttatgatctcaaacttatgatactaggaacaggaagtttgcttatgtctatcgaataaacccattaactgagtttccttcttgtccttatatttgaatagttttggttaatccatgtgaatggttgaagcatagttctcttggcttcgagtcttagttccttattaggacaatccattttttgtttaaactaacaatgaatgctaaccactagcatcatccaagtcataacaaggtgggttcttagattccctccctctacgatggagtattttgactttctgtctaaatacttcagtcgtattgtcctcttcagttatgatgacttatgtcaatgcaacagaggctatgggaccatcttatatagtataagatgatggaacactttgggtttgaatcaaatagtatctcatctacttcgctactttgtttttagatttagtcattttcttagaaaagtagtatctgttaaagcaaatattttcttatcttaatgaccatagggtggtccactcctaatcatttcagaataactatcaggcatgcaaatcttagttagcaattctagctttttttaagttcatgatcaggacatccctaaatctagtaatggt

SEQ ID NO: 312390 - DNA, 550 bp, Cannabis indica
ataagggggtacaatatttttgtaagaaataccgtgttacaataaaaataaaaatcaaaaaagtcagtatatgatgtaaaaacctcttagaataaacagttctactcatgtaaaaaaaaaaaaaatacacccacccaattaattctgtttaaatcaaactataatattttccacattgttcaaaaaaaaaaaaaattgataggatgtatgtttttactataatgtatatatcatataagaaaaattaagttataattttttgtcaaaaaatatagatacgatcttagatcttactaatagagagctcataaatttaagggagaccaatacatattagaaaaataaaaaaaaatatttaattaatttttacatgtaatttaagaaaaataaaataaaaaattggaggggtggggcagcaaagcccaaacccagggccccgaccccaaaaattctttaacaaaaacgctttaaatttatttttttaaaaatattaaattttatatttttattattatttattaaaaaatatctaatttattttttaagatac

SEQ ID NO: 312391 - DNA, 597 bp, Cannabis indica
gtttatataggaaaactaataaaaatagtaaaaataataaaaaagaaattaaaacataaaaatattaatttttttaacaaaaaaatggtgtcttatgtaattattctttttaaataatatatttataataacaaaaaataataaaatagtatatattacataatgttttattttttttactcttaacaaataaacaaaacgtaattaaaaaaaaaaaaaaacaaaaaaatataggtaaacattaaaattaataaaaaatttagctatatttaactaaacactattaataagctaaatttttgaagtattttaatttatctattggatttctcttctcttaactataattttacatttgtagttattttacattattattgtgagtgatgtcttaagactcaataaaattcatacagtaatgatctacattagactttgggtttgtatctgattagaatttctcaaaaattttgtcaaacaacataaaaagtataaaatttacaaaataacttacactatttactgggtgatgagagtttattatattaatattcaaaaatcaatgacctaactgttgagagtcactgtgtaatccct

SEQ ID NO: 312392 - DNA, 910 bp, Cannabis indica
tacgtaaataaatgaaacatattcctccgtataaaagaatacaattttgtatgttatttattaaatgtgggaccgaatcacacgcccttaattgatataaaatatatttatatatataaacccttaattgatatttaattaagagaaacggtacaaagattgaaaaataaatatataataaccacccttatctcaagcctttcacaacaacttttacaaatttaaaatttaaatataagttagagaaaaacggtacattcacaccaaaatctactatttaaataggatatttttattatttataaaataaaattggtgatatatatatatatacatggtttgtttctacatatataattgtgattggatatgggtgtagtgaatatgggtggaggtatgtaaataattttcttggtacattttgtattaagtttaatagatacctaaatttttaataattaactttcaatgatcaggtgacaatattagcgaagattatgaactaatttatgatcagcctaattgtcctatgaccacgactgcgagcactaccaatatcatggcggccactagtcctacgaccaccaccatggaagccactagtactccaacaactccaagtaactatttaccaaacaatactagtactgcttctcaaaatttgaataaccatgcttaccatggtgcaaagggtactacttataatatcacctataatgtgtataatcacatccgtgattatgattctggttccttctataatgattatcatcacctattacaattattatctcctcaacaacagcattttccccactcacaaccaccaatatcgcagcctcaacaacagtattatccccagccacaaccaccaacgcagcctcaacaacagtattatccccagccacaa

SEQ ID NO: 312393 - DNA, 2843 bp, Cannabis indica
aaatagccatttgcaatcaactacacttttatttttaggtttaagcaccattatccaggttttatttttcttaagagagtccatctcttcattcatagcacctttccatttcctggaatttggtccattaatggcttcttcataagattgaggttcattattggccatttccaactcactcatgaaggcatatgcaatgtcctcatcccagatattaaaactgtacttaggattaggtctaggtactcttctgtctaatcccccaagtcttcttgagtcacttcatcagtaataccagtgttatcttcatcaggttccacctgaacctggttcccaggttccacctgaacctgttcttcctgactctgttcaggtgtgttccctgtttcttccacctgaatagatccagttctgtcctcagtattactacctgcatggttagtctcttttgtacctgcactagggttagatgtaataggcaaacatggaaaaacatcttccttaaatattacatccctgctattaatagttttgaaacctctttgttcccaaacccaaagtctataacctttaactccctcaggatatcctagaaaaacacatttcatagctataggttctaatttcccaacactttggtgtgcatatgctgcacaaccaaatactctaagattagataagttaggaggtttaccagaccatttttcttcaggagttttgaatccatttgcactggatggacttctgttgatcaaataaacagctgttaaagctgcttctccccaaaatccttgggataaccctgattgtaacagcaagcatctcactttgttgagaatagttctgttcattctctctgcaactccattctgttggggtgttatcctaactgtcctgtgtctctgtatgccattttctttacaataatggttaaactcctcattacaaaattctaatccattgtcagtccttagagtttttaatttttcatttgtcaaattttcaacaagtgttctccactgtgtaaatttagaaaaagcctcatttttatgttttaaaagaaatatccagacttttcttgaaaaatcatcaacaatagatagaaaatagacacagcctccatgagtacttgttttctctggtccccacagatcagagtgaacatactctaaaattttcttagtgttgtgtgtgccagtggaaaatttcagtctatgatgttttccaagaacacaacactcacaaaaatcaagtttacttaccttgtccttacctaggagtttctgttcactcattagtttcaagcccttctcacctaatatgccctagtcttctgtgccaagtcatatcatttgagtcatcactgctattgtgagcagtatagttacagggtactactggtgtgccttttaggtagtacaagcctctttctttgtgtcctttcataatagttagggtcccctactaattttcatttgtccagcttcaatcttgcttacaattccttggtcatctagaacacttagtgaaattaggttcttggctaggttaggaacatatctaacttcacttagggtcctgaccatgccatcatacatcttgaaactaatagaaccagatccttgtatgtcacaggtttgattgtttccaagtataactctaccaccattagatttcctgaaatcaaacataaaattcttattattagtcacgtggaaagtgcaacagagttaaggatccattcatctttgatggatggtccaacttggtacacttcaccactttcatatccattcgtcaagttagcatcatgcatatcaggtttattcttagagtttgagtgtttagaatctccctgtccatgtggtttgtgcctgttatttcttttcaagaagtaacagtctcttttaaaatgcccaggtttaccacaattgtaacaaccattagtttcatcagaatttctagtgttagaatttgatctgcctctttgttgtcctcctggtttacttgaatttcttccttggcttctacctctgttattccaaggctttcttggacttggtctgcccctactcaaattaacttcactatttgagtttcctcctttctctgctctcatctctaagtctttagattttagagcagagatcacctcctctagggttattgatgtccttccatacttaatagcagtcttaacttccctataggattcaggcaaagagtttaggataattatagcatggttttcatcattttccccagaatttgcaagttcaatatgctttcttaagaattcatccaaattttgatcaagagttttggatgaactcatcttaaatccaaagatcctttccttcaagaaaatattgttggttaaagatttttgttgaaactgttcttccagtttcttccaaatcttggcaggggtttcttctttgtcaatcaatctgataatggcatctgataagttgaatatcatgataccagttgctgtttccaagtattcttcttgttgaatcttggttgtcccttctggccattctatagggtcattaagtactctcagtagcttttgttgagccaataatgacttaatctttctcctccaaatcctgtaatcaccataaccatcaaatttgtcaatgtctacctttaaattgctcatggttaatgaaattagataaagataaataataagcaatttgtataaagattaattagatatatgttcccagaaatcctttattaaagattttttttttcgatcaggttgagttcttgaagttcttgtttgtgtttcttgatttcttgcttgagtgttcttccttcctgattagttt

SEQ ID NO: 312394 - DNA, 1125 bp, Cannabis indica
tttaaaatttttgaaaacaaaatagttacttttaaaaaaaataaattttttttttaattatagacccaaaccaaacccgaaccacaaaccccagagtcggagcctgacttgggcccaatcacgggccccgacctcagacgtggaccctagacttggatcacaacacggtcccttgccccaaatttggacccaacctcggtccctagactttatatcctgaccccgtaccctagacccaaaccctagattggacattgtacactaccccaaccccgtactcaacctcaaacctagaattgtatgccgaacccagacctagacccagactcaaaccccaaccccgaacctggacccgacaccaggcagagcctaaattaggtcttggcctcaaaatcgcactcggtcggggacctagactcgaaccccaacctgaatcctgaacctagacccgacctcgcgcaaaccctgaacctagcacccgctccctaccttggacactactgtcaaaccccaacccactttccctcccctgacccagacctaaactcgaaccccagacccgacctcaaactctggaccctagaccacaaaccccgaaccctagaccaagaccccaaacttagccctagacccgaactccaacctcagccctagacccaaacctcaccctcaacctcggcctcgaccaaggattcaggcacgggccctagccctagccgtggatccaagctcccaaaccaggacatggaccttggcctgcgacctgacctcaaacctcaaacttgaacccaacttcgaacttcaaacttggacttggatctcagaccctagacctcgaacacagactcgatcgtataccttagacccagacctagaccttaaatcctgacctagacccggatcagatcagattcatccaatgtaatagagatagtatttattggatatgattggatccattcaataataataataatgataataataataataattaaaaataatcataattttcacctatacatatatattttaagtataacaacataagtttgattaattatccaaaccaaataaaaatactaattagttatgttaatgttggaatttattttaccaggatct

SEQ ID NO: 312395 - DNA, 1230 bp, Cannabis indica
atttttaatttatcatacaatatatatacaatatatatgttaagtgtttgattgatctatttattctaactcattatcataactagtaaatgtacgtagctgtgcttcgcacaccgcgggattgctatcttgccctttcactttatattctttgacgaataggtaggcatacgaacgagacaattcgatcaatatcttcttagcctagttcggtttatagtgccccctgtcggtttgaattttatgtataaaataattgaagccccgaccgaaagactactcaaatacctgttttattggcatcaagggccttagcctaagcctcataaccaagagcactcgagtgggttgcttactttcaaggctaggatttccctacttcaacatgaggacgaagcgaaaaatccattccgttaggagcttcaaactccagtgtgtaatgagtctatctcttgttacacacgatcggggtaaataatcctgatcttaactcctagagcaaatgagactggttatagtaagggattgatgtataatcttcgtgtatgtaatagtgtaaatataaaatttggttcagtattttaaaaattattggtcgttctttctatttagttaaactataatttagatatagtgtttcgtaaaataaagtataatgatacactgaatttaattataatcaagtatttttaccctcacattaaaattttctcttcctaacccttaatagcgattgtgatccgatttatgatctaatgattacgctgaatcgatccaattacactgaaccaatcaaatcaaatctaattattaaaaattggacatccagttatagttaagtgagcagttgtattttaattgagttggatcgcttattggaagaaactttcaaaatctaattaaaaactggtctaatctaattatatgtaataaatattaaaatcatactatatttatttttatataataaaaaaatatttaaatttaaattttatttgttatttattaattttcgataaactttattacacataactaaagaaatccttcaaataaatcctaagaacgaattcctactactaaaattttaataaaataataaataaaaattataactaattaagcaatattagattgaataataaaaatattttatttaatcattatatatgatacaaaaaaaaaattgatttttggtaaataaaagtgaagattaatagacttatttat

SEQ ID NO: 312396 - DNA, 585 bp, Cannabis indica
tgagagtattaatttaaattttttctctttaaaagcatttcattatgagttgccttttttttttaatgaaattgagctttatattttataacttgtatgtcaataccaaagttatatttgtcactttatcaagtctttatgtggtttacatttattatatttcttacacaattattaagatttgatttaataaagatcttatgatctgataggagtagagaagttattaatatatgcagttcaaagatcttttactatgaactctagattatattcaaaacatcacagaatctttataacacatatattttgattagacatatatataatatgcatattatacaaactagtaaactaatagaacttattcttgatcatgtatatgttccaatagtaatagatgccactaaagtctctggacatagaatcactgtaccttatcttagtggaaggatttttccagtcgactattatttagataacactagtgattatttacaatgatatatgtttaagaaattttatttaaataaaactaagaaaagttaatctaaccattcacatggatagttgtaacttatcaga

SEQ ID NO: 312397 - DNA, 1524 bp, Cannabis indica
aatcacgtaatacgcctatgttagttagggtgttacatgtgatctgagtagtattatctctggtatcagtacaaccgaaagaggagtaggtcattacccgctaacttaggaagaaaaacctctataaaattttgtgttaattttattttattattcttatagtgtaacacgtggcaagcatcgacattaaatacgcctccgctgtcaattggccaaatctaaggtcaacaacttggtgctttcattgagagtgagttgccaatttatctaattgaacaccatggttaacataaggagaactccaactacaacttctgcctcatcaagtcttcctcaagaccctatgcctataaattctaatgttcgtgtcccagtcatgactggaatctacacaaacctgacgaatgtgctaaaccctgccatctcagtaggcaccacaaacctgaccaccacagctagtcatgaggacactaccaacctggttggtcttaatggataacctctgttacccaaggtgaacccttcactagcacctcatactgaaggaatggccaacatggagcaacccctgagtgccacgactggtctagtccccagtattatgcttgagatatggggctaagaattgatgagctagccattggtaagcctcatgtacacttgggagaagatctcaagttagcaagacttagagaggccattgtcaagtcatccaaactcaagaaccacacactgttggctacgatgcatttgcacaatagagatgtgaattagactgccgtaacagagaagccagcaacttaataaggtagttcaatgaacgaactaccagaagaggtcaagatctcataaaagatcctctccaagggagactagtcgaaagatcagggaaggtctacaaataaactgttcaaccaagttcctatagaactaggcaaaaccttccccaacttgaaggaggacaagtctttccatgaaaatctggtggcgagaatagctagactctggcaaccattggtctaagggggctggccagggatctctggcacaacaacacccctgattggccaacctttggctgaccaacaccttagtggttcacctctagctcgccaatacggtaaacttctatcccggagcatccaagaatgggtatcccaaatgccaatctttaaccggctagacccggttgtaggaagttattttaccaagatctagatttactaacatgtatgttgattatattctataatctaacaccctaaacatgaattcctaaaatagtgaaaaataaacacatataaagttaagaaaacattacattagtggcagcagaataatagggctccttccactctgatctctaaccattggtcctttttgtcgcagagtaataacaaaatctgagcctagatctcctttaggtgttggattcttcataatcttccacactatgattgagtacttgacttgatatgagtgggcatgatattgtatcacaatagggatgaaattttgatgaag

SEQ ID NO: 312398 - DNA, 1849 bp, Cannabis indica
aagaagtgagagcaagagcagcaacaaaatctcaaagatctaacatggaaactccatgttaacggaagctacactgactaattgtcatgtgcaggcattgcccttacaacaccttggggcaacatttgcccagagcaatcaaatttggcttcaaagccttaaacgattaggctgaataccacgccttgatagctagcctcaagcttgcgcatgaagtacgggctgactacttgcacatattcaacgattcttaattagttatgaattaagtccttggtgaatacacagctctaggtgatagaatgggggcatacttgggaaaatcaaagatttgccaagtcagcccaaaggccacacgatcaagcagatccccagagaacggaatgccacaacagatgcacttgcccgcctagcaagcggtaccatagctgacaaagctaacctggtgcccatctagttcctagaagaacccagcataattgtcctagaggaagtcgacctgttggatgacactccaacatggatgacacctatcgcagcttacctccaaaccggaaccttgctagaagacaaaaacaaggctagcaaactaagaagaaaaggtgctaggtacctgatcctagatgggacaatatacaggcaaagttcttatattcctctcctgaggtgcgtcaccaaagccgaagttgaatgacttatgatagaaatgcatgaaggcttctacggcaatcataccgggggcaaagcttgtcaaaaaaatactctgaacaggggtactttttcccaatgatgatccaagactcgatggacaatgtcaaaaaatgtgacaagtgctagagatttttgacgataccaagagctcaacctaatgagcttacgatgatgcagtctccttgacccttcacagtgtgggggataaacctaattggtcaactctaaaagggaaaaggagggctagagtttgtagtcgtcactgtaaactacttcagcaaatggacaaaagttgaacccttggcgataatcacctccaaaaatgaccttgacttcgtagtcaagaacgtcatatgcctgttgaaccttccctagaagattgtgtcagacaatgacaaagagttggataattacatgttcactgatttctgcaacagacatggcatcatcaagagcttctctaccatggcccatcctcaatcaaatgagtagctagaagctgtcaacaaaaccctcaaggacaccctgaagaagcaatttgaggaagccaagggcaattggcttgaactattcccagaggtcctatggtcgcacaggataattgagaagatggccactaggaaaactccatttgctctagcttatggctacgaggcgatgttgcctgtagagctagtgccaccgtctcataaaagaacaacctatcgccaatagacaaataataccctgctcgcagagtcccttcacaaagtagaagagagaagagaacatgccaacctaaagttccaggctttccaactaaaggcactaaggcacttcaacaaacacgtcaaaagtagaaaattcttcattggagacatggtgctctgaagagtgttcctggacactaaatactcaatagcatgagtgtttggacctaaccaggaattcccttatcaagctatagaaaaactagtaagggagtttacaagttgggaaggtacaaagagaacatggagcccattgtcctaccaagatacaggaatggagagaaccttcacaaatactagcaataaccaacttatagaaatctacttcgaagtagtggttctatctactcaacattaaaatacaaaaagtgctagcacccacgaccctt

SEQ ID NO: 312399 - DNA, 1721 bp, Cannabis indica
caaaaacttgcttggcacaaaaattcaacgcagaaagatctttatacataaacactatgatcacatttattaatgtgttatgaaatagaactggatttttagtaccggtcttcctgggtggaaaggtatctcaggtcctccagtaacttcaacagcaacaactccagccaacttaattgaacaaatattcacacacacacacacacacatgcaatcaataacaatcataatagatttgaaaaaaaattaaaattttgaaatttcggattgctaggaaaagacctgataaaaatctgcatatgaaagaataggaaacttttccttaatgggttccaatagcttgatagcaatatcaaggccattgttggcctcatgagctagctcagcagggtgccttatcgtcccaaatggtcctccagtcttcgtcttcacgtcgaaagttccagccgagtgccatctacataaccaaagaaccaattagccataaaacacgacatactaattttaaaaatatagaagagctagaaaagattcttacgcgagtcgaagaatgataggagcacatttcttctcagcgattaaacctcgaagcttcttcttgcatttctctactgccttttggtattcctcgcttactttcggatatgatttccccatttcctcgatttcttccggtttttttctctaacaaattaaattagctaacgatcagattttaccacaatcagagcgagtttggaaatggagtcaaatcacgtatatataagggaaagggaaaagaaggttctagttcgatcccgtacgatcaatgataatgttaatggccagaagaagcagactttgatatcgattggtaacgtacagagattatgatagcccaaacccaaaaaatataaaaatgaaataaaagcgggaaaaagtagtgacgtggaaatgtgatccaatcatgtgatggttgtagaagagatgtggcttctggaaaacccgcgcttattgttcaattgttcaattgattttttttttcttttttgcttggaagatcaatcaaattattgatttgatatctctaattccacctttttctttcttttctcttgggtggacaatacatgaattttctagaatgatactttgatattaggcattttaaaatgtctaacaagattttaatggcgcattgtgattgattaacaattttttatattatttaagatttaggggatctaatggtgaaattaattttggaagtcggtcgtcaagttttggagctctaatcacgttcacgagactttttttttggataagttgtagttaaaattcgtaactctcttgagaacgaaatttggaccagatatctttagaattacaatttgggtgtgacatactatttaatagagtattcaaatagcttcaaaatgcaagtcgaatcacatcgattggattaatattaagtgagtcatgactattttactgaaggttgctctgatactaacacccaggttgacagcctagcgcccaggttgacatatgacgtcaataaggacgctgggtgagtgagaaaacatgctagggatgtattttttgatgtctaactgatattctgacatcagttagtcaatttctttcttctagagaagttgttcatcagttctcgaagatgttgttgtttcgcgaaatcgagagactcaaaactactccatttgcatctagttcacttaact

SEQ ID NO: 312400 - DNA, 1030 bp, Cannabis indica
gagacaactttccatctgaatacagtgatgttgggacacagaacattcctcaacaaactttttatgtctttcaagcccttaatctttgagaaatgatgaaagtcttggggaacatgttgccagtgtcgaaagaaagagtatccaacagaaatgtattcgattgtggctgatgaaagttgcgatagtaccggagagaatgctactatcacttcttcttcagctacaacaaagaaacttgaatcaagtagcaatgaaagatcaccactgatagagagacagatataagaaagaagaatgaatcctaagcaaccttgtagtagtatgttggacaattatacctgctagtgttttggaaaagatgtgtcaatttcacctttatggattctttatattctaatttaataatggatactcctcaaggttctgagtacaccttttgggtttgtctatttgcatcaacaaactctgagctgcttgcttggctaaatggaagtttcattattttgtaaatctatgttgtattcattgtgtatgaaatgtatgtacaacattcccctataaagcattttcttttggtcatgctactaataactagtgctttaaatacgaactaggtattttgacatgacacgaaactggtacgagcacgattaggcatgaaaaaatacgggtttaggtatgacatgacactatgctataaatttacacgacacaaaaaatatattttcaagtacgatatggtatgagaagcacgaaaggtacgagacgtaagcataaataaatcagcttgaaaagttcgatacgtaaacacgaatagactactttgaaaagtatgacacatgacaagcctgaaaagtatggcacggtatattaaaaactttataatttaataataattataataataataagatttaaatgtaatattaaatattataattttataattaaattattaaaacataaaaaaattaaaattatatattaatttatttatagtacgtgataaaatttgattatttataagtaa

SEQ ID NO: 312401 - DNA, 4287 bp, Cannabis indica
accctagtgagttttggggaggcaaccaccgtatcgaccaagatctacttaaacttctatatgaggatcatccttgtctctgtgccagcccatcttcatctagtgagaacctttctaactctagctttgaagactaggaaataagtagtaagctcacaccttccccaaaacctgaggtgcaacatcacttctatcccgacaagatccaaggtcagggatacgaccgcttcatttgggaacttaagaaggagtggagacgctatcttccgtccaacaggatgtacatagtccgtccagacgtagttgacactctactcaagggccgcccaagtcctgttgctgcgggtaaacctgttgctacttttttgtgattattgctaggcacgcaaataaaactctgtccaaacgtagaatgatggcacgaaccaagcagacggtgcaaaaatcttcactgaccgagccacatattgcccgccttgccaccttgccgcgggcagaacaggctcgacctgctattgaagaggaggataatgctagggacgttgaagtccaagaggtggaggaccaaggcgaggtccatcctactactcctcctgatactgaaggagatgaggatgagggagtagctcagggggtggcatttggtggctataatgaagaaggaaagcccgtatttgaggctggcgatgttgaggccagtgaagactatgctattggggaatacaccgaggctatccctctgaggaggtaaggtgcactgagagctcaatggatttctccaccatccatgcgaccatgacaaagatgaagaatttgcttgatcgtcgttacctcgagaatgtcgaatgcttccttcccttccctgactagctgacggctaacccagagaaagcaggttgtgattttacccttactcccatacttcaaaaagatcgtggactattatcacctaagtctgacccagttcacccccaatgacctcaagtacttatccgtcctgctcttactctacgcctcacaaggatggggtgaaccatcctcgcatgataccaactggctttttgatctgaagttaagtcccaaacagaacaggtcgggatacttctatttttctcagatcgagaagaaattgttcacgggccccatggccaccgaggtgactaaaataggggtctttgtggatgagtactatttcgtcaaggaaatggacaccgcccatactagttttcagaaggtgtcgtcttactaccgccctccgttcatactggagcttaggaagagggctcaaacaattctccaacttcctcctgctacacaaaacatctctctccatgccaccggggccaattttgttaagtacaaactttttccacccaattttacaccaaaatgctgtgaagacagcaaaggagaccgtgcccagacatgagactccgagcaagaagaggaaaaagaaggctcctccaagaagccaagtacctgctgagaggtctataatgatcagggaagaaactacaggagttgctcggccatccgccccagtggcaggaaagggaaaggatgtcctggtggaggaggaataagtagattccttaaacgatgagcctccttctctgcttgtttgggagaatgctcctacctatgtgtagggtattttaactcatatttaatttttatctgtattggtttgtatcgtacttgcctttaaccctcttgttttgttcgcatgcagctatatctcaaaagatgttccaagccttgaagaagaggtcaggtgacggctccaggcaaatacctccggctaaatagtcaaaggtggatgagataccgcccaaggaaaagagcttgattgagtcacccattgatgtctccaaggaggtggcgttggaggttgagccattaaccaagaagacctccaagtctaagggtgccaagggaggaagcaaggatgggtctagtccgtccaagccttcaaatacttctatcgtgctaaaccttgagaccaagaagggcaaagagatgcttcaacattaccaggaccggatactccgtgaggtaaatgatcagctatttggaggagatgagatgtctgtggagctactaatgggcaggctcctgaaggaggcaacccgagtaagtattttgtctttggtttttatcttgtccctttatccgtgcaggttttaaccttttcccatgcagctcaatttgaagatggcctacacttactccagagccaagtccagtgccttgaaaaccataaccaccaccaataacctgtagaaggaggtggatgcagccaaaaaggaggctgaggtcacgagggcggagatgggagaggtgaacaagaaacttttggctacaaacaagagattttttcaactgtagaaggagattcaagacatgccgtctaccacctaacttaaagtggatgtcgaggctctatccggggaggtcaatggtctgaaggacgagagggaatgtctctggaatcttcttgccacattaacccaggagaagacgaacttggaagaggacgtcaaatccaggcaaaacaaggaggaagtgcttcagaaggaggtcaaaagtttggagacggccgccctggaggttttctatgaattctggaaggccaacccagaggggaactttaattacctcggtgaaaccaaggagtcgtatcttagttattgcgtggcccaaaaagataaggaaaatctcgaggtagccaaccccacagctccgaccaaccaaagtactgaggcctcgaccaccaatgaccaagctgatccttacaaagaacccgagactcctatcgtgtgaaaccttcttttctttttttttgtttagttcggtccatgggccttttttaataaaatatggtcaaccaagcagcctttaaacttggtaatacttcattttatttaaagacaactagctgaccgggcagcctttaatcccgattttatgtcatgcttttgtcatcttttaaaatgaatattttccccgttttagtaattacacatgcaaactactatgtttgttttgagctttttatttacctatgctttgtactggtatagttgcccccgaagtatcgagcagacttatgactcttggtgacttgcatttcacaagttctattttcgtctcttcggctttttggttcgagcaaaccctttgtacacattttaatggtaaattcataacttgctataaaaaactattgacataattagaatgataattaatatatttattcatttattggtcagaataattttgttactgtagtaacttacatttattgaattatgaaagcttttacataatctaactaatctttagctaatgaacataaaacaattgcatttttttaaactgtactttaaagatggccatccgacctgagtattagttattttatccaaacctttaagcaggatctgcccagaaggccatctacttaagagtaaatgttctaacattgtgtactagaagggggtcatcaaaccttgtacacttactaatagtatttcctcaaatgttccctgttccaatatcttggtactagaatgagctccatattttttgtcataccatcccagcttgtatgctccagagtctataacttcaaccacttggtatggtcattcccagttaggtttgagcacgccagcggcgctgtcttttgtgttcaggaatgctcttctaaggaccatatctcccgcaaagaattttcttgccttcacttgcttgttgaagtaccgagccacctttttctaatgagacactagctttaggtttgctgaggttcgtttttcttcaatctcgtcaagtgattttgccaagagggcatgattggtttcttgattgtaggttaatctcctgtgggacagaggttctaattccacgggcaacatggcttcataaccataggcaatagcaaatggtgtctaccctgttgttgttttctccgttgttcggtatgactacaatacttttggtagttcctccggccagttccttttagcctcttcaagctattttttcatggtgtccttgagagtcttgttgactgcctcaacctgaccatttgtttgagcgtgtgccactgcggagaaactttttatgattccatgtgtcacacagaaatctataaacatctggctatcaaactgtttgccattgtccgaaacaatcttgtgtagaagtttgagccggcatattattttttttaccacaaagtccaacacttctttagatgtgatcattgctaaaggctcg

SEQ ID NO: 312402 - DNA, 859 bp, Cannabis indica
accactagaataggaagatgttgcaaaattatcattctacttaaatttagctaactatttattgttttggattatattaaatgtataactaagcccactctaaaatttaatctctaccactgtaaatatatatatatatagaaaaagaccagaaagaaagtgatgaaccacttactgttcaaatacaaaggagaattctgtaactgaagttgagatgactaaatgaaccctaagaacttatatatttgagtacaaatatatttttgtttcattgcccacaaaataagacaatgatctccaaattaattatctttcaacaaatgacaaataagtttttagtgtttatttttattataatttaataattagtgtaaattatcaaaatttcttaaaattgttaatatttaaaataaatcaaaaaatttaaaattaaacaatataattaatcacgtaccacaaatataaattaatatttcttttttcaaactatcacctacctataaatatttacttgttagttactgctcaaattttttataaatttacttgttagttaaatttttgtaatttttttaatataaatttgatgctaattcgttgtagttcaagaatctaagcaaaataaaatatatatgcataaataataatttaatgacaaataatatttacatatgtgagaaaatttatttgcactatattagagttaacatatcgtccataatcaaattatttccaaagaaaaattaaactaaaaagggatatttataatcatttttgtaatttgacagaattattacaataataataataataatagggaaatttgattttctatacttagaaaatcaaaaaaaaattt

SEQ ID NO: 312403 - DNA, 1349 bp, Cannabis indica
cttgagccaccgttttgagcaaaatctcacgaccagcctttgataaaacacatttagtcacaacaaattgtaatttttgtgactaatacctttaatcacgaaccttttagtcacaacataagaatgctgatttataattagtcacaacttctacttttaattaatcacaaattttgttgtgattaaaagtaagattttttgtagtgttatgtaatataataatgtattttagtacataaaaaggataaatcatttatgatttgtttcgtaaaagttattgactcattcttttattttgttaattaatgataattcgagtactttgtatatatgttgcaaatggaatataaagcatgatctaattggtatctttattattatttttttatatatgatgatagttattgtagtcattacagattttttataatttttttttttaaaaaaaaaatgtatatgcttaacgaagaaaaataataaacatattattgctccttatatttatacataaaaaataaatttgtacacatagtaaactacactactatatataatattaggctttagatttgtggttgttaatatcataaattattggtcaagatctattttgttttgttaatatcatttagggtattattttagtatttattctcttcgccaaatatgactctctctctctctaaccattctcggaccatttgaactaaaaacaaaaaataaaaataataaaaaaaatacctataatttcgattattagcaaataagtgaagctataagggttctttttgccttcagtttatgtcaaaccctttcgattcgcctcgaataacttcggttgcgagtttttatcaaaaccaaagctaaatgttcaaataaaaccgaaagtaaaaggtttttttcgtagtagtgttacaatattaagagctctatcatcgatacggtaagttatttagaatttttaaaaatttaaatggaccttattttaacaaatatctccataagacgaataaaatatttagatatgtatttcgaatcggcactaaataatttaaatatgaaattaatagtaataacactccttgaaaaaaaaaaagataataattaattagattttttgctatctagaataattaatgttatccagaagaagataacactgacaatataataaaagaggaagtgaagtttaaaaaatgaagagaaatgctaaagggtaccagtggtgcttggtaccttcttatgtgttaatatcactattggtccaactaagtatcgggttccatataatttaatataatagtttttagggaatattgcgagccaatcacaacgtgacatgtcgagaa

SEQ ID NO: 312404 - DNA, 4254 bp, Cannabis indica
ctcctctctctctacctctcaatctctctctctctcaaactcaaagtatcctcttgaaactagtcaattcaacgtactcaaaaagataagtgttggtgatattaataggcttaggatgaagatcctaagttggtggctgcaattgttaagtttttaagttagttaagaaataaaaaatcttaacaaactcctcgtaatggtatctccacatcaacacaagaagaggtactttcggatgagacgtatgctacttggaagacagaccaaaccgtacgttgaagggacttcctagataggaatagcattagttgaagttgactatctgggactcccttccaagaggaaaaaactagcctactaaaacacccttctagaagaaggttaactttcctaaagacttcatacaggtggacatgataggcatccaggaatgcccttctggatggcaattatcattgcacgagactccttctaaatggacaagttagctatctgggaacatacttatgggagacaacaaactttccattattgggatagtcttatggagatcttttcatctggaggaactataccacaaattctacctagttacttcaaattaaagtattgacgatgataaagaaagaatgcagccatcatggttgatgtttcagaaatctcaatttactaacttctgagattgatcaagtccaagcaatgcttgaacttgtttactgttaagaccttagtctagaaatcagcaggattatcttctgttctgaccttctttaaattaattagtgtttctgctatcttctatctaatctagtagagtcttatgtctatgtttactcttttcatgataaaacggattcttacaaagatggatgatgactgactattcgagtacacagtaactcctcctctcagctatttcaatttgaataaaattaagccataaagcttccttgaatgcgtccgtggtagccataaattctgcttcggtggtggatagagcaatcacagactataattgggccttccagcatatacagttttgatttgtcatgaaaacgtaggaagtggttgactttttgatatctctgttcgaggtatagttagcatccgcgaacccttttaactccaattctcattttactttctcataggtcaaaccattatcccaagtacccttgaagtaccttagtaaccattttaaggccttccaattttaaatgcccagattagacatgaaccagcttagaatgcttagtgcacgagttatgttcagtctggttctcaccatcacatacattaaacatcccaaaatcattgcataaggtacttccttcatttcctctttctccttcgaacttttcgaatattattcctttgaccaaataaattgcctgcctaacaaaacaaatgtactctttgcatcttccatgttgaacttctcaataactttcttgatgtacccggactgcttcaagttgatcgtcccttccttcttgttccttgaaacttcaataccaagtatcttttgaactggtccaaactccttcatctcaaactctctcttgagcttggctttgatacttttgatcactgattggtctttggtcatgatgagcatatcatcaacatagagtgataaaaatacagttgtggattgctccagattcttgaaatataagtagtgatcatatgttaatcgtttaaacccgattttttgcatataggtatcaaatcttttgttccattatcttggggactgtttcaaaccatataaggacctattaagcttgtaaattaactcaactcctttcccttccacctgagacccagttagttctttcatgtagatctcttcatccaagaatccattcaaaaatacagttttaacatcaagttgttcaacttcaaactccatttgagctgccaatgacatcatcaattttattgtctttttctttaccataggtgagaagatttcagtgtagtttattccttcccactcgttcattctcattgattccctctttcaccttgagaatccatttgcattccatagtctttttgttctctgactttggtaacaacccacgtcttattttttcgaagtgagtccatctcctcatcatggcctggagccattttgacttgtttccacctaaaattgcctctttttagcttacgagctcttcaattttaatttgttgtattgttgctagtacaaatgctattaagtctacttccgtaaactttactggagggtgaatctctcttctagttctgtcatgcgccaactgataacattccatacttgtgtgttcgaatccttttggaactttggtcttcattatctttcagcttagcatcagcttgtgtctgcgcactgtcttccggttccataatagcctccatctatgaaccttcttctagatgtttcattctgtattccatttccatgtgtgtagtgttcttgtttcttattttttctgcatcacacggagacacactacctttcctggatgttgttatcccaatttctatcctcgtgacatggcatgcttacatggatagaatctgtgccacgtggcagtacagttcacccaaaaggaaggccaagttagcatccgagccaacgaagaccccgacactcaaacgaggatcaagtgacatccagctcgctctcgggagctggccagccatgttgggaatattttaccaggatctatatttactaacaagtatgttgatcattaacatcctaaatatgaatatctctaaaacaataaaattaaacacataagagtttaaaaaaccttacattgattgcagcagaatataatgactcatcccgctcagatctctaacccttgttcctttttgtcgcaaagtattatcaagatctgagcttggatctcttctctccttcgagtttagttaccactgtcttactcactatgattgagtacttgacttgctatgtgtgggcatgacactctatcactataggctcgagtatgaaaaacaatgaaggagcttaaaaatcactatagaaggtgtctctcatctactagttgttaaagaatgaaaactaatttggtaggttgaaaagtcaagtgggtgagatgagagcatcattttgtagtgtttcaactaggacatagggttgaattatatgaaaataaaaaaagaataaaatattgggcaaaaaatcacactagtggccggccataaagggaccaatctctagatacaattttgccactttatttcaaccacttattcttctttcaataataccatattttccaatttcaatcctataaatgccaaaactatttatttgataattataattaattatcaaataaaattgccatttatattatttattaattagaccatacaaaatttcttaattaacaaattaacctcaaaacctcttttcttcacaattaaacccttacttagtaaaaattcattaataagacttagtctgattttagaattataattgattaattaaaatcaactgactgagtttgcaagcagtattgtctcaactagtgtagggactttgggcctatataaccaagcttccaataagtagctctagaatttaccaagtaaattctctaacttattaatttcttcttgaccactatagatttggaattgcactcttaattatatagagcgctctacatgttctgcgatatagatacgctatgaaattatccatcgttctaatctcagtaatcaaagatcctctatagatgatttacatcaagtaaggataaatttatcgttccatcccttaagacatttagcttcctataaatgatattttagtaaattaatataattactgaaataagagctcttccatttatctctagtaagccaagcttgaaggaaatcatcatttcacttctatgtgcagatagaagctatagatttcgtatctatgattagcgctcccactcaattgtactatcatgttcccaagatgtatgtgtgacccgaaccgattggtaagttttaacgaacaactctaagaatataaataacactcttgagatcgaacctaaccatatcaagattaagatcttttgatctaagatcaactagtaatattgacttagaaagatacaacgataagactataatattcttaccaagatcaatatcggtcccattctaatgcatactctatacatccgatactaggatactttaccaatgtcctggaaagaacat

SEQ ID NO: 312405 - DNA, 531 bp, Cannabis indica
gctctaatggcctggtgtacaatggtgatcttaaaggataaggtgacatccatggtttgcaggctacaagttacaagtggtggtcttacaccttgtacctttgtctagtgtcaagtgattccagattacaggggtggtaggtgttgtgcaccattggttatgatttcagaccttacaggtacggtgcctccactacttgtacctccttgccatcaaaactttgaggatctgtgcttgtgcccaccttgcatgcacgcctagtccttgtaatgtaccttagtttccttcgtcgttaacacttcaaaaaatctcacttggcatggctctgttatcaataagtaaatggtgattgacgtgcatgcaaaccttggccgagtagcatgcatgcttgagcatgccgattgactttcatgcttatccatgccaagtgacttgcatgcttgagcgtgccgagtgacattcctcaagccatggccgagtgaccttccttttgttgggttttgtgccttaaataaaaactcatttcaatat

SEQ ID NO: 312406 - DNA, 1154 bp, Cannabis indica
taaaccgaccgatgtacagccctaactttaagtatactagtttgattgacacacgagagaacgtctacaaagcgatctataacatggtccactacagaaagcctccgcgaatgccacacggaggaagaaatagatgtgattagaacaaagaatgtgagtatcacagagagaagggtcacaccactaacgagtgtgattatctaaaggataagattaaaactttggtctgagcaagacatttgggacaatgggtctgagttccaatcatttactttggatagggggtcatccacgggaatgtgatcgttttgggataacaaaatgtcgtaaatcccccgcagggggtaagacgttctcaagctcttagaacatccctgcctgcactccctactccaccagtgccagatagggtagcattactcgcaccgaaacatggaaccccatatcctcccaaacttgccccacctccggtggatggataagtggccacaatctcgggtggaccccatcttgcaaaaagcacgagaaactcgcaaaaaagatacctgagagaggttgaagaagaggaagtgtgagcgttagtgcaatctcctacacaacaccccagaatgatgaatctcctacacaacatatcccgacactcaaaactaacaataaacttaaatcacaaaaacacaactgttgagtgagttcttgaactcaactcacccaaatcaaagtataccaaccaataaagcttgaaagtacaacataaacaaccttaaattaaacttaaaaacatgctctgaacttaaccaaatctacatgcctgaaatcattcaaaatccccaaaaaaactcaacctaaaactctagaaatcaccaagaacaagtgaagaacttacctcaaggcttgtacgacaccttgttgtggtattttcaacacgcaagtgtacgtatcgtaaacaagtaatagacttacaaagtgtgaggttgatcccacaagaattgtaggtaagtactttaaaattaaatctttacttctatttggttatgtcaaagttaagagaaaattaaatttagaaatactaaagaaacagtgaaattaagaagcaaataaatcaaaaaggaaattaacgatgattaaagttagggctttcaatttcaattgtatct

SEQ ID NO: 312407 - DNA, 609 bp, Cannabis indica
taagatcctggtaaaataagttccaacaggaacaccttttgagacatggttgtacatgaacaaaataagagggttaaagacaagtacgatataagccaatacagataaaaactaaatatgagttaaaataccatgcacgtaggcatgagcattctcccaaataagaagagatggaggctcatcatctgaggagtcttcttgctcctactccatcatgacagcttttccctttcctgccactagggcggttggccgagcaactctctcaggttcttccttgatcctgatagattgctcaacaagtacttggctgcttggatgagccttctatttcctcttcttgctcagagtttcatgtccgagcacgacatcttttgttgttttcacagcctttggtacaaaatcagccgaaaaaagtttatacttgacaaaattggcctcggtggtcaagaggagatgtttcgtgcagcaagagggagttgaagaatcttcagtgccctcttcatgagctccagtgtgaacggagggcggcagtaggacggcacctgctggaagctagtgtggacagttcccattcctttgacaaagtagtattcgtccacaaagccc

SEQ ID NO: 312408 - DNA, 645 bp, Cannabis indica
ataaataagttgtatattgataagaatacccttatttttattatttttaatatttaaattttttttttaaaaaaagtaataaaaagggcaaaagagatattttctaataatgtaattatcattatattggttttatgatgtaatggggattgcaatgcgtagtgtaatgaccattacaatataaagtcattacaaaggtttaaaaatcaaagcaaacaatgtaatggtaataatgattccattacaattccttttacactaaaccaaacatgccataagttcatcatctttcccttctccttctttcttcactccctcctctcttacatcttctctatttattcttaaccaaatcacactaaaaatttgcataaagtatactgttgatcacgcttttagccaatgacagtgagtcaaattaaaacaattgagaataattaaaaaacaaaaagtaaagtgaataaagtaaaggaaatactgaatttatagagattcggtcccttatggttggtattagcctacttcccgttttgttgtattgacttgtgagaaaataaataagaatgacttattctctctcgaaagctcttacaatgatctctctaagtctcaaactctaagtcttatgctctaagtctaataact

SEQ ID NO: 312409 - DNA, 943 bp, Cannabis indica
ttgaattaactacatcattttacacttaaaatgatatttattaattataatcatttaacttttttttattaattaattattttatttgtaaaataaaaaaaatgctaacatggaggtgccacgggcacctctacccagactagtataatatatataggtagttaactataatgaatagtttagttacaattatcttttattattattacactataaaaaataactactattggtgataattttttagtcataatatataaattttttgtcactaaaatataacttttagtcacaataaaaatttacttttgaccaaaacatggtatttagatacaagttgttactaatttacttttagtcataacaagtattgtgattaaaaacatatttagttataataaattgtgatttttgtaataaatacttttaattacagactttttaatcacaatataaaaataataatttataattaataactaagtttttttttttttgacgttaaattttgatgatatttataagatttttcgtattattataattattattattactgatatacaccttcattaatgttaatattgattggttaggttgatattgattagttagatggatatcactatcaaacgggcattgctagtaaagtaattaattaagctaaataagtgagatttaatttttattgggcattttgaagtatttaattaatagcatatacagtgacattttatgagcaagtgatgtaatattatttatatttattaaaatgaaatacgtaaacaactcgatattgaatcattactatgacaaatgacaatagttatcatttcatttcatgccgtatgtatgaacaggggcggacctacattgtagcgagggggggcagtcgcccccctgaaaaaaaaaatcgagaaaaaaatgtatatgtattttactt

SEQ ID NO: 312410 - DNA, 1522 bp, Cannabis indica
gttctatatttataaaatgttaattctaaacataatttattaactattttaggttttaacttttatttttatatatatggataacattatacattgttgattaaatagtaatatatattttaaataataataaaacatatatattgaaaattataaaataaaaaagtgagattttgaagatgtattttaaagaagttgatgtatgtatggtataatataaaaattcaatctaaaatgaaaaaaaaaatgtgaactttttgtaaaaatgtattttgaagaataaaaaagaaaaactattaaaagtgttcgattttattaattattgaattaatcattaattataattgtctgcagggatagccaggcttgtatccaggatttaggacgggatgattgtacaccgaaaccatcccctccgtcacccgaacaacctaaaggtccaaatccataaaaatggtggatcatttggagactctacaagagcactctccaatgactacacatatataatgactatatatcgtcattatataataaagaattatgtatagcaacactagcacaatttaagaattttagataaaaaaaaatacatacataaataactgtaataaaattcgagaatatatatacagttctttttagagcttatatttgtatgtttggtgtgattttaataaaaaaatatacgtagatgtgtttgcctcacattgtttatatgtgaataatttgtggtatttataatattacacttagtaactactagttttaattttatgatatataaagttttgataattaaataaatattatatttagtgtgatttattaaaaaaaaaccaacatatttaatttcagctagcttaaattagtttaatagactctttgtactacaatgtttgttatggcttttattactactatacaaagtacgcattgtaacatgtagtattaaaatatcgatcccatgaagactaatcttcaagtctttaaataccaatcattttcttgcagtcgaagttaataattattgaagaaacaagaaaattaagtaaaattataagaaaaataatcacaatatataatcaaaaaaatcaacaggagaaaatttaggtctttaactttcccttgttcttttataataaggctatgatatagttcatctaaatgaaaaagatctctaaaaattattttagttatgaaaagatagctgtctcccggaaaagcgctcccaggagtctaacttgtccatccgaatgaatcttgtggaaagctaaaagaccaaaagaagatgacataaagattttacttagaatagcttgtatgcataccaagctgtctgattccaaaattatttgtccccaattgtgacgatcaatccaatttaatgcttctttgatgcctaccatctcagcaacttcaggttgaaccctccctatatgacctcgattgaaagcctcccacgacattactatggcagtcgcgagctacacaaccccacccaaacctgccttcatgctca

SEQ ID NO: 312411 - DNA, 1589 bp, Cannabis indica
tatacgctcctgatcaaatgaatcgaaggctagatcatccaacagttggggatgcaaaaggttggcatttaatgcatctgaaaaaagagaataaggcatttattaatcatcatttcgtgacagcatccacaatgcttctgaggataggcatcttttcaaaatcagccatcattcgccttcccaaggaatgcgcctaagacaaagaacatgggcctcacgactccgctaatcgagcttcatactttggcaagtccttcgagatatcaccaagaacgactatcataaacactcccttcggtctcccaatgaactttatgtaagtcaaggacacagaaccaacctccaggagaaggcagcaagctctcgacactctcaagtcccgagagcttggggataaatattatacatgttctcgaataggttctacgtggaagaagtagaagggtgccacgtcagatcgcatgccgatatcatgaatcccttttcaagatatggtcacggaaggtatcaaagtgtttagaagaacgcttcccttacgaaggatgaagtaattcttgaggttctaacttgatgcttccgctatttggaggcaaacgagaagcataagcattccaggatgattaggaatgggctacgctaaggagccttaagttgtactccctggaaactccctgtgacctaattcgaaactacacccaacggtcacgcctcttctaataacaccgtgtcagatcctgttccttgcgtcagaccgtggttgtgcgcgtatgtgcctctgtagtgcttattgtccaacagcttgtttaagatattaattttacaggagaaacctttgaacggcacgtgctcattcctgacgtgatagcctacatcaattaagcaccacatgatgggagagttacctacgaaaccagcagttggatgatcatgtgttgttttacagcctttcctacgtgctgagtaagaaaccctaatagggtaaagggtatgtccttacccacttatgtgcctataaatacttccattttttatgtaaaaaggggtgaacatattttacttatagaatctctgctaaaattcgtatagagtttttttcttagagtgaaacaaaaggaatgcagagattaccattgtaaacacttgtaatactcaaaaatttgccaacgaagggtaatactactgactcatggactattatttaatattttacatttccttaagctcttcttaattagtttctaaaaatctcagtaaacacacaccgaactgagattttgtctaagatttaaatgtcaatacgtgaaaccacccgagattgaatcctagctgaacaaaccaaagtgtaaatgttgcaagaaataaagagactttagagatactaacccaaatttaccacttaaattctctttcttgttttagctgcaaacccaaagaattcttcttccttcccactgatttcatttgaaacccctaaaaacaaaatcccaagttttttctttttatgtacacgtcgttgctggaattgagatctcattcaaagagaaatatatcaaatatctagagtttctttttgtatattatatggatga

SEQ ID NO: 312412 - DNA, 581 bp, Cannabis indica
gaaattaccatatcacttaataaataaaacttcttctattttatttttataattatcatcattttttttttgagatttcatgataatttaccaaaaaattaaatactgacataaacactttgttattttatttttgcaattcatctgcttaaaagtaaatttgaaaattaccaactttaaattgattacacaaataagtatgtgtacccaaatatttatctcaagaataattcacattaatttgaataaaaatacctttttgttttattttattttcacatattatcttttcaagataataatccacgacacaatttatcattaatattttaatattacttgataacttctcggacatacaaattttagagatttttacacctgatgtcacatttcatcatttttttattttttttggcattacacggtttttcaaacttttttaccttttaaatttttcaattttagttttcaaaaagtgtcataattacaatattacctttaccatggatatgtcaccttttcttcacacgatcacccgcgccacctcatagctccatttttcttttttttgaattttt

SEQ ID NO: 312413 - DNA, 405 bp, Cannabis indica
aataatttccaacagttagttcgacagaagaaaagaaaaataataaggtataactactgaacatggagcatcaacaacttgttgattccccatctttttctggaacagttcaagtagaagtagcttcttcatcatcccgatccaaaaacatagatattatccttgaatattctgggtcactttgaactaaattctcatcttctaacactctcctagacaagatgacagttgcactctaatcatcctcttcatcttgtttgattgacatcttccaagagtcattagagaagcatgtatccatgtagactttctgacaagacattatcaagctcactttattgaggttcttagtagtgaacaagtgtaacgccctaatgctaaggcacgctacagtgctttttcaat

SEQ ID NO: 312414 - DNA, 503 bp, Cannabis indica
tttattattgattttttttttccgagtatagcataatagcattttataattaaataatagctaatagcttaaaggtgctgggttcgaatccatgaactttcctttttgcccattcctccctcaccactaagctaactttagtggctttactattattaagattaataataatacaattttaaccaaacagcaaaagattacaaaaatttaagcaatacgggcgaagcacaatttagttccgtaattattcatgtgacaaaagttatctctcctcctcttctccatcaaaaataaaataaaaaaaaattatatacatagatttgtttattccatcactctctaaatttatatacacataatttatacatataaattttgtgtatgtaaaaataattggttaaagttagttaaagtcacatacctaagtgaattttgtgtgtgaattatggggtaggataaattgcaatataaatacttaatgttttagattttatacacttaaa

SEQ ID NO: 312415 - DNA, 1274 bp, Cannabis indica
aagtatagcatgcacctgacttagacacaggtttagtagcttattctaagcattaaaatttctttgcataagttctttgtgatagtttgatgcattgtacagtgtgggtgcccccaaatgaacatgcagacttacaatctcttggtcacttgtaattcaccaagtttcatagaccttgcacgggacttttcttggggtgctacctgttttctccatgtggaactaaaacagaataactttgagaagttaatcttattagcaagtggtttagacataataatttgaacataaacattgttatttattcattaattggtctttgttgttgtacaacttacataaattgaatctaaaagcttacataacacagttttgcttctagatatcaagtggctacccctacttgacttgcacagcagaagccatcattgaagaacggtgggagtccacaccataaaaatcatgggtactagctcttttgtattctaatattaagtaggtagaactgctactttggaatagtgttctgtaagctggaaactgatagtatttgcaaaggtgctctctattccaatatcttggtaggagaatgagttccaagttcttgttataccttccctgcttgtaggctcccttactagttatatatgtaacttgataggggccttcccagttgggtctgaacactgctgttgtgggatctttgttattcaggaacactcttcgaagcacctggtctcttatgaagaattttctatccttgacttgcttgttgaagtgccttgctacctttttctagtaggcttgcagctttaggctgacttaatctcttcttccttctacttcgtcaagggattctaccagtaggatgctatttgaatctttgtcataggttgttctcatatgagatggtgccaccaactctacaagcaatatcgcctcatagccataagttagagcaaatggagtttacctagtggccgtcttctccgtagtcctgtgtgaccataagacctttgggagcaattcaggctagttgccttttgcttcctcaaggcgcttcttcaggttgcccttgaggattttatttatagcttctacctacccattttcttgaggacaggccacgacagagaagcttttgatgatgccatttctgttacaaaaatcaatgaacttgtcactatcaaactattttccattatttgatgcaatctcttctggggaagtctgaatcgacatatgatgttcttgacgacaaagtcaagggcttt

SEQ ID NO: 312416 - DNA, 704 bp, Cannabis indica
aacttttgccaaaagcccttcaaacaagtccaaaacttccttaactgccgcgcgagcacactcggcctcttcattgaaataaacagtctctttggattccatagccatttcaatctcatcccttgcttctgcaaacttgagatttatcaagtccacctctttgttctggtccaactcaccaccacccgacccaccactgtaatttctcagattctgacgagttgagagctgggtcgagccgtttgagagagtggaatggaggaaacggtggatgtttgagattaaagaggtgggtgtacggccgggcttcgatgggtctgtggcgcgttgtggtgagtcggttgtgaacgagttgatggaaaatgaagaagtgggttttgatatttggttaagagggtgttcgaaaatccatttacggactgaaatctgtgaaatcctatgcattttcgtagccatcttttttttttctcagaccaatttacagagaacaaaacaggaagaagaagaagaagaaggttagcttatgctattctttttctgggcttttaatatggcccaaattgagcttggacttcttttttgggaattttacaaaaatggggagattatttcacaaatacacaataacaaaaaaaaaatttacaaaaatacgatttcacgtaattctaaatatttttacgattttcttgattttatttacataa

SEQ ID NO: 312417 - DNA, 617 bp, Cannabis indica
atatttaagtgtctagaataaaatgaatttaaatattaattttcttatataattaaatatatatatatgttatacccaaattcacttgcacatcagaaagcgacactagtcaatctcagagaatatgaaccaacagatttaatgataattttgtcactaaatacaaaataaaataactcattaaatatataataactagagtatgtccgtaacttgctgacttaatattattaagcgagagagggatatacaaactttcaattcatatattgacgagaaaccatcttgtctcgcaaggtataatcccaagggacctataaacgacgcatagcgaggcatctacctcactgtacgtaaagaagtactgacaaggtgaatttattggaacacttatcatataacccacattataacaactaagtataataacttgaaagacatgattgtccagtctgcaaggccttatggtcaaagagcagttcttaaatttgctcagtgcactggtgctcatgccattgctggaatataagtaaactaagttattcatctatgaacaaggaaagatacctctagcgagatacctttggaagggagttaccattcctgttagcgttgac

SEQ ID NO: 312418 - DNA, 1355 bp, Cannabis indica
attgttcttggttgggttattatatttttgttatttttgttttcctggttctctcattgtaatcagaagacttgttgaatcctgggagattacttagtaaatccttaaggacagtgtcttgtttgcacgcatcagatgttatcagtttattattgctattgatacttttctaacaatcttaaggatttatggatcccaatgctactactgctactactgttgataataccttaggttctcttcccattggtggtactctctctgtcaccacaaccattaatggagataatcttctagtattggagcaatcaatcattctgttctttcttcatctactgctgctgttccattcaccaagccattccctgacttctctaaatagaaaggtttgatggtcagtttgtcaaaagatggcaagaaagagtcttatcactccgtggtataaatgttgttgcttgggcgctttctgaaaagaaaacaaaacaccaacgctaatgcttggactcatgccaataaggtatgtcgacacaattttgagtactctttctaatgatttgtttgatgtatactgctcttacaaggaagcgaaggagatatgaaactctatgattgtaaagtacactgttgaagatgctggaaaataaaagttcgtggttggcgatcttgatcgttggaggatggaggataacaaagacatcaaggttcagattaatgagtatcacaaactaaataaagatcttaaggcagagagcatcatcctaccagaattttttttgactaaaccattagttgaaaggcttcctgaatcgtggaaagaataagagtcacctaaagcataagcataagcagatgtcccttgcagatctgattacttacatcattattgaagatactaactacaaggaactccaagctaccaaagcgagagaaatggcagcaaaggcgaattcggtataaactcaaaataaaaataaaaggtatgccaacaaatcatgtcaccactacctaaagctaatgtcaccactacctttaagaaaaagggagttgttttgtctgtggaaagtcaggtcatcatgcaccttagtgtagaaaaagagtgagaaatgataattttcctaaaccaaatgcaaatttggtagaaggagatgatattattgttgcagtcttttctgaaagttatcttgtagccaatgtgaaagaatgggtggtagactctggcaataccagacatatttgtgctaacaaagatgtattttcctctaggggatggaaaagaacatgtgtatcttggtggttctcgaactgctcaagttcttggtaaaggaaaagttattcttaaactcacatttggcaag

SEQ ID NO: 312419 - DNA, 2513 bp, Cannabis indica
ccttgccacaagaaaattttccattctcgatatgttttttatgagcaaattttttccactcaaaggatctctcaaccacaacaatcggatgctttacttcctatcaaaccatccaattctccaacaatgacccctgttgacaaatataaaccagcaattgtgggttttgatactcaaaaaccaaccaaaactcctactgatattcaaaaaccagcagctgtccctgttgttattcaaaaaccagcaacagcccctgctgatattctcacaccagcaatggctcctgatgatattactcacacatcaacaccagcccacactataataaaacctcctaaggtcagtttgccaattcatactacaaaagcaggtcgccaaacatccactccttgtcatcttaaggactatatttgtcaaacttctactgcccatcatttggttaagtatctcaattatgacaaactaagcattccctttcgaaatgccatcctacatgcttatattgaaatcgaaccaaccactttcaaataggcatcaaaatttgttcaatggttaaaagccatggacacagaattctttgcactcaagaaaaacaatacttggactgttgtatcattaccacctggttatcaaccaattggcaacaaatgggtctataaaattcagtacaattctcaaggtgaagttaagaggtacaaggcatgccttgttgccaaaggttactcacaaactcatggcatagattatgctgaaacttttgctccagctgctaaattcaatacgctaaaactcttcttagcactggttgcactcaacaattggcccttacaccaaatggacattgataatgcctttttggatggtgatcttgatgaacaagtctacatgacactccctaaaggctatgtccatgaagggggagctcccccccaaccctgtgtgcctattacataagagcctttatggccttaaaaaagcctctcgtcaatggtttgctaaactatgcacaactttaattaaccatggcttcaaacaatctgcctttgatcactatttattcatcaaaaaatcctcaacaagcttccttgccttacttgtatatgttgatgacatagttattgcaagtactaatgactctgatgttgctgcctttaaaatctttctcaattccacgttcaaatgaaaatacctttgtcctctaagattttttctaggcctcgagatagcacgatcaaaagctggtatctttgtctcacaaagacccttgaccatacaactgcttacttaaaacaggtcttcttggatccaaggccgtgtccacacctatgatgcaaatacatctctcagcaaagatgttggccctctagtgaatggtgctacttcttatcgcagcctcattggaaagcttctttttctcacaatcactcgaccagacatcgcttatactgttaatcgactagtcagtatgttagtgctcctcgacaacttcatctcaaagctgcacatcgtattgtacaatacctcaaaggcacccctggccaaggactcattttccactccaacaactcttcatcacttccagcagatcgactattccaactccaagcttttgctgatgctgactggggttcctgccttggcacgagacattccataacaggcttttgcatcttcttaggccagtcactcatctcttggaaatcaaagaaacagtccaccgtttcaaagtcctctgcagaggctaccggtccattgccaacaccacctgtgaaatactttggctccacaacatcttatctgatttaggcatctcccaaactcaaccaatagttctttattgtgacaatcaagctccatcaacatatctgaaaatgttatcttccatgaacgtacaaaacatgttgacattgactgccacatttgttcgtgaacaagtcaacaaaaatcgaatcaaactatcttacgttccttcttgacacaacactcaaatattatgacaagggctcttttacccaatcagtttcacacattgttgtccaagatgagtgtcactaatctatacactccatcttgagggggagtcttagacacagctgatttgttagactgttagttttgtttgtttctcttgtcagttacagttagtttactaactgattatgttattcttctatttagtcttgtaatacacgagtgtgtatataaacctctcttatttcattaataaagatcgaaactgtttttactaatactatgtgatttatgtacaccattcgcataaaatttatgtataatgaatatagagcggacacgattttgtcctgttaatgtatttaagggtatttattccgttaatgcaccctgaccgttagatggattagttatttaatctgagggctggggttaatataggggtatttaggatgaaatatattggtaaccggttcactttttgtaataaaaattaatacattttaaaatgtaaaaactgacatgaccaccatcagtcatat

SEQ ID NO: 312420 - DNA, 1198 bp, Cannabis indica
ggcccaaatccctcttacgacccaaatcgaaattacaatccttcaaaactaaatcagtaaatataacccactcattcaaaatacattaggtttgggctaaaacacaatgcccaaacgagcctagtagctacaacaccaattaaatacataggataggaatgagtttataactgatccataagaattgatccttcctcttgaaaaaggggaagaccacttcccatgttcattcttcagaatagataaatttgaccattagaggttctataaaaggagaacccaagagtcttgaaggatcacctcattttcactcagtgaactcttactcaagcattcatgcaatacattactattgttattatcagtccttctccatcaatctacgagataaatatttattttctattttcttattttacattttattattcttcattcgaattatttactaacttgattgtcagagtcccttcagatggcaccatctcagtgtcccaaggttggcagtgcctgcgatccttccattttgatcattgtagaatttttcctctatattttggcgcccatcatgggggcatgacaaactgaatcaggagcaagagacacgtatcctataccatggaaaatttggaagaaggagagatcaacgtttaagcctagatatctactcttatgtctcaaatgagtgaaaccaatgaaagcctcataacgttataagaagagaataaagcattccaggaagagaatgctctgatgaaatcaaaggtggagatactggagtccgttcaacctagtacaatggagtctcagtcaaggtttcgtgttctaattccatccatgcaaccccttgatatctgctctgacttcaaccttaggccaacgtccactggtcacagagacgctgccaaaccaaacaacacactagaagtcaactacaacgactacttgagtagatggatcggtaccagggggatctactcaaacacatggaccctctttggtaggtgatgaaactatgactgacgcccagatcacatcagttcttgacgcccagatctcaagaaggaaaactcaggacctctgccccaatccctccaagtattttgatatttaattttcctattgttccattttcaagtcaatgttgggttttattccctaaataaaactccatttcaatgtaatctattttattcaa

SEQ ID NO: 312421 - DNA, 1652 bp, Cannabis indica
tttttatttatttagtcctaatgggtataatttcttcttactttctcaaaagattaaacatttatgtttaaaatcgaacatgttttttaactaattaaatatttatgtttttttaatacatttataacaaacaaattgataattctaacaaaaaaaaaatacttatttcaacaattagaagattcccaaaatgagttcataaattttagctataatatattaaataaaaaaaatcaaattaaaatatcaaaacatattaatatattataaaacgtagtattgacattgaatgaaattaatattttgtgttttagtgtaaatcttatcaaaaaattgttctattttattagaaaaaatataaagttgcattaaaagaaattcaagtcctcatcctatataaaacgatgtaaacaaatactaaacagattatatttaactctatggaccaacactcactccctatacacctgtatacaaacataatattttgaatctaagaaacaatacttacccttgcaaaaaaaaaaaaaaaatacacaatgcttacatttgcttagaaaatgctaattagtgataaacagaatactaatgaagtagagtagttttgcaagaaataatgcttgcccatctcaactttttatcatttgcattagaaagctcctaacctgatgtttctgcaaccattttagttgaccttcagcttctatatcaaaagaaattccagattaagcactttcagattctgatgtctggccttctgcattcaattttgaaaaaaaaaatattacaaaatcatcatcatccttctttcacaattttcctttttcaatcatgttaatattccaacaaatccaataaacttttggataataaagtatttctaaaaccacaagctacttgacaattcctctccttgaaaccttagctcattgttaggatcgactaaatatgggattggttagttagtggtatataagtacttaggcacccttctctaggcttatcttttgggagtgatttctaccaagttgttttagacaaatggtatctgtcaattgatttatttctttcttcctttcttgtcatgatacttgcctacttgaaaggagaaccaaagaaccaacagttgttctttgaagaaacattaattgattttttttcatctatcaacactatggccaataaatattgtaatggattatgatacaatgcatcaaaacctactatgtattctaaaatataaaagctaaacgcttaaatgaacacatgattaaagaccataactttcatcttcttcaagattttgagttcctagaagaagaaatgaaagctgaggaagagagtacataatacaggtgctactgcatatatccaaacgcaaccttttaggacatagagatgaaattcctcatttctcacactgaaaaaaaaatatatttatgaaaagaactagctaccacaagttaagcggttacacacactagcatcgatgtttcaagaagaacagaacaacgggtcatcaaggaggaagagttgtaaggtgaaaataaggttaatataagagtaatttgcggcataaatacttaagtttaacttttagttgcaaataaatacttaagtttaatttttggcagtaataatacttaagttat

SEQ ID NO: 312422 - DNA, 2529 bp, Cannabis indica
aaatttgctactaaaatatttggtaggaaactcatatagtatttttttattagaacttgctacaaaattattttgctacgaaaatttagtaactaatattaattaactgctaccaactacatttggtagctaaacttttgttgctaaaaagttggtttcttgtagtgtaaggtgtcctccatgcattggacgagacaaataattttgtttaaaaagaaaaggaaattgagggaatataaaataacttatttatgtcaacatcattgctattgaaaatcaaatattataaatcccatttgtcaactctcgaggctctatatatatatatatatgtatagatcaggtgatatattatgtgaataagagaaatatatatgagggtgataataagaatttcagtatggatcaatttcttcgttcttgcatgaagagaatagagagtgaacatgagccaaaaatgacttgccgactgccttttaaagtcgataacatcaaatttcaacgatttgaggatatcaatcggtgagcatttattggctccgtttggctctctatattctcatgccagagtcatagagaaagttactcatcaccatacacatatatttcaagagaatcaaaactcatggtatgattaatttactcgtgatcatttagtcagtgtcctattctgttttggttgttagctttgcctgagctgtaattgtgattcagttgatccttttcttgattgtgttagtctttagctttgtgtataaatacttctattgcattcattattcagagtaatgagaattacaagaaacagtacttctctgcaattcctctttactcttaatctttttctttaataaacttggtatcaaagttctaccagctcaattgtgatgactaccagtatgtttcttcctccgttgaggtcaggtcggagaaactattttgtttttggcaatctcaagtgcttccggccatatgtggccatatatatacatgcatgtgtgggtaaataatacttttttaccacatcaacgttcccagaaattttatattcaaaagaaaaagatggagggaaaatataccactaaatacttaaatcttacccgcacatgaattatgcacacatattttatccatatgtatatgtaaatgtcaaaatgttcttatacatgttatatgtgggtaactatgtgcgggtgataccccaatctcttgttgtgtgatcatgagctccatgaacttttggttcctctaacaggtatgtatataatttggccttttctcagtggacaagtcttcatcaatgtaaagaccgcatatggttaatgctttaaattattaaataattaaggtttatgtatgaaattaattaataattattaaaggtatattttggaaataaatttaatatcatttatgttattttatgttaattacctaaattctgtgttgtgttcggaagctgtggaaagcaacgttgggcttttagagagtcgcgtttatgtttagaatattttatcgggatgttatcgttgggttttagaggtgttgtaattggtcgggacttgtgtatgcctaaactacccttgggtgacttgaatgtttgatataaagttgagggcaaaaaggtcttttggataagactatatttgtcttatttgaatttgtctatagctgattgtgagggattagttttttaaaaaaaaaagaagaagaaaagaaattcatttttgtttgctttgcttaaaagagaaggtatctctccctttctctctttgtcgtgcaccccaaagaaccagcaagaaggagtttttgctgctggaattagagtttgtaaacctgaaaaagaagattcaacctaaggtaaagattcctagctatccttttctttattctagtaagcataagttaggtttaagcttaagttttgggatttttggtgctgtatgtataattgttactttaattataattctggagcttattggtgatagtttagattgttttaaattgtctttgtggattatatcaaggttttggcaaggattgagtttgaaaactcaaacctagctctctaatggtggattgagattttgttggatttgttgagttctgttagttgggtttggtttagtgtagtgtatgcaggtattctggaggttattacaaagtttgggattgaattgtgatgtggggatcggttttgaggtttccagctatgaaccggtcgaccggttctaggaagcctctagcaaccggtcgaccggttggtacccaggatttggggttccggttgggaaccggtctgccggttggggctttttctcgagccctagtttttcctgttttagtgtaatttagggtgttggcatcctatttattgatagggttaagcttagtttgtattttaaatccccggtaagtgtttaagcgtgtctttcattgaattttgaacattatggtttagggccctgtaaaacgttgagctgtgtttccactcaggctgaccggcacacttgagcacggaacgag

SEQ ID NO: 312423 - DNA, 1181 bp, Cannabis indica
taatgtaagcccaaataaaagtctaacagtttcatgatgaattaagttaacagcctattgaatttctaacctgtttcactttttcctatagttacgtgacaccacagaacgagatggatttatgttatgcaaatgtagggtactagaaggtggaaagcttcaattgtacaaggcaggttgaagaaatttaaattcagtcaagttttggggcttgtgccttctagagtacattattttgtttttctttagtgaggctaacattgaaagttttttttccccttctagattcgacctggggactcgttttgtgtgctgaagcaaatatcttgccttgaaaagaatttagatatggaactggaagtaatcttcaaagaaactgttactgatattattgtaagttccctgtttaagtgacctatatatatacttgaaaatgtatagaattcaaagtatgaaatctggcttttcacactagaatgatgttgattactgctaaattattcgtactattacaggaggatgtgatgcaaatgattggaaatttaattgattctgctatagtagatagcaatgttcagggtggtctgagatggcccttggggaagactgtttttggcaataaattttgtgttgattcagtcgtccacataacacgtaaaatatacaaaaattcatcattgaagctgaagatcagtgattttgatctgtataattttgagtcttcaaaagggggacaaactaaaagggaggttgttatgtctttgaaaggattatcttcagaattactggtatataaattctattttgtggtttattatttaaccttgtagattatatatgtagaaataatgttattattttatgactcaatttttttcttatttttctttgctaacttattcactaatttgataattctgtgatattcagaaacaagaggtccatctcaatgttattatggaggtactgaaggaggagttgaaagttctatggaactactttctctaaagtggagactttgcaacattatattgattggggtaatcaatataatgttattacggagactttgcatatcttattctacacttctacttttatttacattatattaaatcgatgtatgcatttatctttattagcattataaaacaaactaggcagcggtctttttaataatt

SEQ ID NO: 312424 - DNA, 1035 bp, Cannabis indica
gtcacaatataattataagaaaatgagaaaatttagtaatttaaagactaaagggatccaaatattattggccccatattgaccaagccctaactgagagacgcagagtttcagtggtttgttctttcttcttttccatcgcattccggaaaccactacacagttctggaattatcttcttccaatctataaattcactttgatgatccacagcttatatctttttattaatattaatatctgatatctgagttcatcgttaattagctgaagacaagcaaattctagggttataagaaagttcttctgcgtgtagataatggctaaagacggacccaactgggatggtttgctcaagtggagcattgctaattctgacgggactcagcccactcgtaatctgaggtactgcttcatttctttactattgattttgacatgagctgattttgcttatatatgatttttggggtattgtgtgcagtgaggaggatcgaagatggtttatggaagctatgcaagcacagagtgttgatgtagtaaagcgtatgaaagaaattactttggttatgcaaacccctgaacaggttttggaagcacagggtgtcactgctgctgatattgaaggttttcattcttccttcatgtttatgattatacatgtactcaatatttttcctttcaatgtcgcatactcacttctgaattgggttatggcaggaatgctggatgagttacaagaacatgttgaatctattgatatggccaatggtaaagtttcatatctggctcttttctcttttctgtttcgactattctacttggttgtgaatgccccttgtgttctcccttgccccatttgtttgcttatcatttgctcttagatgaagttattgtagacataggagtgggagtgggagtgggagtgggagtgggagtgggagtgggagtgggagtgggagtgggaataggaatggaatggaatagaataaaatttaaaatgcataaaaaaaattgataaaaaattattaaatt

SEQ ID NO: 312425 - DNA, 672 bp, Cannabis indica
ataaaccattttatttttaataataaaccattttatttttaatataaataaaaaatcacccatgaatttctcgtaaactaagaattctggtatataggcacactttatatagaatagatacttaacctttattatattcatacacctatcttgaaaaatcaaataaattattataaatctaataaatgtgtaataaatatttaaacaaattaagatttagcaaaaaaaagaaaagcttatttatatttagaaatacatattttaaaaaatagaaaaattattaaaaatccaataaaaatataaaattgtttaataaaaattaataaattaaactaaaaaatattatattttcttaaataaatttaaatttaatgtatcgatcggtgcacctcttaagcaaaggttgtattataaaattttcataaaaaataaatttaacttaatattttttatttatttatttatttattttttttttatattggatgtcaaaacaaatagataaatgaagtatgagtgcattatttgtaatggggaaatttgaaattttatgcttaaaatactatttaattttttccctaaatgcatagttattaaaattggtcttatatgacaactttcctaattttcctaaactacccctcacatttcaaacaatcatcctctctcttc

SEQ ID NO: 312426 - DNA, 600 bp, Cannabis indica
taagcatgccacatcatgaggacaaatatttaacatttcccctaagtccttgtgcggacatctgtacggttagggattttacgagctatgttaatgcagtctggactgttctagcaattactgaataaaatttgatgctcttttagcctttttaaaacattttgtcttgatagtctaatctcattgtagtagaaaaataaccactttagttgcctttatgatatggaggtgaggtaagtgaagaaacagggctcacacgtattacataagtgacttttagggggaaaacctttttaacttttgacttttaacttttcactttctctcactagaaacttgctttaggaaaagctcttccttctctctaggtggctgaacccacaagcatcattcttcttgggcatttcaacgatccaagcatcccaccttcttctctaacaaaatcgtatagtgggtaagctctctattccaactatttcacttaatttcattgatttttccatggatggatgaaaattatttcttgtttttaacatgctttgattcttacattagattattgtccttttggtattttgatccgcatgatagccttaggat

SEQ ID NO: 312427 - DNA, 3598 bp, Cannabis indica
tacaagaagcgttggatcaaatcaacgagctccggatgagtctcaagtacgaatggcagcttaccaaaaaatggtggctaaatacttcaacgtcgaggtcaaagatagaaaattcaccattggcgaactagtcctaagaagaatcttcccaaccactcaagaatccgaagtgggggtacttgggccaaattgggaaggaccatacgaaattgaggatgaaatcggctccgggacctacaagctataaagaatggacggaaccacagtgcttagggcctggaacgttgaccacctctgaaagtgctatcaatatttaaagacaatgtttatattctgtaaaagaacctgtgccgaacaaatgtatgcaacctcttatgtaattttttaagactaagtgacctaaaagtttctttttatgtcacttaggggggtattaaggcatattataaaggcaaatataaacaggacaaatataaacaggataaacataagaaaactgaaaggttaaattgattcaaagacataaattgttcaaagagtaagaaaatcctaaaaagaaaaggcctggggacgggccataaaaagtctccccttaaaagaaagcagcattgtcttataagtaaggggaaggacaggataaaaaaaaatgagaaatatacataaacaagctaatcacttagtcagcccgaggaggaagacagggacccctgcgctcttccagcactgcgtcaagcctcttctttttctcccggaagcggaccagaacctcttcaggtttgggataaaaaggaagatgaaggttgtagtcgtttgctatccaacacatgaaaaacccatcgtcaaagctcttctgacagtgttgacaggtgactggggccgggagagcatccctttttgccttagccgcttctttacgagcctgctctttgaactcgcggagctccttcacttcaacagtcaagttagttgttgtcttcaaatccgtctagtgcagctcctccaaagatttcaggttggcagtcagttcttgaacttcttccttggaatctcgaagatccctcctcctcgcagcaacgacctcatccttggccttcagtgcctcttggtggttctgctccataagagactccttctgggcttcctcacggattgcctttttcttctcctctgactcccagagacttttcattacctcctccataccctcgaattcagacatggtgtatccgtgatcaattaatgtctttgagagacgaccggcctctgctgcaatctggcaaccaacaaaaaatatatgatattagaaccttgtatcaaaaaggaaagaggcttgagaaatctaaaagataagaactcactgcagtgagggtcgcgcttatgtcttggatttgatacacggggttggtagaggcacaggccgcatatgtcttcattgggagttgggtcaggctagcaaaaaaatggcccattttctctgaagcgaagggagccaagctaggtccacaaagagtttgaaccagttggtcaagggatccaaattcaaatcccatatgttcctggcgtattcactttgaacagatccatcctgggcgtcctttagtattttcttcagggcctccacctctgcattcccctgggtgtactcccccaaggcgtagttgtgtttggaaattcggagctgggtcctttcctcatcaagatgaatgggagttaagataatgccgggaggcacagtatactcgtccacttcggacggaatccccgaattagcactgggagcaggagtatttgcttgcctcggttttttaacagcttccgtctctaccatcttgcctttacgtttgcagtctagggtagggatgatcttaccttcttcctcttcctcatcaatcaggacgacctagtcctcgggaatgccagcaaaagatctcccgggagtcaccactatgtcgcgtgactcgggcaggccggatttaggactgtaggttcgggcgagtacatgtaggaggtcctccattggcttcgctgctcaaagaaataaataaagatgtcagaacatcgccaaaaaatcatgcatgcaagaataatataatgagactaatcctaccctagcgatctaattctgccctaccaaaggtatatactaaaaggctggtgtcgtcgtcccctagaaagttgtccgaggggaggaaccaactggaagatagataggcggagtgatccaagaagatgggtacgggaggaccggaacccatccgggaccggcctaggaaatgactaaggttggaaaaataaaaactcttggcgttatcaccccaacgtgaatggggcatttaaaatttatacaaccattcatcaaattccatcggcctacaagcagagtaatcctgaacagaaggaacgtgatgaacaatcagtggagacttactagtaccagaagtactggcatcaggagccccagcgttaggaaccgtgaaagggaatttaggtcgagaggtcgcctgttccttccctgtttctactcgaaggatcctctttgaagcagcttgggcattgatgtagactaactcttgttccctccttaagagatatttcttgtatttatcttccgcgaaagcaatgatatcgtcccagagcgccttctcggtctcagggttgcggatgttggggcagaggactttggataagttgaagtcatctactgactggccctccgaaatcaacttagccctcctgtaattagcggtcgtgaccaagtcccctacgttcaacccatccttatcgtaattggcaaagacttttgcatgttgaaggaagagttgagtaggggcggtacagtgcataggaggggccctaacccactcagtgagcagctccgaacgctcaacgactttgaagcttgaggagaagatgaatcggttgtggtactccttcacattcttctgaaagttgtaaggcaccggaccctcattggcagaatgggcctggagcgtgaagaatccgtctttaagtttgtcccctttcttagggacagataaaagttcataaaaatatagaatctcagccggactgggcggggcccagttcctggcaacataaaaaatgtacaggcctcaaagcatgtgataagcttggggaattagttggtacaaaaattaaaaaatctatgaaataatcttggagcgatagcatggccccggacataaggtgggtttgactccaggccccaaagccgtcatagttacggttgggcgtctcttcctctctggtaggtagtgaaaaacttcagtcgcagaaggcttgatcccgacaatcataactatcttctccagttggtgagcacaggtcaaggttgagtgtaactcatccgcctcccaaccagtggacaggcaggtgtatttctcatggaccaccggtcctttcatcacttcctccaaggtggccaaggtcttggacgccttgtctgaagattttgctccagttgaagtaggggtacacatgtcttgggattgataaagtgctgaaatctcttggtcaaaaccgaagaaaccgtgttcgtgaaggtcgcggagaacctcactcatctgaaaaagaaatc

SEQ ID NO: 312428 - DNA, 1112 bp, Cannabis indica
tatgcctgtgttgtcttttcaggtgtgttcagacaggttggcggggtgtagtcacaaccgagtatttcgggccgaactgggttcgggcccgaaatgcaaattggattgatttaattggcattttatttgatatttgataatctaacatttaattaggatttaataagcatgaattgtcataattgtccttgtgagtgtaaaagcttgatatttggccctagggggaaaatggtcttttgaccttcattttctaaatttaataaaagtgaatttttgagataatgaagaggaaaattctgcctttgcttcccctctcacccgacccctctctctctctcaaccttctttgttttcaattttgattttgggagaaattggtgtgatctttagcttgaatgaagctttgaaattgaagaaatttaagcttgagaaattgaggtagttctttactgaattttattgatttccagttgattatattttatggaaaagcatgttttagggttgtgttgttcttgagtgtatgttataagaatcgatgcttcactttgttgagtttgagtgtgaatagcatgatattgttgtggtttattcttgagtggtggttgtgtttgcaagggaatttctaggttgaaaattcaggtctcagttggttttgagctgtgggaaagtattagaattttgttagtttgaagctcaagtttgtgcttgagttcttgtttgaaaagcttgattgttgtgtgtttgagcaagctaaaattgggggtttattgctggaaattattgcatggaatatgtttatttgagcatttagtaattgctagctaccctatttgttaatttgtgaatttgatcaagttttgggttgatttggaagtggattgttgctgaaaaatcgtgatgttcatggctggtttctgggttttcaacccaggtgccgcggcatgggttgagcatgccacggcccgctcctgttggtggaacgtgggatttgtcccaggtgccgcagcatgacttgggcatggcgcgacccacctgtgagttcttgggtagattggattcccaactttgtaatttcataactgtttattctgaacttcgatttgggaatt

SEQ ID NO: 312429 - DNA, 1564 bp, Cannabis indica
taaaaacttaagaactaaaccaatttttagtaaaaaaatgtgaaaaataactctaatttctagagttatcaggggccacgtataagagttaccaaaacaaaatacaattacctacatagaaaattttagaaaacaatatcaatataattgggtttggggggccagggccacccttaagctctacctccctccgcccgtgcttaaagctgaatataaaagttgtagatctcgttcttagcttttcataacatctttaatcgtccaatttcgaattatattgaaagagttatggccaaaatactaatcttaacacgcgacaaaaaaaatttagtaggggctctcgctatagcaagcgtgttgtggctgcagagagcctaaagcgttgccgcaacgagcgtgcgattggacaattagggttttctccagaaagctctcgtcgcaacgagcataaaccctccccacaacaagagcgtgatttctaaaattttaaattttatttttaatttaaatcaaagaattttcatgggatataaataagatttttaagttttatttttggagactgcatttttgaaagaaaaactcatggaaaatggagaagaagaagattgtatcaccaattattcatcattttagttcttttcttttcttatctctttaccttttaattatgattttgattatgatgattagcatagagtagtttctttttagttaagatttatttcaaaaccttaaaatatgatttcttaattcgtgataataaatgttgttcttaatttctcttatattaaattgtttatatttttttatttgaatattatgaacattgtaaattgtgtacacttaattaaaataattattaaaatgttaaataatttttttagtattgataattattaaaatgttaaaataattattttccgtgtacaattaatattgtgaattcttgttacaatataaaatataattaaattttagtattgataagatgtcacttcagattagggagattccaactcgaaaaattaatcgacaataaataaagtagttcatggtagtaaaagatttatctcctaatatccatcagtattcttacgggacaccaaggtgtctagtatctctatgatatgtcatcttataattaattatcggtttttataatttttattatattaaaataagtaagacctgatattaaattgtactaataataatattacacttcgtaagagtgctaggtactatgagtaccctttaacatttttacacatttatttgttgtagatactattacatatacactcttttaagatactattgaatagaaaaggaaatgaaaggttagataattcataatgtagttagaaagaaaaaaaaatatattgtttagataatacttaagggtacactaaaatttatcagatacaatatttgaaactaattaacaataaataaagttcattattttaaacatctatttcacattacaatttggatatgatgtgaatgtgatgatgttgattaactcctagtaaaaataaaagagaaacgatattatcga

SEQ ID NO: 312430 - DNA, 1523 bp, Cannabis indica
tgtttttttggccagagtacttacggacaactatgtccacaagctgacatttataaatcagatgagtagatattaaagaggtcgttaccctgttgtaatctctgactatggtgatgatttgttcaaagtctctttcagttgtgcaggggacaaactcagagtgatgaataaggaaccttgacactttcaaaattaccatattgtaatgcacgccccagatgttttgcagaatgtctcaattaacaatttaatctctactcttttttgggttcagatttatcgctttctttttctatgtaaatccaaaactctagcaaaagcattgggtgatcttattggtgaattcataggagtacatgaagattcacttgatgaatgatatgatcctttccttcgtgttagagttaaactttttattattaagccacttcctcgatgtcgattgataagagatgaattttggataagtctcccaaggataagagatgaattttggatagacttctgttgtgagcgtcttccagaattttgctttgaatctggtttacttggtcacccttttgaaaaatgtattatattcatggagcgtatggatatgggtaatgatgacaactttctttatggaccttggatgaaaggagccaaacttcctactacgggttatggaaaatatagaactgattactctaaaggaaatgcttggactcttttgacacgtcttgctcgaaacactcttcattcaactatacctcgtttacacaacgttgcccaaccacagccacgaatcctgattgggggagaatcttcttcgatccttgtcgcccctcctcagattgcttctccacggcatgcattaccaactttacacaccaatacaaaccaaataaactcacaaaacagaccctcctcaatgcctaactctttcactagttgctgcaatacaaccccacactagaattcaaccatatcccatgacagtaaccaatctctaaccacacgtcctgcattacagactttagacacaatttttaacctaacaaacacaccaaacataccctcctcactgcctaactcttccacaagttgttgcattacaaccacagactagacttcctccattctccatgacagtagccaatcaccaaccaccaacctttacaacattttcacaccagatattgggactgttgcaagccctatcttccccattgccccttatcctcaaacatcgacaacaatatccatccctcatagcatcttcacaagaactctttcctccatatccacacctttgaccacatctaccccattgatcaccacatcacaagttttgtcaccaacaatgaataaggaaaatgtctcccctgccaatttacctaaaagacaatgtaagtctataactatgagacaattcttaaaacaaatgtcgaaaaccaaccctccaccactggacgcttctcctccgtcacaaggagaaagctctagttattttgtttcctacgatgacatgattcgatggctgg

SEQ ID NO: 312431 - DNA, 1427 bp, Cannabis indica
gatgtatatagatgtatattgaagtaaagggttatgtgttcaaggcataatcgggttggactcggtaactagaaccgagatgaaccgttctaaggccttattgtaattagacgtgtgagcgtaacacgtaggtctatgccacatagacataaataggcgtgtgagcgtaacacgcaggtctgtgtcatacagacaaatatgaaatggcattattattatttatgtgatgagttatatatgattaacgatatatcttactgtcttgctgggcttggctcacgggtgctctactgtgcaggaaagggtaaatctatctctgatcagccatgagtatgggagttgggcgatgtatgtacatgttcgggccacactagaccaagcgggttggggtctaccagcgttgaaacttttgtaactctatttttgccgcttaggtcggctaaggagaaaagacttgtaatattttgtaaaatgatttttttgggatcccgaaacatgtaacttttgtttgtaaggttaaaattattacaagtttattttcattccgttttcgtttaaagtttaatttccgcgcttattttaaaaccaatcccgtttaggggattagggtttcttaatcatattgggtagcgtgcctaaatcttagggcgttacaaagagattcgatgattatgtgaccaagatatgtctaaagagaagtaagtttgatccttgtatgtatttccaagaaagaaatggagatactttgtatctgttgctgtacgtagatgatattctgatcgccagcaagagtgtacaagagaccaagcactagcttgaagctccaactaaagacagagtttgaaatgaaggatttaggtccaactagtaagatgttatgcatggatataaaaagacaaaaaagactattgtacgtgaatcagacgagttacatcaaaaagattcttgatagctttgaaatgagtaactctatggcagtgagtacttcgcttgcacaatactttaaactgagtgctactcagatgccaaaagatgagactgagaagtcggagatgtcaagagttccatatgctagtgctattagcttattgatgtatgtcatggtctgcactagaccagacatagcatatgcattgagcatggttagtagattcatgggaaatctcaaaaaggagctttgggatgccctgaaataaattctatgttatttgaaaactattgagaagggactggtatttggcatgaataaccatagtgaagacttggatgttatcaatagttatgtagactctgattatgcaaggtgtatctgtaacgtccccgcttcaagtctccattgggtccttacacccacagaatgaatggcacttatacacgagtacgtcgctctggctgcttcatggactgatgactgaccctacagacca

SEQ ID NO: 312432 - DNA, 2506 bp, Cannabis indica
ttcctacagtttaaagtgcttgttgagaatcagtttgaagaaacaattaaaactcttagaacagactggggtggagagtaccaagctttctctgacattgttattgaacatggaattcaatttgttcactcatgtcctcacacctcagctcagaatggtagagctgagagaaagcacaggcacatagtcgaaatgggtttaacccttttggctcaagctagtatgccactaaaatattgggtagatgcatttcaaacagctgtatatctcataaatcgtctacctacacctatcttgcatcacaaatcaccttttgagacacttttcaataaaaaaccagattattcatttcttaaagtgtttggttcatcatgttttccatgtcttagaccttaccaaactcataagttccaatttcactctttgaaatgtgttaacctaggagatagtgactgtcataaatgttacaaatgtttgagctcaactgggagagtttatatctctagaaatgttacatttaatgagagtgagttccctttcaaatctggttttcttaacaactttgctgcagaaaaggaggtgattattcacaacacacagtggtcaactacctgacatacactttacctaatacaaccaacaaataccatttactcttgttgatactgctcaaaaaaccgtctctcaactgtcccctagagctccatttgccacaaaccagcagcaagaggttagtgaccataataacattactgtttacactattgatgacaccagtgatagttctgatattgcagaccagcaattaccagaacaagagcaagtaaatgtgcctgcagaagtgcctatgcaatctcaccacatgataactcgatctaaaagttggaatattcaaacccaaagtctatttgggacaagctcagtggaatcagattaatgaagagccaagaacacttgaagaagcactgaatttaccagtttggaatccagctatgaattctgaaattattgctcttaaaaacaacaaaacctaaactcttgtacctaggttggacaactacaatgttgttggcaataagtgggttcacagaataaaaagaaatgctgatggctcagttgaaaggtacaaggcaagactcatggctaaaggctttcatcaaaggccaggtatagatttctatgagacattcagccctgtgattaaggcagcaaccattagaattgagctcaccatagctgtgtctaaaaactggtagataaagcaaatagatgtcaacaatgcattttttaatggacaactggaagaagatgtctacatgctacaacctcctggtttcgaggatccaaagaaaccaaaccatgtttgtaaacttcacaagtccctgtacggtttgaaacaagctctaagaacatggtttgatcaattaaagaagaccctgcaacaatggaacttcactaacttaaaggctgattcctctctttttgtctacatgacagataaaattattctcatggtgttgatatatgtggacgacattattataggaaataatgagaaaaggctgaatgagttcacttctaagttgaacaaaaaatttgctctcaaggatctaggaccacttcatttcttcttaggaattgaagtctgccgtgacaacacagggctgtacctgacacaatccaagtatatatatctgattgtctgcacaagtatgaaatgctcaacataaaaccgtgccccacacctattgttgtaggaaaatctatgtcaaagttcgatggagagctcttcctaatcctacagtttacaggagtgcaataggagctctccaatatcagtgtcatacaagaccggatattgccttcgcagtaaacaagttgagccaatttttacaagcatcaactacaagtcattggagtgcagtcaagagagtgttaagatatctcaagggaaccattcaccacgatcttcacattggcttcaatcatcacttgaacttagttggttactcagatgcagactgggcatgttgtcctgatgacacaagactaattacaggatactgtgtctatcttggagaaactctagttgcttggtcatcaaagaaacaagcgggtgtgtctagatcaagcactcaatccgaatatagagcccttgctcatgttacatctgagattacatgggtcgaatcccttctcaaagaactcaacttcaagctccccagtactcctataacatggtgtgataaccaaagtgctagtgccttagcctcaaaccttgtgtatcatgcaagaacgaaacacatagagattgacatacactttgttcgtgaccaagtgctgaagaaagagttagaaatctgctacattccttcatcagatcaagtagccgattgtctaactaagggcctatcacattcaagattttagtacctgatcgacaaacttggagtgagagcctcaccccttcgtttgaggggtggtgtcaggaatggtgtataaacag

SEQ ID NO: 312433 - DNA, 621 bp, Cannabis indica
ttgtgactaattataaactattattcctatgttgtgactaaaaaatccgtgactaaaactgaattagtgacaacttgtatttaaatgtatgttttagttacaagtaactttttattgtgactaaaagttatctttttagtctcaaaaaatttatgttgtgattactaaaagtaattattttttgtagtgtgtctacattaaatttttccgtgagctatttttatttgcatcgtagaaatatttattaagttttggtactcaattttttcattaagtacaaaaagaggtatataatcaattaatttagagatttttcctcactcaaaagcaaaacacaattttttgatatcatggctagaggtttcatattttttgataagaaacccatagtcatgaaagcttaagattccacagttctatgtctttgaattccaactgagccacaatatcatgttaaactcatcattacaaatttctaaaccattatcaattcttagggttttaaccctatggttatttaagttttccataagagttctccattgtataaatctagatagagcatcatttttatgtctaagtagaaaaatgttggaatttattttaccatgatcttagatc

SEQ ID NO: 312434 - DNA, 2519 bp, Cannabis indica
ctcggccaaggtccttaagaagttactcactgaagttccttaaaaattcactcggccaaggtcctcaagaagtcgctcggccaaggtccttaagaagtcactcggccaaggtcctcgagaagtaactcgtccaagctctttaagaagtcactcgaccaagcttttcaagaagtcactcggccaagctcttcaagaagtcactcaatcaagctcttcaagaagtcacacaaccaagctcttcaagaagtcactcgaccaagctctccacgaagtcactcggtcaagactcttgggaagtgacttagtcatgacagttggaacttggtggaatcttcctaagcaagaggagaaggaagtaacaagaatacagacacaaggacaaagtaagcacacaaggagagtacgaccacaccctttgcaaattctgaaggcaaggaggtacaaggagtggaggcaccacacctataaggtctgagaacctgaccaagggtactctacaaccactacccctatagcccgggaccacctgacaccaaataagagtacaaggttcaacaccacctcttgcgcctgtagcttgcagggtgaaagcgatactttgtcctcttgggaccaccatgtacctcaggcttttacagcctataaatacccctcctttagatgtagaagagggttggaaaatcatacttataataccatattgaaagcaatagaaattttaccattctcctctccatttcgagatagcaatttgaatttacatttcatctttctcttcatcttatttatgaacttgaagcataatttcattttatggccaacaagttggttgacgagttctcaccatcaatagtttggcgttatttgtgggaacgacaagcttaagttgagtcatttcttcacaaatcatcaatacaaaattcctagacgctcttaccaccttcaggacgtggagattcatctggacaccaaccaattaatccccttagggcaagatctccccttgcctactgtcgaagaagaaggcaaaaatggctacaaacctcaggaagaagaaaacatgaatgttgtcagttccgaagtagaaggagagggtgcagatgggcgaagacctcaagtagggcaaggagataattgccatgaatagatcttgttgggtgagctacatgatggagctaatgcctccatcacgattgaggggggaggtggattatcgaggtgtaaggccccgtcacctataaggcacccctgccaccgacactaaaagatctcgaaacctcacatcatatgccaggaaaagagaagcgggtttattccataacgtcaagctcccaaacatgcatacatcacgaggaagagaatgagttaaagatgaataacttaaggctggaggaaattgttgctaacatgcaaaaggtgttggaagaactcttgatgggacgttacgaggcgcatctggtcaaacaaagggagccagaggcaaaaagaaaagatggatgtgagcttgaggatgaaggaatgtctaagcactccacgaataacatgtcggagtccatggcacataagcctcaaactagaaaggacccaaaatatttgtcgcacccaaagaaaacaaattcaaaggtagcccaaggcgatttgagagaaaaactcaaacaaaaagccagtgtcgagaaacaggtgccgtcactggtgaccccccttcctaaagatggtacaaaacgcactcttccaaacctctgggaaaaattgaacaggcaaaagtaggagcttggaaaggagatggaagatatttggcaaaggatagcacccgcatcatcagaagaaggtagttggagtgaggacaattttgacaaggagtcacctttctccagagaaattcagtctgaacagctacctcccaacttcaaggaaccaaatatactcccctttgaaggagtcaccgacccaaaacatcatctggattcctttaatgaaatcatgaaaatgaagaaggttataagtaaggtatggtgccaatgtttcgcggtgactcttcgagacgcaacatacaattcgttcaaaagattggccccgggtcgattacttcatggaggcagttcaccaacaaatttttggtccagcaccatgcctcccatgattatgttgttctaaggacaagcttggccaatatcaagcatggagaaactaaaagcctgaagagctatattcagaggttcaatgctaaagtagcaaaagttggaagattatccaaagaggaacacaagatggctacagccgcatgagtcaggccaaaaggcaagctatggaacaacatgtttgttagaatattagttgtatattaggtgttaaagaattagggtaacttgtatttagtagtttcctattttgttggtagtttcctattttttagtctcctagctttgtatataaatatgtactattctatgaaatatatacacaattcgattcattattttctacatggtatcagacctatacttagaattgtgattcga

SEQ ID NO: 312435 - DNA, 2694 bp, Cannabis indica
aatgacttctaatcttttattgataacaaatcagattagattgtaatgggtttcatttagggcataaaatcccaacacaaagaaagtgaatcagaaaaccctctccacaggaagtcccacatcttgagcctaacgcaaatcttctagcaacacaactgtttctgcctggaaaactgaaaagaacctgtaaacgaaatagtttaaaaggaataagtacttttaatttttaaaaccaaaaaatattatattagcacaatattaatgttggtagtaaatcactttttaaataacctattctattaacctgtctataataattttttttgaagggaaaccgatagaggttaaaataacaaaggtaacaaagttacgcagccagaggaggattttcttccatttaaatcattcattgtctatcctaagggcatgcagagatacccacgagaactagacaataaaaccttaatatcagaaaaaatttcaaaactaagagttgtcacttccgccccactaatagaacacctacaaaataaaagagaaaaattaataacacaataaaatttaataaaatatgaaatttcccttacaccatgtgttgaatgggtttcagagacggattgtgttaacgaatccacattcaaatcaatactttttttattaatgcttgaaaccatttcatgttggtttggaaaaggtgagagaaacacatgtgagagtaaatgtctttgtgtgaagattggatcatgttggggagtctcaaaagaggtaaaattttggtaagaaaaaaagaagattggataatttgggttgaattgagaatattggaaattaaaattttgggggttgtcaaatggaggattatggctaaattgagaaaatagaaaatttggattttgagagttggtatatgggaaaattttagttaatggaaaatattgtaaatttgaattttttgggttggtttgtggagaattttgataattttagttggattgagaagattgaatgattgaattttgggagttggtatgtggagaattttgggaatccatttatgaatataagataatgtagaaaagtggtttggaaaatgatatgaaattagtgagaagaaaaaataaagaaaatttgtgataatagattttgtaagaaattgtaaaaatggtgtagaagaagagtgaaaaataatgagtatttatagaggataaaacagttgatttctttttattattaattaaattatttgagtgtgtcattctaaaattgttaccgttaccctacatttgaaattgatttgtctttcatttattattttccttaataaaaaaaattggatgatgattgttgcacaacagttggagtggtcattttgattcactcaaatgcaagactactcagtataatagctatgttactgataaaagtgttttgggctactccttataagtgagtgttggagctgctctaagtaggtcccattaaattaaatattaataaaaaatattttgattataataattttattgcatgacacattatattggagacacatgtcagaataggttttttcttttatttttaatctaatagatgcaactacactttatttaatgtgtataatatagccaagaaaatgtctttatagtataaggacaaaataggtgtgccgaccatagaaattttttataaaagtaacaattaaattcattccacacatattttatacatatatttaaaaatacatatataattaatattttaatataaaaaataataatttgaaaatgatataaatatgttttaaaaaaatataatgcaaaataaaattaagcatttcttatacataatttttttcttgttttaaatttttattttatttattttaatttattgttgaaggcatcaaataatatttattttgttgatggtgatgtaaaaaaataatttttcttaataaatattaaaaaataacattactaatctaacctgcacttctacaaattaaattgaatttgagttactatgccgattggattgcatccaaaaacataaaacgaaaaaaaaaaaaaagatcattccaatacaagatgagaaaaaaaataattattttttttattgcactttaaattttattccatatatctatatacctggcacgaataaggtagaaattaactgccttaataggtaatggggcagggtgcaattttatatacctgaagcaggttcgagataggatcggaggtgatactactcaccccatattcaacccaaatatatagttctcaaactttccatgtagttttctaattactacgtattgacgttataaattatacttacaaagttgactattaatccctaatttacatttaataaaaactttttaataagtaaaatatttgattattttaaagtcaatatcttattttttatttttatttttgattacattacactattttcttattattaatattattttaatattaatgggtacccaataaataaatctccataccctgagaattcctctaccctaaacccattagagattaagagcaagaatggaaggcataaatgagaaacagggacaggattggaaagtgcactatccggttagggaaattttatttacaccctaaaaatttctaaaggcaccccattttaataattttaatttaatataaaatt

SEQ ID NO: 312436 - DNA, 1149 bp, Cannabis indica
cttggacagtagaacttgattcagatcatagtcctgagaattatggtatggcaataccattgaaggttttattgatcaatttagaaacaggagaggtttttggtggagttgtacaaagattagtagctgctacaactattaaggtattaggtgacattatcaacttttttgttcatgtaatttttggtttaagtaatgataatgaaattgttttcatgtgtcagatgtttgttgggagtttcaaaagagagattggtatgtcataagatgttgcttcatcatcatcaccatctataggagaagtattggcagaattagtaagcaatgatacacctgttgaagattatgataagattactcatcaaagatcaatatagtgctttaataatcttttcataagtgatcaaatagatgtcttagtatgtaattctgtaactgattttattgttgtgttgtgaacatgtataaactttgttactggtttctattgagttgtttcatattattattacatgccatagccaagaaaaggtaaaatgaccatttggttgctataaaatgaaacaatgcaaaagggtccaatccgggcatttgttacctgatatagcagcagtgtccatccaccaaaactttgcaatcccatggagaacaaacccgaacaccgccaaccaaatctcgaagctcaaagctccccctcttttattaatggacagtcttagattggatgttatgttatgcattagcaaatgctctttagaaaaacaacacacactaatgaaaaggttgacagtttgagtaacttttatggtcttagtttctttcatgtctaagtctaacaaccaataaagggatctaatttgtagttttatgtcttattttgttagttgaattgaataattagttgttggtttcgcttgcatataatataggcattgtcatttcttgctaatctgaggcaaagagtttagctacaataagtcccacatgggaaatgaagatggaaactaagtagtatatgatagcttagaaaacaacattgctcgccgggtctagtaacgtgggcctgtaatccaagtggaggcatatgggaaatggaacgttaggtggttcagtgggctggattcaatgttagctgtctactggcctgcc

SEQ ID NO: 312437 - DNA, 2067 bp, Cannabis indica
attaattactctcaactaacaactttgaaaatttccatgcagataaataaagtaaaaactaattattattcattttaaaattacaaatagcaggatgatatctattgcgtccatataactgaaaataacttttacccaatattggtgagacattgcgaaaggtactgcccaatagtaaaagctggtaatcaattccatgactctgtgagtttagtcaaagaaacttgagacgacccgccatttgccatagctgcttcggcttcattcttcattctcaccactctactccggaccgactcacctctttctgagttcatcaactcattaactcgcttctccacttcatcagagcttacaaacccatcttcagactcattcataggcagagcaatcttaatttcttcaaccaacaccactctgttaagcctctgttccgcgtagagaggccacgcaaccattggaacaccagcacacactgcttccagcaccgaattccacccgcagtgtgtcacgaacccacctacagaatcatgactcagtacctcaacttgctctacccaattcttcaccaccattcccttctccttagttcgatccaagaacccgtccggtagcaacgagtctaaatccgggtcgggaagacccgaattagccacgctgaccggactcctcaccacccacaagaacctctgcccactcttctccaatccaacggctatttctctcaattgctcaaccgtaaacgaccccagacttccgaaacagaggaagacgacgcttccactcggttgtgagtcgagccaagcaagtgactcggaccgtacatttcgttttccttctttggtaaggatcaacggtccgatgcaatggatcggaggagtacggccttcagggacacataagccgtccaatatggctttgatggttctcggctcaagtgactcaaacgtgttcacaatcattcctgtagattcacataaatcattagcgcatgcaagaaaattatcataggccttgtcactgcggtcgagcaacggtttcggcatgtcagaagacggaataggcggaagtccaggtatatggaggagggtattttggtctttgaagctcttctgggaatttctgtgaagggtaggtaaataaaagaagaaagccatggcagacgctcccgaggtaatgaagaagaaacacgggattttaagctgtgtagagacagtgagcgtttcacaacagaagaagtcgatgatgaaagcgtgaacggtgtagtttttggatatggagacgagagcttgatgtacgagtggcttgctgtgtcggatgagatcgaagaggagattctcgtggtgaagcgaggctgagtcgatggaggttggtgggaggtgatggaaggtgatagaaggaatggtggcagtgacggtggcgatgtagggagcagtgtcaccggagttgtaaggagcagtggtgatgatgatttgaatggagagtgatggtttgaaggtgagtataagcttccctagctcaaccatggagattaggtgtcctatggctggtgctgggtacaagactattgttgacttcatatttctgatcagttgattgttactcagagtcagattgtaacaaacaatatatgaagagagctcttaataaattttacggttgggatgggtagcatgtgttgctgaattcatggacgaggacaatgacagtgacaagatattcttatgaaaatatgaaaataacataaacttttcttctgttactgtgggtgttatttgcacacatcacattcaaatgaaaaatacaagggagaattgcggtgaatgtctccaaaaatttaggattggtggagattagtcctcgacatcaaaaattggctgtaatagtgctcaaagtggcattttttgtaagtccgttggtctcttttctaacggatccgttaaacccaaataaattaccacgtgtcaatttttttattggtcaaaataataattttaattaaaaaaatttaaaataaaataaaaaactaaaaaatatattttaaaattataaatttattttattata

SEQ ID NO: 312438 - DNA, 1566 bp, Cannabis indica
aagatgattagtccaagccagcgcatggaaataagttggcctataaataccccaataaaacacgagatagggcaagacacttttgagagacatttgttaaatataaaatgattattaaaaaactccgtacagattcttaccaagcttcctcttcttcaagaggtacactaggaaaactgagtttcagtccattgtacactaacttgtatgaacaattaccaaccgatgagcctaatcaaatggactcgtagactaaaatagttaaagtctaaacgacgtaaaaatctcatatttgttatttattctgttatttctttcctaagctctaaaaatatttagttgccaaaaactcagtaaatttttttgtgctttcattgagagctgaaagaagatagaaacatgtgcagtgtccaccatcacaaatttgaaggaaggccaccttattgcttgccaggggccgatcttggaccagggatatgttggtcagaggtgttgacaaaagtgaacgcctacacccctgtccagatgaagaaagtacagaggatgaatgcatatggtcttgaaatgctcgtagtgcttgtgcacgtttataaaagcttagatctagtcggccaactccctgtggaagtggtaaactgccagtatcgtcaaactaaaatcccttggtatccaatggggcatgaccacacagacacaatgcggtgcaagaggtgttggggccaggcaaagaagcaaagaccaaatgcaattacaatgaataactcacgaagggtcatcggaaataatgactccatccagctcatgactctcatcttttaaccttcgacctcagcgctagtgctactgcaagggccaaatctattgtcgacaactacttccactaccttttcggtgagccgtgaagttgatcagaaactgaatttgtaatggtgaggctttggaaggtaccttcagtatcactgattcccactgggtttccaatcaggccaagttatggtactgttggttggaagtggttgttaaggcaaatcacttctggtgaaggttcctgacatcatttcgatgtaagtacgacccctgaagctacacccgagacagtaactcgagacattataaaccagctgggaaatctctatcagagtaatgctcaccttgttagaattttgagtcctttccttaagaactactaggtgccttgaagtataccctgagcgacagactacccaggagatccttggtgccaattgagtcattcacatcccctgaaccctcccggatcacggatagcgcatgcacgttgtttttcgtgcatgaaagatcactaggggtatggcacgtcttcaaccctccttcacggaaaagaaggactacttaaagtctctcacattcgcactaatgttttaccctttggtctttaaaagggaagtcatcgcttgaattgccatacaactttagccttcccttgtggaagccaaagtttacttcataaaaattcaacatgactctcgcatgcacattgtttttcgtgcgtgaaagatcattagaggtacgacacgtcttcaaccc

SEQ ID NO: 312439 - DNA, 1800 bp, Cannabis indica
aaagaaatttgaaatgtttgaaaaatttctatgaatttctagcaatggtgataaaccattaaggtaagtggttaaagatcttgcgaactgagtaggggtgggagaaatagttagttgatatgcagtaagttgattttttgaattatatccaaacttacctcccaagaaatacgatttgcatttttgatgatagtataaggtttatgattaattactaatcgttgcctaaatccttctagggatataccctagtgataggagtatctagacctggggcttggacccaacccgtagtttgcgtctagatcagggacctaaacccagacccgaacccggacccacagctagactcagacccggaacaggacctggacccgaaccatgtcttgaacccaaacctagaaccgaacccattccctaagacccaaaactagaacagaaaccgaagcggaccgggaacaggacctggattctgagctggaactcgatgaggacccaaactcaaaccttgactaggatcgagacctagacccggacccagatccagacccagactgggagtcaagacttgaacgcaaacaaaaactcagaccgaacatggaaccaaactcggggcccagattaaggaccgggacacagagtccgggatctaggacaaaaaccgaaaccagaccggtacccgtgactgggatctggctcttgacttgtgattcgagaataggggtgatacaaattacacaaatagttgtgatgaaacccgacaccaaatatggcagtctctaagaattctcaaaatttggaagtggaaccgcgacccaatgcttagttaagtataaaccttggtatgaaggaagaagccacaaatggtggtggacatcaatttgataagtcaggttgaacgccacaaggaatactccttgataagttccaatggttctctcaagaactcaaaaagataacttctccaaattttattcaaaaataaaggcaggataaaggaaataaaattaagaggaaagtttccaaaagccttgaaaaacgggatcagccacaaaataattctaaattgagtctaagttgagtctacattgatgagaataacgaatctttgttctccttcagtgttgactgcggtctcctcttttttaaaactctattgactgagtttttcagttcttctttgaatctcttagctcgcaccctcgtcaccgggccaagtggaacatgacttgtttctttagccttagtctccttgtcattccccccttttgaaaaggatttgtcctcaaatcttcacatgcatcaaaaggggtcaaatcaggaacattaaaagtagcactaacattatattctctaggtaaatcaggaacattaaaagtagcacaaacaggtaggcattgtcattgatcctttcaagaactttaaatggaccatctcctcgagatagcaatttggaacgtctttgggctgggaattgttctttcctcatgtgtaaccatacccaataaccgggctcaaaaacgtgcttgtgacgacacttgttagcttcatttatgtattgcgcggttcttctctctatgttgagtcgtgccctatgatggatttgcttcaaaaaaatttctttctttctgtcatctaaattcaaattctcagaaataggtaaaggtgatatatccaaaggagtcaaaggattaaaaccataaacaatttcaaatggtgaaaatttagtagcaaaatgcgtagaacgattataggcaaattcaacatgtggtaaagaatcctcccaagtcttaatatttt

SEQ ID NO: 312440 - DNA, 1259 bp, Cannabis indica
tgattatatcaatgataaattttgattttcttttagtttttctctttcattttctaatgagatttgttttctcttcagcaagtagataaggaaaaacaaaaacgggaattagaagaagtgggggatgctatgaaatctctggagaaccgaacactagactccaaaagagagatggatatcatggctgcattggatgagatgaagtccatgaaggtaattgttcttaaactttgaagtttcataagcaactatgtgatatgtattctctaatactaatacagattttcatgttttttgcagtcaagacacgctactgtcagtgtagatgcaatgcttgaggccctgcaacataccgctgctcaaaaggtatgatagaaaatctaagctgctaatacatgtttttatcctcctgaacgaaaacccccctgacttgttatgattaatatggtggcaggagaagaaattggaggaggaggatgaagcactaataaagtcagttgttttccatgtaagtatatcatatcgatcttcttttttttttttttttaaatttgttaggtagcttagttctaataacttgtttctatttcatgacacattaacagaattccaaagatttcattcggcggattgatgatgatgatgatgatgatgacaacaatggtacccgtctaattcgtcctccaactagcagtattgaggcttcgagtgccattctggtttccaatggagtttcaagaggtaattaactccatttgatgaattcttgaattttgtaagatttcttatttctgcttttagaaaacaaaccatagaccatgtttttgctctccatacaataataataataacaatttgaattgcgtgtttgttaattgtaggaaagcgaaaagatgtcgagtctttaattacacttaccaagtcatcaaccattatagttaagaagtcaaaactggaaggagaaaaaacctgacgagtgcaatggcagcggtactgcagtcgttgtgtcaaacttatgggagttatgacagagattagatgacaagatggttcttcgcagctgaaattttcaactttcaaatttttggcaccttttattagtctattataaaatttgttaaaatgttcataatatacatttatacagcattgtaagaaatcaaattttattatggggattaacttcatttcccgcccttcccaaaaatttctaataaagtaatataaacattttcaacttatttactttcttccaatat

SEQ ID NO: 312441 - DNA, 1498 bp, Cannabis indica
gtattaaaatttgccacccatatatgtcagggttggccactaatttatgccccttacatgtttatatgtacggaaatgtacgagtaattatttcggaaatacacacaaaaaaatattatatttttacttttttttaagattttatttacaaaaaataaaatgttttgatgttttcatattatttttatattgtattcttgttattttttatattgatttttctttttggtatattatttttatgttgtttggatataaaatacatatattcgaacataaaagtgtaaaaaatttaccaaaattagtactttatgtaaatttctcaatgtaaaatgatacatggttgaccgtcgtgttgaccaacaagaatgacctgttttgtagtgtgtaattgtgtacttgtaaaatgaatgtgtacataggtgttgaatttttcataacaagttgttggtattgttactagggactgctttagttaatatcaagatagttgatttaatttggtttcttttagtttaattttagtaatgtttttattgtatgaatttgtcttgcgaggtgcataaaaaaatcctacatcaagattaccttacacgttgttgacagtgaaaactcgtcaacttaacttttagttaaaaaatcaaatgaaaagatagttataattataaatcataattttaattaaaaataattataaataaataataattttgaaaactaattaattaatttttttaatcttttcttcaatcttctttttcttttcattcactcgcaacccattttattgggcttgagttgagaaacaaagtgagcagattcaatcttctctttttacaacttgctttcctcaactacatattgagaaattaggttactgacactctatgtgtttattataagtgttgtaagttattttgataaagctaaaagaggcatgaagtgcacgaagaacacgatgaataatgtgagagtcaggaagagaaatattatgatatttcaacttgatttgaacattcataattttttagattgaagtctctctctttttgattcatcatacttaatagctattatttcatccataagatgtcctacttcagcgtttttgccaatgtcatatggtttttctacaacattaaaaaattctttgacatttgtagtgtctggaaagccactaaataaatgttctggaatataactttacataacaatgcgactaagacgatttgaattttcccatggtgcatgaagagttttctgggcaacagttttggtatcaataagatcaacacacttttcttcttgcatgcataagtctaaatccattacacctaaagtaattttcacatctcgtttccatgcgttaaagttgaatgtttttaggatttggatggaagcgttattgttgttcacagaaaggagacaaaaaacccaaaaattaaaatttgatcaagctatatgagcaatgcaattagaaaatattgtagagtcaact

SEQ ID NO: 312442 - DNA, 1032 bp, Cannabis indica
aaaatttgaatttttcacaaaaatcaaacccaaatatcacaaatctgaaacacaaatatcaacatccacaaatttaagctccccctttttagatttgagtttttcatgcaccatcatgtttgtatcaaaacgataagaggagttggctccatcaaccattaaaatcgacgagcaaggtcacccaccgagctgcacttagagcccaccaaccagagattccagatctgtaactcgacccacaccatcgagcacaaatacttcccctcatggatcagacacacactagcaaccaccgtgtattcaacggacaacaaagatctcaaatctgagatctccataaccctaaatacaaagaccgtttgagggagaccatctatgagttgcacatttcgacaagactctaaatgcacggccaaacttcgatgacgaccatggatgccagacgcacggccaaatgctgacgacgattccttagtcgtacagctgttcacggtgcggctggtgtagtttttgaccatttttttcaaaccaacccgcacatgtgattttctttaattttccaaaccgcacccacaccgcaaaacttaaaaccacagaaaccacactgcaaaaaatagtgcggtgcgatttttgcaatttttacgatttagactatcaccaaataattaaactatcacaaatataacaaaacttgagcaacacctgtcaaaaatatcataaggcatgaaaataaatatgaaatttttttcaagttttaacaatataataattagtgggctttgggctgggccttcaaatattggacctaaataaatataaaaattagtatttttataatatgcggtgtggtgcagtttcaaccacatattaacaatttaaaatcgcaaattgcaccgcattgcgtggtttaaaaaaattcaaactgcaaccgcactacaaagaatttcaaatcgtatttttttttgcagtgcggtacatgttggaaatattttacgaggatctagatttactaccaagtatgtttcattaaca

SEQ ID NO: 312443 - DNA, 2976 bp, Cannabis indica
taccaatcaatacatttaagctagctatcttcaactgtgttgtcccatacctacacagtctcagaataatcccacttgaccttccccatgcggtgtggaattgcatagcttacttgatatttccccttacgaatcatgagactactgactgtcaaaatcaccccccttaggggtactgacattctcgtcgaccacacttccagctgggtcaaagctctgataccacttgtaacgtccctgcttcaagcctccattgggtccttacacccatggaataatgactcttatacacgagtatgtgcctctggctgcttcatggactgatgactggccctatagaccaatacgagtgtttccagcatgctttgtcctcactcgcacacttcctgggaaaacttctcaggaggtcacccatcctaaaattacactaggttaagcacgcttaactgtggagttctttcatgatgacctactaaaaaatgttaagtcattatatatccacgtgtttttttattgatatatttaaattattttttaaaaaataataaaaatttaatgactttgaccaattagaaattgccacatggcaatttacttaactcttaatagcaaggtgcttacaaaagtttcagaattatagcttaagtattattaccgttaaaaattaaacttaggtattttgtggtatagttcctccaaaaataaaaagttctccgcattcgtcagtttactcgtggtcccagaaggagtcttgtggaatgatagtcgagtccggaagggagtttctggatgactattatgtccactccggatcaagtatttattaggatagctagcccttccttggaaaggagttctagctggatagttatccttcctgaattggtagttctggatagtcgactagacttcagtagacttatatcctatccagaatcatcttcagctagggttcgtggtcctcgagcccaaaagctcattcatgttcctaaaggccctagtgcttatgctgacgtggaaactttgctaaattaagagttggttaagttaattatttctaactaacttaacaacctcatttctatatcaatcaccgactttaggatcttgattctaagactataaataccacattgactctatatttgaagatgaaaaattgagatatattagtttgagtactctctgttcagatgagattgagagttagagagagaaaagattgagaggttgagagagaggtacaaagaaaagatagaaattggatttgagtttgtaagaagaattttctgtatatgaagaagattcttaagtgtaaagtgtgaaagttgaaacaaatatttgtaaaaactcatccgagaatctcgtctcgactgtactgtatattcttactcaatcaataaaaaaggattacgatggtgtttcagaattggagtagagtcatagatcacatcgatctatcaaacttgaaccagtatatgtcttggtgttgatttctttattttcaatatttagtgtttttcggttttaacactttatttgcccctgtttttatttctgattattgttagtgttgttaatcttgtcattgctaattatactgtttaaagtttcattgctttgattctacatcacttaattttatcatatatttatttgcaactaaagttaaacttaaatatttatatcgcaaattactggtatatatttatatatcaccatcttaaaaaggaaaacaaaaatagtactatatatggtacatatagatatatatatatatatatatacatgcatccgtgatcgtccgtgaattcaaattttcactgtggactttgatattctttcgatctagagatgtatataatatatatatatatatatatagatcctgatatatttcttacaattaatttgaagctatagctagtacgtatagaaagagacatgacacatatatatatttaatgtatatgtatatgtgtgagctcgtaaaagatatcaacaattattagggttactatttggtatatatataatagaaatattttgatcaattgaacctttttctaactgtttactgaataaaactactttcagaaaacgttagaactaataataaattaattatcccacctagctatatatatatatatatatcattagtgatttatatataattcgatatatatatattgaaaattagacaaatcttagtggcccaaagttggattgtttaactaattaatcattggagtatatattataatgcaaaaattaatattaattagtaaaaaaacattgtatatcatggcatttatatatgtatgattacttttagaaaataatattataaatatgtattttaattacttttttttatgaatattttaattacttttaaacaactgtccaaacccaattaattaagttcatagttacagctatttaatacctttgttgattaataatatatatatatcctattttattcttaacctttcactttttatttcatttatatatatgctcgatcgtgactgagatttaatgaatatattctagaaataatttacttttaccttttatttttaaccttctaaattaactatttttttactaaaaaatttcataggtgttaattacaaaattaataatttattgttattaaatatgtttttatactgtgtcacactaaaactaaattaatacacaaatatttttttttgtgatttaatcaaaataataatgctaataattagattaatagtcacaaattaattatactaaaattgacaaatgtatattgtgatttgtcattagtttcaattgattaataattaattaaataagtgattaattaatatatatatatatatatgtaggtatatatgtggactttcactacaaaaatcttacttctagtcacaaacaaatttgtctaattataaaatcatcattcttatgttgtaattaaaa

SEQ ID NO: 312444 - DNA, 1638 bp, Cannabis indica
ttgaacttttgtttagctgcggcagttacgattgcttgatgtcatccaggttacggtttgtttcttcttctgagccactttgcttggttctttggcatcttttctttgattcacacataatcaggcacaaaatctcacaccaataattcaaaagtcaacaccaaaaatagaaatatcaaatgttacctaaagccaaatgtgaatttccaccaaactgagtgtgtccaaatagaattagcacccaaatatgattaaaggtatgtcaacagactcgcaagaagcttaaagacaacacaacaaatggctaatcttgctcctttaatttttgtgagcagttagaatggcgagagatatgcttatggctggcactgatggtgatttttcaagttttggctctacacgactgtgcgatggagaaattcactcggtgatgcgaaatggtggagatggagctgttgttgcgaggtacgttttgtggtggttaggtgatgattggaactccactgggtttcaactatggtgaacgatgctggtgaaattgatattgatggaggcagagctaatgctagggtggctggttgcagctcgtggtggatggagctggtggaatgggaatggtggaaatgggggattttggtgggggcggctatgtttttctggagaaggaaaagaaaaatgatggaaaaggttgggttgttagggttaaagagaaataatatgggttattaataagtgaatatttacttcagcccccctcttttttttttagaaaatttcacgccccagtgtgagtggttctgtaaatgcccaagatttttccaaaaaaaatttgatactccagtagttacagttttgctatagcattgcttcaaaatttcattttcttatgcatccttgtttcgaaatgttgaagcaatgctatatctccttggacttactgcttcaaaaaaaaaaatcctgcttttcaccacattaaaacaactccattttctgttattctttgccttgcacctgcaataaaaatcacccaccattgcaaaatcattagtaactgtaggaaattaaaagagatatatatatatatgtaattatataagtatgtgtatatatatatatatatattatttttttttcttttctttctttttctttttcttatacaaaagggtggtacacccaaattaatttaaacatcctctcttcttttttttcacaaagaatatttacaaaacgtgttcctcttccaacattaggtttcataaagaaattaacaatccaaatgcaaggcaatcttcctcttcatgcatcttccaaagtgattgaggtctttgcccgatcgacttcacctccaatatagtgctttagtcgttgtccattcactttaaataccctcccaaactgttcttctttgacatcaatagctccgaaatgatacactttgttgatagtgaatggtctggaccattgagactttaacgtcataggaaacaacttcaaccttgaattgaacaacataacttgctgcaattcttcaaacactctatgttgaatcctcttgtcatgccatcttttggttttctccttgtacaacttggcattttcataggagaaaaaacctcatctcttcaagctcattta

SEQ ID NO: 312445 - DNA, 2345 bp, Cannabis indica
aaaaaatttacgtctctattgttgagtgcatcgcagccaacaatgcatggttctttagtttggctaacttgactgacaacctctttaagtctggctaactcgagatcttctcccaagtctacatggggcttgcccaaggttggctcacaaattcttggccttatctctccagcataatactggggaccagattcatctatggtgcttgggtgttgctccatattggtcattccttcagtgtcaggcgccaatggagaatcctccttgggtggaagaggttggccattgagatcaactgaattggtggtgtcgacctggccatttgtggtggccaggttcgtggtgcttgctagaacgacagggttggccacatctattgggtttgtggagattctagttgtgactggaacacaaacatcaagatctgcagtcatagggtcttgaagaagacccgatgagacagaagttgtagccatagttctccttgtgttagccatggcgtttgatcagataaattgataactcgctctcaatgaaagtaccaaactgttgacctcataatttggccaaccgacagaagagtcgtatttaatgctaatgcttaccatgtgttacacaataagaataataaagtaaatagacataggattttatagaggttctcttccctttgttgacaggtaatgacctactctccttttggttgtattgatgttgagagataatactactcatatcactatattgatgggatctgaagtagctctcttaagattacaatgtatgaatcagtaggcagatctctaattaaagagagatcgagacttagaggcgtgtgagagagagggacagagcccttggggcatgtagtagagagaaaagagaggattagggttttcagacttagagttagagttaatgaattagggttttaaagataggctaatgctctttagatagtagagtttacatgcacaatatccttaggaataggtaaaataaagctattatttacatgtttaattataaatacaaatgactaaattgccccttaaaatagatattttccctctattttcgtgggttgttaaggcttggtctgttgcttgacttgctgtccacggatgagggttgtgcatcaatatcctaccaggcaaaagctggctggctgtgcacctacaagatgtaggctggctggccatataatgtctacaggttgaggtctagtcaaccatgctcctgccagggtctggccggtcatgtgcctgccagggttttccagccagctttgtccagagttggctaggtctttacatgcgttggccagccttagtaggtgatggccagtcttgttgatggctagcctctattgatggaggtcaacctttgtaggtggaggccaacctttacaagtggaggccaacctttggaggtggaggccaacttttagaggtaaaggccagcctttataggtggaggccagcctttgtaggtgtggaggccaacctttatacatcttttcctagcagaggccagacttccttggtcgaacggaccctgtcttggtctgaaagtcaccttttggtctgccagcttgtgcttaaaccctagctggccatacaagctcatcttggccagccagacatggtggtatagctccttgacgactcgctcaacttctttcgtttgctgcttaacatttttgccatatcttgtaaagagattttgtcttgctattggcaaggctgtattctacatttactttgtcttagcttacgtggacatgtcacgtcttgtggacaaaatctaggataacatatattattcaatagaataacaagtatatatatacaaaactagaagaaactaaaaaaaaactaagaaataaataagaaatcaagtaattatacctattcataatttttacaactaatatacaactgatatatattctaacaaaatatttatttctcaaatgaaaaaaaaaatgatttatgatgataatgatataattgtaactagacttaatcataatttaaaaaattacacatgtcactcaattaaaaaaaaagtacaaaagagaatacaaaagaaaagagagtctccttaacactcctcactaaattatgcatgtatgaataatctctcggttaaatgtaattgtggcattaacattgtcaataagaaatactaaaaaacaccaatagtgtttaacaccctccaaaatatcatatcattattgatgcaattaagtattgaatcacatataattgaagagcattgctattaggcaccagtggtgcctagcaccttctcgacatgtcgcgttgcgattggctagcgat

SEQ ID NO: 312446 - DNA, 2433 bp, Cannabis indica
acaactgtcatttgcaaaaacacggtttttcaatgtcaaccactaaagtatgtcatttcatcttccaccaccactaacttcaatctaaccagaatgctaacatcttcgtgtatatatataaatatattcatataatggtgtgtgaaaattatgttaaatttatatgttgccacaccaataattatattttactagttgagatagtttagtacattatttttaattataatactatcattaactaattttaaatatttattttataaattgttattaatgattgtttaatttttatatcaatttgctcttaattatttacattaatgttagtgttaccatcaacaaaaaagattgatgaattaattatagcactccgtctgcttgtgatagaaatataaatttgaccttagcttctcctttctctatagaagaggtagagaagcagtatttttaacgtctgctggtaaaagttgaggggaggatgggataaatttgaccttagcttctcctttctctatagactctattttcataaaaataggtgttatgattattatttatcaattccagaaattttattgaattatgtggaatatgcatgctatatgtaaatttttatatttttatatttttataccaggtaacaggtagaaatggatcgaatgataattttagtcacatggatataaatttgtatcaagtattgtacgaggcaatattattggatatataagaatattggggtttaacgaaataacagaattgaaccattttaccccaagggttacgagatataacttagaggggaagtaaggacactttagtctttgccctaagtgattagtcatctttttatgaatcattttaggacagtgactcatcctttactggtgacaagctgcttatgaagaaagcaaaaaagaaaaataaaataaaaaggaaacctaagcttaaagtaaaagtcaaaagccaaaggaaagttataaaaaaaataccaaatcaccttctccttctccctctccttcatggcttctgaaccatggctaaaaaccagaattttctaccattttcaagcacctttcttgctgaatttgatcaaggagtttagcccctagctgctccaaacttataaggtaaaacctaacttgagatttattgattttctggagttttcgttagttttcaatggctgtttgtagtagaacatgttggagaagtttagaaaggttaggaaaatattattaattttatttaggaccgtttagaagtggtttgaagtatttttgggtggttgtagcaaatgttatgcaagtttgagttcaaagaactcaaaattgacttggttgtgataacttgaattctgttgcgaattgggttaaggtttcttcatgaaatatgttcattatgatgtcttttggttctctacaaaatttggtaatatttggatcatgaatggatgagttttggtatttccaaactcagacagggaggtttcaagcaatccgatttagtcagttttaggacggccattgtatttgatttgtgttgagaattttattgaggtttcttcatgaattttttttaatgtttttaggtaccctacaaaatttagtaaggtttgacttagaattgaatgcgttaggcaagttttaaaatcaggcagtggagtttcaaaccgtctgatttaggcagaatttaggggtccattttaagactttcctgggaccttgattgagtgttttctcaataattagggtatttccatctatcaggaaaacttttagttttgaattttagtccccgaaattgttagggcaacacttataggttttttttggaaatatcacttaaggcctccgattaccagtagctatttccactcaggttgaccgacacacttgaaatcaaaattgaggtatgactagtataacacgcatacatatgtacatatttaggtttatgtttgccagatgtatgacatatcaattcgaatgatagttggtgtatatatgattgcatcttgatatcgtgaatatatgtgtttggcaattcagaaagtatgaaccaatactaccaacattagtacgctagagtactgagtgcatatggtattatggttggttatacctccaaaattataaactagtgctaccaacactagtacaaagagtattgagtgcatgtggtattatagctagttgtacttatagtatagattgatggtaccaacactagtaggactagagtactgaggtattatggttaatcttactatggtcaagaatgtttgagactcaattatacatatttgacatggtttatgacttgttgataggtgtatgggcgcttagtcacaggtcggttatgttgggaatattttaccaggatttacatttactaacaaatatgttgaattaacatcctaaatatgaa

SEQ ID NO: 312447 - DNA, 2741 bp, Cannabis indica
atctaagatcctggtaaaacaatttccaacactgtctactctgtcaggcaagcatacgagctcaaatcttctcaatggcctcactcattctttggactgcctcaagtccaaggtatctccgttcaacggcttcatcccaatgaatgggtgaacgacactttcttccataaagcatcttgtacggtgtcatgccaatagtactctgataactattgttatacaagaattcaattagagaaagatacttgttccaggaaccctcaaaatctaatacacacgctcatagcatatcctcaagtatttgaatagtcctctcagactgaccatcagtttgaggtagaaagttgtactgaactttaacttggtacccatcgctcgttgcagactttcccagaacttggatgtaaactttggatcttgatccgaaacgattgactttggggcaccatgaagtcgaactattttcttgacatataaatcagcatattgatccaccgtatacgtagtttgcactggtaaaaaatgcgctaattatgcatatcgatccacaattacccaaatagaatcatagtaccttaatgttcttggtaatccaaccacgaagtccatggttatatcttcccatttccactcaggaatcttcagaggttcagcgggtctctgatgctctgccttgaccaactgacaggttaggcatttcgatacatattccacaatgtcacctttcatgcctgaccaccagtagagggcttttacatcttgataaatttttgtggtccccaaatgcagggaatatggtgtggtatgagactcatctagaatatcatgtctgatacttttgtcagctggtacacaaaccctggccttataccttaataatccatctgacaaaattgaaaagtcttttgccgacttagcttcaagcctttctttgtaccccactagctcggaatcactctgttgggtcgtcctaattctttctagcaaatcagactgtaacatgatattggtaagttttccaaccacaaactcaatccatgttctagtcatatcctcagccaacgtcggtgaaatcttcttcaattcataaacttgtcctggaccctttcgacttagagcttctgctaccatatttacttttccagggtggtagagaatctcaccatcataatctttaaccaaatctaattatcgccgatatctcatgttcaaatctttttgagtgagaaagtatttgaggctcttgtgatcggtatagatttcacactttttgccatacaggtaatggcgccaaaatttcagtgcaaaaatgactactgctagtacaatgttgtgagtaggatatcgttgctcatactctttcagttgcctggatgcataagcaatcaccttttcggactgcattaaaacacaacctaacccctgtttcaaagcatcacaataaatcaccaatttctcattactgaccggcaaagttaacactggcgcagtaattaacctctgcttcaattcttggaagctactctcgcacttgtcttacaattcttttgagtcaattctattaagggcgtagaaattttagcaaacccttcaataaatcatctgtagttcctgctaatcccgaaaagcttctaacctcagttgcagacttgggttgaggctaatcccgaaccgcttcaatttacactgaatccactaggacaccatctttattcaccacatgccctaagaagcttacatgggccagccagaactcacattttttaaattttgcataaagcttatgctcccgaagacgttgcaacaccatccgaagatgtttctcgtgtgtctcttctgaatcagagtagattaaaatatcatcaaagaagacaatcacaaaatcatctaaaaagtccttgaacacacggttcattaaatcgatgaatgtcgctggagcatttgttaatcagaaaggacatcaccaagaattcataatgtccatattgggtacgaaaagctatctttggaatatcctcctcccgaatccttaactggtgataaccagatcgaagatcgatcttaaagaagacgctctttccccgcaacttgtcaaataggtcatctatcctcggcaaaagatacttgttctttactgtcaacttattcaattctcggtaatcaatatacattcgtagggtttcgtctttcttcttcacgaacaaaatcggtgcacctcaaggtgaggtactcggtctagtgaactttaaatccaacatcccctgtaactaaactttcaactatttcagctctgtaggtgccattctatacggagctttagatacaggctctgcccccgatattaaataaattttgaaattaatttcccgcttcggtggtaaccctgtaactcctctgaaagacatctagaaattctcgaatcactagaacatgctccgatcttgttggtgtttcgtttgtagtatccaccacactggctaagaaactgatacatccatcccatagcaaatctctcagcttaagtgccgagattaatggtatccaggatccttgaaccttgcccacaaacaagaatgggtcatcaccctccggttcaaaagttaccatctttcttttacaatcgatggttgcaagtccattcctagtataacatcataatcttttaaatttagctcaatcatatcaactgacaattctcatctatccacaaacattggaagggacctaacccacctgctgga

SEQ ID NO: 312448 - DNA, 1132 bp, Cannabis indica
tgatagaactttcaaagaccaaacatgaaatgaaaacttcttcttttattcagatacttcctaaactgaggcatacatggaaattgaatactaatataaaaagtaaagaaaacaaaaaggaacctgaccactcacagtttactgatagtatctgtgaggtggtcagcattccatgatcttggagttcttgttccatttagtctttttaaatggtaggttccatcactaattttgtctataacttcatatgcaccttcccagtttggtcttaagacctccactctgggctcctaagaggctggaaatgcccttctcaaaataaggtcgccaatttcaaatcttttacttttgactttagagttaaaattcctagcaattttgtttttgtacatctggagttagacatgtgattactctcgaatttgtaattcaacaatcatagcctcgtgctaagcttcattgttggaagctttgaactcaaaacaaaatccacttttgagttggaggttttgtggagagattaaaattattccgaccccggaaccgttttatgtttgatgctccgtctacatatatcttccagacttctctctttgggactgacgtttcaggatcgtcatttatccctgtgcactccacaatgaagtcatctaaggcttgacctttcattaaaattctcggctgatgttgtatatcaaattggctcaatttcattgcccacttcaagagtcttcctgacaactctgatttctgtaccacttgacggagagggtggttggtaagtaccctaatggcgtgagcctaaaagtatgatcttatcttatgagaagcaattcgtaagcaaaaagaaagcttctggatcataggatatttggactccgagcccaatagtcttttgcttacgtaatatactaaaagttgtacctttccttcttctcgtactaaggtgacacttatagatgatctgacactgccaggtacaggaaaaatgattctccattaattggtttagacagtactgggtcctgttgggaatattttaccaggatctagatttactaacaggtatgttgaattaacatcctaaatatgaatatctctaaaacaataaaaataaacacataagagttta

SEQ ID NO: 312449 - DNA, 2458 bp, Cannabis indica
tgatgcggagaagggtagtgacattgatccacaagaagctcagcaaactcttgaaatagcggaagttaacttgagtaaagctgaaggcaagagacaaacaattgaggcaaatctagctctcagacgagctaggacacgagtagaggctatcaatatgatgtcgtaactagttagtgtgtccgaataagcaaaataaggtgtataattacataagaaattaatcacttgtcggacacggtaggatctctgtttgataatttaagggtgcataatttgaagtattttaaggacaataattcaaataacaaaagttatgagagttgtttgaataatatagaagcatcactagttgaatacataaaggagattgaacctataattaaagggaaagatcctattgaagtggttttaactaaaaatttagttacatttgatgcttactcgacaagtgatgattttgatttggtgactgaagcagcacccatcctcaatgaagaagttatggaagatcaaatcacagacagtcaaggttgtagatggtcatgagcaaagtgggaaagcatgttattggagggtgaaacacttgtagttgttgatttgagttagtaaacgctattatattatgagctaccaatggatccttatttttcattaataccacatgtaccatattacatcctctacgagctactgaatgttttttcacaaacatatcatacaaagtctagtgtacgtaattggtgctacttttggaacaaactcatgtcattccaagcttgagggcatttacgatgacaacttttaagttgtcttgtaagacacttattatgtgtgttaaccgattggtgatgtggcatggacctaagataagttttcttctctttaaattttttgtatcacattgggtacattgtgtcaaataagttttggggaggggatttatgtttatttagataattttagtgtttcttttagtattgtgtatgtgtatcgtaagtaagccttaaaaaaaactatctatcgttgcttttttaatatagactattaataactgtgtgcttggtctaattgctcttttactaaattttcaatgcttgttaggaaattgagtatgatttataaatatgaataattgaattttttttatacatgcttgactagggttagaggtttgatgggttaaattagatagaacttgcattgtttgacctttgaggcaaaatccttgatgatacgtgctttcaaaaataatttaggcaatttttagaacatttgtgtctttcaagccacccttgtatgatttttccctggtttaccctcattgtgccttggcttgtaattcttgtttcgacacatattatgagctagaaatgacttcattattatctttccttgtccctatctatgccataagcttaacacaagtttgggggaggaatgtaatttggaatacttggggtatgatatgtgaggaataaaaaatatttatgacaaaattttaagaaataaagttagttgtaactactaaaaaagagtaaaagaaaaaaaaatagatacatatacattttgcaattttagtgttgcattaaaaaatagaagagaaaaaaagtgttgttgcaaggttaatgaagaaaggttctcttatgtgctttaaaagaaagggggtttgggggtaataattgaatgtaatggggtgagttgattgaaatgtaaaacattatggtatagttgagtctaaatgatattttccatctacatttacctaaacttaaatgttaaaacccactaatatccttttgatttcaaggaatatgttgttgacattagtggagaaggttaagtgatgcaagcttattgataattagtttttggaattgtatggattgagtcaagcatgtatagtgatttctaattttttattttcaattatgagtcatagtccttttttccaatttgagtgttaaggttaggtgttggagtaattggactaaaaatctagttttgaaacagttgagtcttgcaagtgatggcagtgtggtgtgaataaaagttaaggcttaatttgtttgtctttgttcatttatttttagtttagtgtcgatctttactcgagggcaagtaaaggttaagtttggaggagtttgatgagctagttttaggttcattatatgaagtgttttagatgtgtgtttcgattgattgtattctttttatgcagaattatacttgtttatttacttgtttcaagtttaaatggtgaaactcataatatgagttgaaaatgaaaaagaaacatcttaaatgagataaatatgatgaatttatcatagaattaggagttctaagatataatggtgtgaaaaattttaagttttggatgctcaacacgctctgtttgagatcaaaaatcaagtctgaagcttcaagctaattttttactttgatgcgttcactttca

SEQ ID NO: 312450 - DNA, 2000 bp, Cannabis indica
accataagtggatctttagtttgagggaattttaatagaagtttttatatatgtgtgtggaaataagagtgaaattgagggaatgtgaaaaaatttattggcaacaacttgaaaaagaaaaatctcacagtgtcaatttcaaagaaaaaaaagaaaaaaataaataaaaataaagttgttgcaatattgttgaaacaaatttctctcattgtagtagaaagaaaaaggggatatcgggattatttgtgaaaaaattattagctgacatgattggagaagcttatggtatagacaagctgaaatgaccattccatctatctatacctaagcctaacattataagcctagaaagaccttttgattcttggttgtagattgatttatattagtggagaatagtaagtattgcaagcttatataatatattgggttagtggattcattgttgtatgtggcatgcataaattattttaattgttagttaagtgctatttatggtttcatagtagattgatggttgtatttggcatgcatatattgtttcaattgttagttaattgctattatggtttcatgaattgaaataaaaaatagaagtgtgtcaaggatgtgattgaactaaaattctggattattttacataggtaaaattttcgttcataaccatcactaccacaaacttaccttttagtgacatcatttagtgacatgcacaaaaattgtgggtcactaaaaggttaggggtaagttttagtgacatacataaaaagactcaaaatttattattagcatcctacaacctaggtcactaaagatatatagggtaaatcattcaatttctataatttatttttttaaaaaatattcttatagtgacgcgccaagggcgactgggtatatatttaccgacactcctagcgcgtcactatgtcataaatatatttttttttttttttaaaaataacaaataaagctctgtgtatgtgtaataattaaatatattttgtttttttttttaaaaaaaggcagctacatctcttcattaattatacaaaaagcttcgtatatttcttttagaagaaaaagctgcttatattttgtttcttaaatataaaatgatccattagttatacaaaatttaattgattattataagattttataatagataataaaatataataaatgaatatgaaaagaaaggaaataaaaccctaatcaaaatcaattttcctctatctcttctctttcgcctccctctcattctctttgaagttcctacgcaaccttggcctccaccagcagtctgaccatccagctttacatcatacgattaggctctaccaccgatcgcagggggtcttaaaacctcctaatctatcttctccgccacccgctcaacccttctctgttctgtcttgtctccgaccatctgctccacaagccaagcaaccctacgacgagcttctccgacattaaaatcattaggtcaacataatctatctctcaaatttacttttttttctttctttcctaaaggttctggtctctctaaatgagatgctcgttttttattttattttgcaaaaacgtttggttttttatcctaaagggtttgatcactctatatgagatgctcattttttaatttattttgctgaagagtctgatttttttgtgtactaaatgttttgtataaaattgtagaactaaattgatatatgtttgttatccaaatttctgcactttgacgtggcatcactcgatggtgacacgtggaacgactctgggtatctgctcgcaagatacaggccaaatagggtacctcgtatgcttgctcaagacgaagtagtaagcaacccgtgcataatgacaaacacttagcgaattcagctttcgcatcgtgagtcatcaagggaaaccctataactttgggatcagattacagagatatggcaagctatcccaatcccatgatcagtgtattttgtatttactat

SEQ ID NO: 312451 - DNA, 916 bp, Cannabis indica
attctcattcctatttttatattttcattcctctcaatcaaacgccaccttaattattttctatcaattggcacaacacacacagaaacaaatgaagaaaggtttttattttcttgacatgaaaaaatttccaaaagaagaacagtttggagttgcaaattctcagagaacatgtaaaaggaatctttggtttccataacacaaaatattacattcaatgacacaatcagataaatcaccacatggattagatctgtcttactagatttagccagcgtatatttgctctttctttcttcttccaaatcgtttcattttcacatgtccaaccacaccaagtacaagaaaacttctctctctctttcttcaagcatttttatttttctaattctaattctaattatttgtacctttttttttctttatatataaaataacattaaaaaaatagtcttggttacccccaccttcacaaagtggcatttcatatttcatcttcttgtcctctcttctctactcttttgttctctccaaagctttcatttttaatttttaatttttaaacttttgttcccatgatgaaaaacatttagaccatgttttgcatttctttctgcacttttatttttatttggtcttctcctgatctcttgactgacactaattccatattctctctctcccctgtttattccaaactccaaaaatgagcttcccttcatttctgtaacaacaatctgtatctgggtcttcattagaatcaatcagtattgattttttttcttcttacaaaacaaaaatggtgaacacccagatgctcaaattgattcttgttcttacttcattaacatctttggtattttttgttcttttcatctacttctactgtaaaaaacgaggagaaatgagaatgaag

SEQ ID NO: 312452 - DNA, 1325 bp, Cannabis indica
tctctctctctctctctctctctctctcattacactagtttttttaaccttttttttatctttgattctcattatctctcctggtgtaatcgggttggaactatgtacagcccacttgtgtgcttcaaatagaaaaaaattacataataattaattattatatatttaaataattgataaatatacactacattttttttgctgaaaatatttctatatactacttactaattcatatatatacatataattatatgcaagttcatatatagaaaatccactagagttagtgtactttttagtgtatatatatatttatatataaaaattaatgtgtatttaaatatttgttctagttatttggggttagtcaatcggcctattgtcaattagcggctgatgaatatttgaaaataataaacatatataaacattaaaacaaataagcaaaactcagcaaattaggtttgaattttcaagcactataattatatataatgctccctaatcatcggtttttttttttttttcaattatataattgttttgtactttagcacatatatattctaattttactaaaggaagctttaggttaattatgtcatccatttgtttttaattagtaaatacttcaacgttaagtaaccataggaagatggaaacatatatatacatatatatatacacacatatggacgtaattcaatttacggtagctaaaatataagtttctaatattatattatttgttataatatagtttagattaaaatatttaattgtgatatatacattatatattagtatgagattaatatatattatgtgttggaggttgtattatattatatatagtataataaatatacataaaagttgtaatatatgagaagttataaaatagattataacttaaagatcataattgacactacaacatttttactcagtaccggcggaagtaataccggcggagccaaaccgccggtattaatggggttattaccggcggaaaaggcattccaccggtattacttttgaataattaaaaattaattaaatatttatttaaatttagtatttccggcggaaaatccgcctctaatagtttgggcgggatttttaccgcccaaattttgaaaaggctaataccggcagattattgcctttgccggcgggttccgccggtattagtcaggggattctgatcgttttattaataccgacagaacccctattaataccggcgggtcccgccggtaataaatgtctatataatccccccataactcagaaaacattttccatttccccactccatt

SEQ ID NO: 312453 - DNA, 952 bp, Cannabis indica
tcatgtattccaccctgagtgtatgcaaaatatattaaacagtagacttaagaagtgtcctaattgtaggtttatgtttgcttagtacttatcttatataagttttaaaataaatgtaatttggttcaaattaataatagtagttttttttttatttttatacttcaaaataaattttttttttgtatttttacgaaattctacatagaaattcctgtagcaactaacggagtaacctaaatcgcaactaaaatccgtataacagcccatatagaaaccaccggagcaactcaaaccttaaatttagaaaagaaaaagttaaaaaataatatatgtatagtaattttttcttaataatataatagtgtaatttttttcaaattgtataattaaagcatataatttgtgtcttataagagtttcatttctatttatttatttattttaaacaaaatttttaatttttaaggcaatcaaaatacaacagcatccaatgagaggaaatccttctctagctagctcatttgcctaatcaagcataacctctaataataataataataataataataataattataataaaaaattatgtaaacaagttactgatcattttttgttttatttccgttattatattttctaattaattaattgataaataacatatattagtatgtttatactttttattattatattaacatttttgttgctctttctctagggagtgtttgttcttcgtttttgggcgttgattcttgttgtgaatctgcatggcttctagtagataggggctgttagtgaaaatggtaagatatttgcttggatatcactacaaaaaactgttacttttagtgataattttttagtcacaatataatttttttgtgactaaatgtgacttttagtcacaacaaaatactacttgtgactaaactataatatttag

SEQ ID NO: 312454 - DNA, 1155 bp, Cannabis indica
attaggaagagtgacaaatttagtcattgtattatgagtaagagcagaaaaataatttttatcacaacaaacatgatgtgttgcttccattgtctataatccaagagaaaagagtggtagtacttgagaaattgttcacaacaacattgtcattggatggaaggttgtaattgttgtgtcaacatagagatcaattgttgacactgagctgaggtgagttgtgaaggattaatgtcaaatatggtacttgaaacttggaatgtttgtggcatgttcttctgtggtaaactaggatcagatttacgagtggcaacatgatcagttggttttcgattgccataactaggtagaaaatatattagaaaatagcatttgtctttacaatgacctgatttttggcaattagtgtaataaggactactctttccttttaaatatgtaatgacccaagatatagaacctttctcatcaaaaaagaaaaaaaaaaaaacaaatgcattagcagtcaacaaatttaattaagctcattaaaataaataaatacaaaggagacataaaatctaatattaaaaaaaatattgattatgcctactatataaaaatcaaatctttgatcaagaataaaagtaaataaatccttatataacataaaacaaaaacaaataattaatgcagagaaaacacaagtacaattcacaaaataaatgtgtacctgatgaaacccaggttcatgggttatcccaacgccaatctctaccacgcacgagaaaatcattttcctagcatcgcttccatacaagtgggcatacctcatcaagcaagaataaaaaaccttagccgaagaatggcttatggcgacgcctccaccaccaaacgccatgtcaaatgagtacctcacattcggttgatagctcttcgaattgctcccgacgtaaaaccatcgatcataagtcgtatttcgatagagttttgaccaaattatccacgaagaagaccgtgtcgttgaccccaaacacaaaccacctaacattcggcttgccgcgatcaatgacctccttcaccacatgagcgacctagatagtagactacaatgctcattataattctattattttattaatgatgtattacatccacatgtatatagttatataa

SEQ ID NO: 312455 - DNA, 1273 bp, Cannabis indica
ttcttgccacgtgtcaaatatttatgtccatgtcattaggactactcttggtgtaaacaaccaattttatgtaaatgtgacatagagcctccattcaacaagcgatatttccattcaagttgaccgacacatttgaattaggaaataagataagattattataaggatatacatatgcgcatttagtatacatgttagattatatgaattataaactaccaacactagtatggttgaggtacagagtgtgtgtggtatagtatgttgttacatggtattacatagcgttaccaatactagtacttgatgagtacagagtgtatgtggtataacgatcagttatactcatagtacgaacaaaccctatcaacattagtattagaaagatacttagtgcatgtgctatagaggtcatattattgttaagaatgtttgagactcattttacgcattggacgcaggttaaacttgtaactaggtgtatgggcgcctgagttatgagacgaattatatgattatatattttatgatttttttaccgagtctgtcaactatagatatagtttcatgtgtaaataaaggcaaagtgaaggttgaacaacagtgagtttggagctcattgatgattgtacatatcgagatggttaggcctagagtgttcggttctttgagacgacttaggcttgcattttgtagtcgaaaggcgacaccttttgtttataatatattttgaaatgtttaaaagtataaataagggatccaaaattttttaataaatatgtttatttaagtagaatttatttcatttttagaagtttaaataaatttattttcactaaaatcctttaattagcataggtcgacatagtaatttagaaaatagcatagtgcacctaaacaagtagagtacgttacataaggaagtcaataaaagtttgtaaagattgtcagaataaaaacagctttcgataatccaaagtcaaacataatatcgacattattattgacaaaaagaaaagaatattatttttaaataaaagtgaaagtaaaattttcctcttaaaagtaagaacatggaaggtatttatcaagacaatcttaactgtaaactgcaattcaagaataaatgtaccaatatagataacgtcaactccaacataactttaagctttgactcccttttatttggctttctgagtttccttagttcctggttgtgcttgcttcttttttaattttccttatttgttgggcttgagttgagaaacatagt

SEQ ID NO: 312456 - DNA, 557 bp, Cannabis indica
tttacatataatctggatcccgttttaaattttacattcaaaataacatttataaacatgtcgcaccgcaactacaaaatgaatcctagatcgtcacgagaccgaacactccaggtcgcaccgtctccacatgtacagtcatcccctaagttaagaactcactgatgttcagttttagccttttcgttacctacacatgaaagtaatatctgagagtcaacagactcagtaagaaaagcacataatatacaatatattaccgacttgtatctaggcgcccataggtcaataggtccatttatggacttaagaaggcttctttctcttagaacaaaaggtttgatgaaataatcaaaacctacgactttcaccaaaatgaagatgaaccttgtgtttaccaactcaatgataatcaagtggtagtatttttggtcctttatgttgatgacattttcattattagtaacaatatcaagaaaatgactgacattaaggaatggcttaacactcaattcaaactgaaagatttgggtgaagctagttatgttcttggtatt

SEQ ID NO: 312457 - DNA, 1342 bp, Cannabis indica
atgttcaaatgaaacaactaaatttagaatggataatttctatggcctgtgacataacaaatactcaaataacttatcaactacaagaattcaattcagactcaaacctcattggccttttttcttggttcctttggagcctgtgatgaaatggatctaacaagggaacaagtcctagtgtttgcacaataatttttcatgagttgtgaatgcgaccacggacgaactgtacattctcttgaatactgcctttgatgaagaagagtaaattctgttaaaaacattgttgccaagaaaaacaaaatcattgtccctctttatctttggtattagaaacaagtgaattgatctggcaacaagctcataacccgaaatacataatcgagtgcctgaaattgcccaacaactcattctcatccactatttagcttcctcaataacacaattcttctaatcaacacatagtaatcaactaacacaacaaaagtagtagcaaattcgaattcactaaccgttatttctaagtagaacctgcataatgaaattaacaacaaaaaaaacattcagtttgattttaaccaatagaagaaactaaagtaaggagcaaaaacccacaaacctcacctttgtgatatcattcttatttacattaaaatgtgtttttgagcttgaatttatcacacccgtaagctgcattattcaacagtaaatttgtattgaataaataacaattcaatatatataaaaataagccaacaaaaaaatggtactttatctggtttgatctcagttgaatggaaagcatggtactcccgccatctctgtctcaatactgtcctcaaaacatcagtctccttctttctccataactccatagctgatttgcatgaacctaatatccctcaaatcccagaaataagtatattttttttccagaaaacagtatatgaatttgaatttgttagttcaaaagcattgaatttgaagaagctattggtcacttacccatggtggcttggaaatttcggttcggttgatcacaaatggtggtggtgtttcgaaaccctaagccctaactctgttgagcgactcgagagaagaaggaggaccgagtaaagccctgatcggagccccgactcgtttcgttggactcgataagaaacccgatttgaattgggctcagattcaattaggcccacttatttttcactctttattggtctcaaacttaacacattagggcaaagatttttgggataagctaaggaatattttttttttgaggaaattacactctataccctttttatattgtctgagaatattttaaattaatagatac

SEQ ID NO: 312458 - DNA, 657 bp, Cannabis indica
tctcatatttttaattttttttagaaaaaaaaccatatttaatgcaattaagtttgcatgccatatttatcaaaattttaatttctttttgcatatttttgtaaatagccctaaaattaactagttaattaataataagggtggggcacgtggttgaagtagacaaggtcatcacgttcaacgagagaggattgtagtgttgttagtgtgggcccattaacctcggacgtgcgatgcatgaaattaacaattctttctttctttctcactctctctctatctgatgttcccacgatctaatctatcgatcagacatggcccaactctgcacatgcctccattttctatttattatataattagtgaaaactaaatgaacactcaccccttcatgttcatgatatcaatcattgccattcccatttttcttacttattcattcacatcaatgtttgtcatcgaagaaggactaggatggaagagaaccaaatattccatgttaattaatcatcaaaagagttatttacatttatagggtaacttcgtagatctgtttttgacatttactacaatttttagtctattttctttgttggaagaatgctaattacaacttcctattacaatctcttaatcaacttctacgtccgaaatcac

SEQ ID NO: 312459 - DNA, 738 bp, Cannabis indica
tacggtaattaaagaaaatctaaaaccctattttttttttttggatttaataggatttattttatttttattttattatatataaataaaaaatgacccatgaatttctcataaattattttatttttagtaataaaccatcttatttttaatataaataaaaagtcacccatgaatttttcaaaaaccaagaattttgttatatagtcacaatttatatagaatagatatatagtaaactcaaaagacgataatcccactgaataaaactacaaattatcaggaagaattatttttttagatcttttattttggggaaattttttgaaaaggtttgtcttctggccaaataatgaagagagatttaaggcatttttaagggttggatctgagatggattcttcgagtcgggagaatgacattcaggttgtagattcgacgtcgtctcagtcatctggtggcaacagcaggtgcttgaaatcttgatgtgagcatctattgcagagggaagagaaatagacttttttttattattaattttatatattaattaaaaatagatttaaattattttgttataagtttaaaattaattttttaagtaataagttggaccaataaaaatattattgaaattaatcttgttcactaaggacaatttagtcaatattataaaatttcttcctcaaatttttgtttagggtaccaaataagtataattttaaattataaggtact

SEQ ID NO: 312460 - DNA, 1123 bp, Cannabis indica
ctagattttatcgtccgccttaataataagagaacttaaaaatccatcagaaaattaattaagaaaaacgataaactaacactgaggcctgagcgcttcgaacgttttctctaaatttttttgtctgaaactgtattgaattctaaaaacttaaacttatatttataggaaggtaaagggactaatatataattaaacttattacaaattgcatcgggtaaaaatacaattaccctaaagttaaaatggacctgccacatgtcactctctcattggtgcatgtggacacgtggcgagaggagagaaagccttagtttccaaatttaggatattttgcatttcaatccaagaaacatacttggcccaatcactacatgagtggaccgcaaggaagctctagtttccctttcatatttttttattatttatttaactatttggagaaaaataactcttcacttgcctaaaaaaggaaggctataagagagaattctacacacttgttttagatttagatattttgaaaaattagtctcctattctcttctaagaacttagctgccaatagtagttctctcttctctctaaatttcgtgatccatacttagtgttgtaacaattacctacataactctgttacaatacctagatcattggagaagattgtgcagagaaattagtgctttgattcagattctatgaagattcgagttcagtgattgataatattctgcaatagaaaggaacaagggttaaatcattgaacgggaagagttattaattcccctgcgtgattgtaagtatttgtactcaatctatgtttaatgtaaatcagttagtaacatatttctaagttattttacatattaatttgtaaaaaaatgtgaaaattaaattgattctagcatgtatttttagcaactagtctcaaaactattagttcatactttatattcatagatgaacatgtttaaattggtttatgtgatttgtcgtggttttggatagttttatgttcatgcatattgaatatttgataaaaagaggaaattacacttagtatgggattttaaaagttcttattgttaattctatttttggcatatttaattgacaaaaatat

SEQ ID NO: 312461 - DNA, 1014 bp, Cannabis indica
aacgggagatcaaacctaatcgttaaatttaacagaatattcttttaaaaatttaagtatattctgttaaaccaagaaataccgttagataggcacttttaatatataaagataatacattaatatccaatatataaataattaaaataaatatctaatatttataatttttttaaaaaaataacaaatatatataatataccataaaacaaaacaaacttttaaaaattcatcattttaacaaacttgaaataaattatgcactttttaaggagatatgaaaatatctcgaaactattttttaaaataatttatctaattaatattatttaaataatataaaataagataataattttataaaataatatatatacatacattattaacaaagaatttcgttaataataatgaagttcttaaaaataaaattaattgagatcgaaagaattactttagtagaataaataataacaattaaataagataagataatttttatatagtttttgtagttaaatctacacagtgcacgagtccatattaattatgagtcataaatctttactgtatacaagatatataatgaaataatgagattctacccttgttcttttagagtgatcttttagaacctaattgatcgtcccccatattgtaggttatgtccgcattatatgatttttaggaattatacagttatttccttttagacttatctaaataattggttacaaaatgcaaacaatctccacgtttcatatatatttacaacatgtgggataaatgaattaactgctagtaacactttttttccttatctaaaagcatttgtttttatcaaactgttcttctattcatctcttgaaggttgctcgcaaataatatttgttaaatatgtgatcccattcctcaaatgcttctcatgtaacgaacgatctattgctttattcatcgtagtcgtttatgagcaatctgagatggatcgtcttttgctcatatcccttagtcttt

SEQ ID NO: 312462 - DNA, 1108 bp, Cannabis indica
acaacataatcaccctaccacatgtccctcatccaatcgagcaaaaacatatatgacccattacctaaaagaacagccaactataaccacacaccaataactatgagcaactgacaagtaaccaaacaatgtaagatagactcacttgccaagtaacacactgaacacaacaacgacaccacatacttcaacttcaaattagactctcgttgggaagcaccattaatggcccaccacacaaaattctttgcctttggaggtaagcgcaacttccaaaacaccaccatctcctaatccacccactactaaaaaattagattttccttgattattttaaataatcaggtaaagtatactcatcgatctctaagctaacgcctatttgactgtcgcaaggtagaactttttgcgactgtgtaaaaccgtcagcaatataaagtagcattatcgatgattttctaccatcacctatactataggcaacggtaaaaaaccgttggctatacttgtcaaaataatcaagcaataataccttgaaggtaatgaaccctctatcgaatccatcacttccagtgatttttatacaaactttgagcctctaaatcatcttttttagtagaaacatcggcgttcttcccaatcaaagatgaagaagaagaagaagaagaagaagaagaacaacaacaacaacaacaacaacaacataaggcatccgcgatagctctgcattcttctgtcgtcgaaccagatggctccaactcaagcctccgattactttcaatagccatcgtcatgagaaaaaaaaagaagaaaaagatgttgatcatatcagagaatgaatagaatgagatctcgtcaaaatctaagaacaacaataaaaaaagtgagcaaattattcttatcattagctttcactgaaagaggaagtggttcgtggtcggcctttgggtcttgttgggagaggagttggcgatggttgtgggtttctcaccgtttgaatgataaatctatgagaggagagaggacgaggtggcggaagaggtggttgcactgttcaaatgtgagagagagagagagagagagagagagagagagagagatatgagta

SEQ ID NO: 312463 - DNA, 924 bp, Cannabis indica
tcacatgtccaagtcttagatgacatagtctagtgctttccatatctagatttttgacaaacatgccactctcactagtgactgttttaccttttagataatagataccatttctcaattctcctttgatgataactagggatcctttcatgaccttaaatgaacagtctatctttatagtatgacccatttcaattagttctccaatggaaagaaaatttatttcaagtcaggaacatacctgacatcttggatggttttgacttgatcatcatggagcttgattcttatagttccaattccagcaactctgcatactttattatctcctaataggattgctcccccatcaagcttcttgaaactgtgaaacagttctgttttgggtgtcatgtggaatgaaatcctgaatcatgtatccatgagtctccaaattcttggctagatacaaccaaaatatctgctgactcataaccatctgtcactacccatgtatctcctctttcattatttttgtctctgaagtttgacctttaatgctctgcattcatccctataatgaccctctttcttgcaatagtgacactgttttcctatcttggaatttgatcttggtttgtgaatttgatttgagccttcgtattgcttgcctttgtgacttgtcttgtgaaaacaacctctattttttgttgtttttgatctgcctctaacaaacagctcttcaccatagccattgatttttcttcactccttttctgaatctcttttgagtttgatgttgacttaacttctgtcatggttaatgattcttttcaatatagaatagtgtctacaaaatcttcataactctttggtataatgaactcagcaataggattctttggtcctcatcttcaatcttgactcctatggtactgagatcca

SEQ ID NO: 312464 - DNA, 1837 bp, Cannabis indica
acctgtgtttttcaggttgatctcataacaactctcacaaaattgagtggatttggccaacaaatcaattatgaagcatatacatatgctatcccaaaagttgacatcacgaaactcaaattgtagagggtatagtgaagcatcactaaattagagtaccaaccaacaagacccaaatgtccattgcaattctgtctgaaatggagtgtgtacaatgtatggacgctcccataaaattgaaaactcaacattatttaatattccaattctaaactataaattacccaccgtaactctttaaaaaaaacaagcaattttcttgtttttactgaattgtgatttcatagtagtttcaaaaccaaagaacaatcctgcaactacattctacacatcctcagaagagtgtaagtagaaaataatgtggccaccttgtctaggcttaggagtaataagctcaagtccacccatgaatggcctcaaagggttaggtctattataatgacagagccatcttcttgttggtaattctcaagcagacatacaagcatctgtctgactgcaccagccgttgcatttaaggtgtgaacaaactgtggcggagcaagattactctttcccatttaggggtactccctgatattggataacaagctcatgaaggattaagaaatgttactaacaaggtctaaattgatcaatttatcatagaaatctcacaagtcataagtaggattcgcatgttggagagagagaaagaaaaattagtttgcaataacttaccaaaccgttctaaaccaggcatccattccatgcctcagtatcctatttgtggtatgcaaggggcgcctaaatcttgagaagcaacatccaaggttctgccaagaaaattaatgaatcttgataatgttaggacaaaatgtaattactttattaatgtgaaagtaattacatcaagatttgtacacaaaattaaccacaacatgcttaaaatatttagacactttttttttttgggtcatgatcactttatttgatcagttccatctaagaaagatgatcatctattctaaggacatgtttagctaatttataaattgaaaattttaaagttatgactaatatgagagagaaaaaaatatcttagaaaactagataataaagctttaatgtacgaaagtaaacacctttaacccatgttaatcgtaccaaaaaaagcaagagcttttacaaaattaaaagattgataaatttagtaacttcttaagaagatttaagaagatgttaaaagaagtaatttaaaatgtatggtaaatataagttcatgatatagtaatttttttaagaaaattaattgtaatgaaaaaacctatcttattaaaattcttggattcttcaataatcaaataagtaaaggttgtacaaaaatatttaccttttgtccatcgggtaaaaacacacctataaaataaatatataaaattcaattaaaatactacttgatgataatatttaatatttaagagtgtctatataatttgtaatctatggttctaaaccctaactaatctggagcaaatcatttgagaccggaccacatgaattcggtgtgaatgatttgatctattcaaactattttaaattttttagttcggtcacggttttagaaattttagtagtggttcaaactaaatcattctgtataattattttatatatacttaatatatatttttgggtaaatatcattttgaaccctgtgttttgcaaaagttacagattagaccttgtattttgttaaatgacaaaatggaccctgtattttctaaaatagtaaaaa

SEQ ID NO: 312465 - DNA, 1333 bp, Cannabis indica
gttcaagttcagaaaattcataccaaccacaaccctgcagatatgttcaccaaggcagtgactcatgtcaagttcaaacactgcctcgatttacttcacattgcaggttgtgattaaaccttgttcagatcaaggaggatttgttgtttatgatctatctcatgtcaactaaattcacacgtgcaatttaggagttagttggtcaaggttgttggtcgattattacagttaattttgttaactgtttttagttgtaatctttgtattctttgcctttcagttcagattgtataaatagttagatttttaattctttggtgtgattaagccttgtacattctctctcattgtaattctctccaagatcaaataaaataattcagattattcaaactgttcttattttttgttcattagttcttagctggtttttgtaccagtactgctgcaacattgctacagcattgtatgctgttagttttgttcttttgcattgattcttagtattcaatctcgattgcaaaggtgatcatcgatctcaacaacttttgtgatagtttttctttcttttttttacttaaaattgataatgaaaaattaaaataccatttaatacatgttcttatttgtattttttttatctatttaaaaaaatggacaagagctcgcgtgactcttcctttccaagaaaaaatatattcttttatacatactagttcgacagggtcatcgttgtggttatcaacctccgacaaagtagatagtgcctaagctgagtaacactcaactataacatttaatttctctctaagatgcaattttattgtctttatctgattatcgaaatgttgctggatacggtgatcaaactccatcaacatcttcgcaagctctattttattcattattcgcatgtgcgaattgttttgttgtctttaatttgggttttggcagaccattccgtcttaaatattatcgctactatatattctttcaactttgagattggagtttcagttctttttttactaacaaattaggttttagtttcaatttctacgggaggagataacattttgatttcatagtttgattaggttattttgatttcatagtttgattaggttttagttttgattttcacgggaggggataccattttaatttcatagtttgattattgttttgtatttttaatttatatttttttaacgtttaacagaagttaacctaaggattgaaaatgtttaattagctattacttttctcttcctgttataaaataataacgataaaccaataactagggttagatagtcacttttaatatata

SEQ ID NO: 312466 - DNA, 1027 bp, Cannabis indica
atggattgaactggtattaataaaaattaacaataaataaatcaacatgcgtataagattgtaaatatgtgcttgctgttctagcccggccgacccatagttttcgtactttttaaaatatgggtcttgttgtatcagaccataaaaagtatgggtctcgttgtgttagtccataaaattatttcatgaaatggcacaacccgcaagtaaagtctgatagtttcgtgtcatgctcgaattcatatcgcgctttatttggcctgacccatttttcttaaataaaccaacctgaatttttatacgggctcaaattgctcaaatttgtatctcatattttgtatttttattacaattaatgagctgattactaagatatatatgtatttatagttaattatttttatatttttttcaataataattacacataatcatataaaaaattattataattgttagaatttgaatattaatatcattttaactaataaattattattcatcattgttattattattattaaattatcaaatttttttaatgtatcatgctttcaagttaatctattcgtacttaccgtgtcgtgctataaaattattacatgacacgacacgacccgtaagtccaatagttttgtgccgtgctcaaattcgtattgtgctttatttggactgacgcacatttcttaaatagatcaacctattttcttatacaagctcaaattcatgccttatgattactaaaatatatatgtttgttatagttaagtactttcacatattttttcaataagtgttacacacaatcatagaaaaaataagtataattgttagaatttgaatagtaatattatttgaattgataaataaatatttattattgttattattattattaaattatcgagttttttaatgtgttatatatgctttcgatctaatttattcgtgtttacgtgtcgtgctttcaagcttgttgtatttattagaatatttctaattaagaaaataaaataatattattgat
